United States Patent Application Publication US 2010/0144538 A1 - sequence listing, part 3

SEQ ID NO: 3321 - DNA, 2273 bp, Homo sapiens
tttagatatagatttttttcccctttttccaggtttgattactcaggagttggaagttcagatggtaactcagaggaaagcacactggggaaatggagaaaagatgttctttctataattgatgacttagctgatgggccacagattcttgttggatctagccttggagggtggcttatgcttcatgctgcaattgcacgaccagagaaggtcgtggctcttattggtgtagctacagctgcagataccttagtgacaaagtttaatcagcttcctgttgagctaaaaaaggaagtagagatgaaaggtgtgtggagcatgccatcaaaatactctgaagaaggagtttataacgttcagtacagtttcattaaagaagctgaacatcactgcttgttacatagcccaattcctgtgaactgccccataagattgctccatggcatgaaggatgacattgtaccttggcatacatcaatgcaggttgccgatcgagtactcagcacagatgtggatgtcatcctccgaaaacacagtgatcaccgaatgagggaaaaagcagacattcaacttcttgtttacactattgatgacttaattgataagctctcaactatagttaactagtatcacatgtttagttggtatgtaaactaatgtatccagaagattggaagagggataagaaatgaaagatcctgatactttaggtttttccctttcctctattttgtaaatataagatgagtattatttaatgatgtatttgcataagtaatgcaaattgtgaagaaggaccagctgctgtttagaaaattttctccttccttctgtccttgattttttttcattaaagtatttcctttttttaattcaagaaaagtttacctttcttatgcttatgttagctatgccagctcttaattgcatccttttctaattaggattattaataaagcgtgaatattttgttttttattatagacagaaatttgtaacattacttctgatttgaaaatgcaattcacaaaatatagggaaatttttattgaagtaaatttgaaatgatggagaaatttcagaagcataataaagttcacaataaggataatactttatataatgtataaagtatatataatataatatatatgttatataaactgcacattatattcaaacttaaaattgagctttttttttaaaggcccaaaattgtacagtgatacaaggagctatttctaaaatttggcttatgtataatatatttaaatggggaatttcatctaaaacaatgatgtagtatttttaatattctgattggtaaaattaaagaggaaattaatctttatatattatttcttgcagaaacattcattattttattaatattgccctaagtacaactaggcaagtgattgccacctaaatcagaagacgttctaaagtcagtaagaaagtgtgaaatgctagtataaaggttattttttttctttcctaaataactaaagtgaggtgtagattgagccttgatattatttagttaatgttttttattaattaattttggctggactttatttagcttgattaggttattatctgtcaaaccttttaagttgacaacatgactcatatatatacatgtgtataagatgagcatgtgtcgaagacttattcgactcattaatgaggaaaccagcagatagtaaacctggttcaaagtacaattcaagaaactgagtatttatgggcattgaagaaaaaatgttgagataaaattgctgtgcagaaaaaagtgttaatgaagccgacctgactacttaaccttagagacctgctttacaaggttggcccttgattggcatctgggaacttggagttcagggggcttccaccattcccagaactgatcaaagtagcttactatatctaaactgtaaaacaatatagtttctcctgaacacctgctttccttctgggagtctggaattttggtatgtgccaggcagagactacctttgtgaccagctcccagtaaaaaccccaggcactcagtctctaacaagcttttctggttgacagtgtttcacaagtgctgttacaactggttgctgggagaattaagctcatcctctgtgattccactggcggaggattcttggaagcttgcacttagtttcccctgacttcaccccatgtgtcttttttcctttgctgattttgttttgtatcctttcactgtaataaatcatggccgtgagcagaactgt

SEQ ID NO: 3322 - protein, 149 aa, Homo sapiens; identical to SEQ ID NO: 3310

SEQ ID NO: 3323 - DNA, 1121 bp, Homo sapiens
ggggaaagtagcttggctattcccgacagatggacagttggtagaacggaccctcccacaggccctcatccccttgtgcagctgctggcctcgtagacaatcggctgtctccccagaagagggaaagaattgtgcagatgagaaagaggctctcagcgggagggaggcaggcgggcttgattgacacaggagagggctggctttttggagggctcttagcaacggccctggttgagccccctcagccatgagaaaatcaaatcaatgtgccattcttccaggcgcgaggcagcagcggctgcagttcaacatgaaaggaggcttcctccctgcctgctaattacctgctcttcccgatctcatcgtttctgcctttgcaaagtgctactgagaagggggaagaaacgtccgccacccatcccccttgctgcctgggggttcagacttgattagatggctaacaggggcccgagctatggcttaagccgagaggtgcaggagaagatcgagcagaagtatgatgcggacctggagaacaagctggtggactggatcatcctgcagtgcgccgaggacatagagcacccgccccccggcagggcccattttcagaaatggttaatggacgggacggtcctgtgcaagctgataaatagtttatacccaccaggacaagagcccatacccaagatctcagagtcaaagatggcttttaagcagatggagcaaatctcccagttcctaaaagctgcggagacctatggtgtcagaaccaccgacatctttcagacggtggatctatgggaagggaaggacatggcagctgtgcagaggaccctgatggctttaggcagcgttgcagtcaccaaggatgatggctgctatcggggagagccatcctggtttttgcaagtgctgcatttccgccgagaatccgcgttgcctactgctgccacctcctgttcatttagaactatgcaaagactccgcttccgttttcctgagctcctcgggccccagagtctctgtttgattatttatttatttatttatttatttgccaaaaattctcctcttcaacttatagaatgcacctaataaagtaattagtcttgtgtctt

SEQ ID NO: 3324 - protein, 214 aa, Homo sapiens
MANRGPSYGLSREVQEKIEQKYDADLENKLVDWIILQCAEDIEHPPPGRAHFQKWLMDGTVLCKLINSLYPPGQEPIPKISESKMAFKQMEQISQFLKAAETYGVRTTDIFQTVDLWEGKDMAAVQRTLMALGSVAVTKDDGCYRGEPSWFLQVLHFRRESALPTAATSCSFRTMQRLRFRFPELLGPQSLCLIIYLFIYLFAKNSPLQLIECT

SEQ ID NO: 3325 - DNA, 1392 bp, Homo sapiens
ggggaaagtagcttggctattcccgacagatggacagttggtagaacggaccctcccacaggccctcatccccttgtgcagctgctggcctcgtagacaatcggctgtctccccagaagagggaaagaattgtgcagatgagaaagaggctctcagcgggagggaggcaggcgggcttgattgacacaggagagggctggctttttggagggctcttagcaacggccctggttgagccccctcagccatgagaaaatcaaatcaatgtgccattcttccaggcgcgaggcagcagcggctgcagttcaacatgaaaggaggcttcctccctgcctgctaattacctgctcttcccgatctcatcgtttctgcctttgcaaagtgctactgagaagggggaagaaacgtccgccacccatcccccttgctgcctgggggttcagacttgattagatggctaacaggggcccgagctatggcttaagccgagaggtgcaggagaagatcgagcagaagtatgatgcggacctggagaacaagctggtggactggatcatcctgcagtgcgccgaggacatagagcacccgccccccggcagggcccattttcagaaatggttaatggacgggacggtcctgtgcaagctgataaatagtttatacccaccaggacaagagcccatacccaagatctcagagtcaaagatggcttttaagcagatggagcaaatctcccagttcctaaaagctgcggagacctatggtgtcagaaccaccgacatctttcagacggtggatctatgggaagggaaggacatggcagctgtgcagaggaccctgatggctttaggcagcgttgcagtcaccaaggatgatggctgctatcggggagagccatcctggtttcacaggaaagcccagcagaatcggagaggcttttccgaggagcagcttcgccagggacagaacgtaataggcctgcagatgggcagcaacaagggagcctcccaggcgggcatgacagggtacgggatgcccaggcagatcatgtaggacgcggcatcctgcccctggtagagaggacgaatgttccacaccatggtctctacgaaaaagaaatagttagtcaccttctgaccttctcctctttctcaaagccttctgtccctggtttttgcaagtgctgcatttccgccgagaatccgcgttgcctactgctgccacctcctgttcatttagaactatgcaaagactccgcttccgttttcctgagctcctcgggccccagagtctctgtttgattatttatttatttatttatttatttgccaaaaattctcctcttcaacttatagaatgcacctaataaagtaattagtcttgtgtcttaca

SEQ ID NO: 3326 - protein, 199 aa, Homo sapiens; identical to SEQ ID NO: 369

SEQ ID NO: 3327 - DNA, 1032 bp, Homo sapiens
tggacagttggtagaacggaccctcccacaggccctcatccccttgtgcagctgctggcctcgtagacaatcggctgtctccccagaagagggaaagaattgtgcagatgagaaagaggctctcagcgggagggaggcaggcgggcttgattgacacaggagagggctggctttttggagggctcttagcaacggccctggttgagccccctcagccatgagaaaatcaaatcaatgtgccattcttccaggcgcgaggcagcagcggctgcagttcaacatgaaaggaggcttcctccctgcctgctaattacctgctcttcccgatctcatcgtttctgcctttgcaaagtgctactgagaagggggaagaaacgtccgccacccatcccccttgctgcctgggggttcagacttgattgtgaaaccccattggcttcattggctccttgatttaaaccacgcccggctttctgccctctttgctgctgctgggccaggttgcccagccatatcccagccccgtctgcagggagccggaggctgctgctgctgctattgtgtggatgccgcgcgtgtcttctcttctttccagagatggctaacaggggcccgagctatggcttaagccgagaggtgcaggagaagatcgagcagaagtatgatgcggacctggagaacaagctggtggactggatcatcctgcagtgcgccgaggacatagagcacccgccccccggcagggcccattttcagaaatggttaatggacgggacggtcctgtgcaagctgataaatagtttatacccaccaggacaagagcccatacccaagatctcagagtcaaagatggcttttaagcagatggagcaaatctcccagttcctaaaagctgcggagacctatggtgtcagaaccaccgacatctttcagacggtggatctatgggaagggaaggacatggcagctgtgcagaggaccctgatggctttaggcagcgttgcagtcaccaaggatgatggctgctatcgg

SEQ ID NO: 3328 - protein, 144 aa, Homo sapiens
MANRGPSYGLSREVQEKIEQKYDADLENKLVDWIILQCAEDIEHPPPGRAHFQKWLMDGTVLCKLINSLYPPGQEPIPKISESKMAFKQMEQISQFLKAAETYGVRTTDIFQTVDLWEGKDMAAVQRTLMALGSVAVTKDDGCY

SEQ ID NO: 3329 - DNA, 1536 bp, Homo sapiens
tggacagttggtagaacggaccctcccacaggccctcatccccttgtgcagctgctggcctcgtagacaatcggctgtctccccagaagagggaaagaattgtgcagatgagaaagaggctctcagcgggagggaggcaggcgggcttgattgacacaggagagggctggctttttggagggctcttagcaacggccctggttgagccccctcagccatgagaaaatcaaatcaatgtgccattcttccaggcgcgaggcagcagcggctgcagttcaacatgaaaggaggcttcctccctgcctgctaattacctgctcttcccgatctcatcgtttctgcctttgcaaagtgctactgagaagggggaagaaacgtccgccacccatcccccttgctgcctgggggttcagacttgattgtgaaaccccattggcttcattggctccttgatttaaaccacgcccggctttctgccctctttgctgctgctgggccaggttgcccagccatatcccagccccgtctgcagggagccggaggctgctgctgctgctattgtgtggatgccgcgcgtgtcttctcttctttccagagatggctaacaggggcccgagctatggcttaagccgagaggtgcaggagaagatcgagcagaagtatgatgcggacctggagaacaagctggtggactggatcatcctgcagtgcgccgaggacatagagcacccgccccccggcagggcccattttcagaaatggttaatggacgggacggtcctgtgcaagctgataaatagtttatacccaccaggacaagagcccatacccaagatctcagagtcaaagatggcttttaagcagatggagcaaatctcccagttcctaaaagctgcggagacctatggtgtcagaaccaccgacatctttcagacggtggatctatgggaagggaaggacatggcagctgtgcagaggaccctgatggctttaggcagcgttgcagtcaccaaggatgatggctgctatcggggagagccatcctggtttcacaggaaagcccagcagaatcggagaggcttttccgaggagcagcttcgccagggacagaacgtaataggcctgcagatgggcagcaacaagggagcctcccaggcgggcatgacagggtacgggatgcccaggcagatcatgtaggacgcggcatcctgcccctggtagagaggacgaatgttccacaccatggtctctacgaaaaagaaatagttagtcaccttctgaccttctcctctttctcaaagccttctgtccctggtttttgcaagtgctgcatttccgccgagaatccgcgttgcctactgctgccacctcctgttcatttagaactatgcaaagactccgcttccgttttcctgagctcctcgggccccagagtctctgtttgattatttatttatttatttatttatttgccaaaaattctcctcttcaacttatagaatgcacctaataaagtaattagtcttgtgtcttaca

SEQ ID NO: 3330 - protein, 199 aa, Homo sapiens; identical to SEQ ID NO: 369

SEQ ID NO: 3331 - DNA, 1356 bp, Homo sapiens
gtgcagatgagaaagaggctctcagcgggagggaggcaggcgggcttgattgacacaggagagggctggctttttggagggctcttagcaacggccctggttgagccccctcagccatgagaaaatcaaatcaatgtgccattcttccaggcgcgaggcagcagcggctgcagttcaacatgaaaggaggcttcctccctgcctgctaattacctgctcttcccgatctcatcgtttctgcctttgcaaagtgctactgagaagggggaagaaacgtccgccacccatcccccttgctgcctgggggttcagacttgattgttgcccagccatatcccagccccgtctgcagggagccggaggctgctgctgctgctattgtgtggatgccgcgcgtgtcttctcttctttccagagatggctaacaggggcccgagctatggcttaagccgagaggtgcaggagaagatcgagcagaagtatgatgcggacctggagaacaagctggtggactggatcatcctgcagtgcgccgaggacatagagcacccgccccccggcagggcccattttcagaaatggttaatggacgggacggtcctgtgcaagctgataaatagtttatacccaccaggacaagagcccatacccaagatctcagagtcaaagatggcttttaagcagatggagcaaatctcccagttcctaaaagctgcggagacctatggtgtcagaaccaccgacatctttcagacggtggatctatgggaagggaaggacatggcagctgtgcagaggaccctgatggctttaggcagcgttgcagtcaccaaggatgatggctgctatcggggagagccatcctggtttcacaggaaagcccagcagaatcggagaggcttttccgaggagcagcttcgccagggacagaacgtaataggcctgcagatgggcagcaacaagggagcctcccaggcgggcatgacagggtacgggatgcccaggcagatcatgtaggacgcggcatcctgcccctggtagagaggacgaatgttccacaccatggtctctacgaaaaagaaatagttagtcaccttctgaccttctcctctttctcaaagccttctgtccctggtttttgcaagtgctgcatttccgccgagaatccgcgttgcctactgctgccacctcctgttcatttagaactatgcaaagactccgcttccgttttcctgagctcctcgggccccagagtctctgtttgattatttatttatttatttatttatttgccaaaaattctcctcttcaacttatagaatgcacctaataaagtaattagtcttgtgtcttaca

SEQ ID NO: 3332 - protein, 199 aa, Homo sapiens; identical to SEQ ID NO: 369

SEQ ID NO: 3333 - DNA, 920 bp, Homo sapiens
cattcttccaggcgcgaggcagcagcggctgcagttcaacatgaaaggaggcttcctccctgcctgctaattacctgctcttcccgatctcatcgtttctgcctttgcaaagtgctactgagaagggggaagaaacgtccgccacccatcccccttgctgcctgggggttcagacttgattgtgagtccgtgttatatcatctggtctcattgataggcgggatagggagggggattccagcccccctggaccggccggaggtttattctagagttactggcgggtagctgtgcttttctttcccgtttgtaggtgaaaccccattggcttcattggctccttgatttaaaccacgcccggctttctgccctctttgctgctgctgggccaggttgcccagccatatcccagccccgtctgcagggagccggaggctgctgctgctgctattgtgtggatgccgcgcgtgtcttctcttctttccagagatggctaacaggggcccgagctatggcttaagccgagaggtgcaggagaagatcgagcagaagtatgatgcggacctggagaacaagctggtggactggatcatcctgcagtgcgccgaggacatagagcacccgccccccggcagggcccattttcagaaatggttaatggacgggacggtcctgtgcaagctgataaatagtttatacccaccaggacaagagcccatacccaagatctcagagtcaaagatggcttttaagcagatggagcaaatctcccagttcctaaaagctgcggagacctatggtgtcagaaccaccgacatctttcagacggtggatctatgggaagggaaggacatggcagctgtgcagaggaccctgatggctttaggcagcgttgcagtcaccaaggatgatggctgcta

SEQ ID NO: 3334 - protein, 142 aa, Homo sapiens
MANRGPSYGLSREVQEKIEQKYDADLENKLVDWIILQCAEDIEHPPPGRAHFQKWLMDGTVLCKLINSLYPPGQEPIPKISESKMAFKQMEQISQFLKAAETYGVRTTDIFQTVDLWEGKDMAAVQRTLMALGSVAVTKDDG

SEQ ID NO: 3335 - DNA, 1428 bp, Homo sapiens
cattcttccaggcgcgaggcagcagcggctgcagttcaacatgaaaggaggcttcctccctgcctgctaattacctgctcttcccgatctcatcgtttctgcctttgcaaagtgctactgagaagggggaagaaacgtccgccacccatcccccttgctgcctgggggttcagacttgattgtgagtccgtgttatatcatctggtctcattgataggcgggatagggagggggattccagcccccctggaccggccggaggtttattctagagttactggcgggtagctgtgcttttctttcccgtttgtaggtgaaaccccattggcttcattggctccttgatttaaaccacgcccggctttctgccctctttgctgctgctgggccaggttgcccagccatatcccagccccgtctgcagggagccggaggctgctgctgctgctattgtgtggatgccgcgcgtgtcttctcttctttccagagatggctaacaggggcccgagctatggcttaagccgagaggtgcaggagaagatcgagcagaagtatgatgcggacctggagaacaagctggtggactggatcatcctgcagtgcgccgaggacatagagcacccgccccccggcagggcccattttcagaaatggttaatggacgggacggtcctgtgcaagctgataaatagtttatacccaccaggacaagagcccatacccaagatctcagagtcaaagatggcttttaagcagatggagcaaatctcccagttcctaaaagctgcggagacctatggtgtcagaaccaccgacatctttcagacggtggatctatgggaagggaaggacatggcagctgtgcagaggaccctgatggctttaggcagcgttgcagtcaccaaggatgatggctgctatcggggagagccatcctggtttcacaggaaagcccagcagaatcggagaggcttttccgaggagcagcttcgccagggacagaacgtaataggcctgcagatgggcagcaacaagggagcctcccaggcgggcatgacagggtacgggatgcccaggcagatcatgtaggacgcggcatcctgcccctggtagagaggacgaatgttccacaccatggtctctacgaaaaagaaatagttagtcaccttctgaccttctcctctttctcaaagccttctgtccctggtttttgcaagtgctgcatttccgccgagaatccgcgttgcctactgctgccacctcctgttcatttagaactatgcaaagactccgcttccgttttcctgagctcctcgggccccagagtctctgtttgattatttatttatttatttatttatttgccaaaaattctcctcttcaacttatagaatgcacctaataaagtaattagtcttgtgtcttaca

SEQ ID NO: 3336 - protein, 199 aa, Homo sapiens; identical to SEQ ID NO: 369

SEQ ID NO: 3337 - DNA, 4129 bp, Homo sapiens
agttttagcagatggcctcaggcctcccttgactgtcctgtggtgtccaagttaggtcaaaccaccccatcatggctggagtctttcggtgcccacttctggccaactgtactcagtttcttggtggaagccagccaagagtagaatgtttccttctggacactgggcacagggaagctgtgtttagtcaccccgcaggcagctacttccaaagtacctggccctgggttcactcagcatctggtccttggggcagccgatgggaccgttgcttgctggtcccagcagtctattctacttccggaggctacaagcttctgaccatcccaccatagtcacctggaggttttgctcctgtttggtggcctctcatctgtcaccttttctgatggagagtagtgggtcagcctcgaatcactccctgggagctctcgccttcattcagctctgctgtctgactcttgcagctggaaagcgaaatccagcggctctctgaggcccatgagagcctgaccagagcctcctccaagcgtgaggccctggagaagaccatgcggaacaagatggacagtgaaatgaggaggctgcaagacttcaaccgggatcttagagagagattggaatctgcaaatcgccgcctggcaagcaagacacaggaggcccaggccggcagtcaggacatggtggccaagctgcttgctcagagctacgaacagcagcaggagcaagagaagctggagcgagagatggcactgctgcgcggcgccatcgaggaccagcggcggcgtgccgagctgctggagcaggctctgggcaatgcgcagggccgggcagctcgagccgaagaggagctgcgcaagaagcaggcctatgtggagaaagtggagcggctgcagcaggcgctcgggcagctgcaggcagcctgtgagaagcgggagcagctggagctgcgtctgcggactcgcctggagcaggaactcaaggccctgcgtgcacagcagagacaggcaggtgccccaggtggtagcagtggcagtggtgggtctccagagctcagcgccctgcgactgtcagaacaactgcgagagaaggaggagcagatcctggcgctggaggccgacatgaccaagtgggagcagaagtatttggaggaacgtgccatgaggcagtttgccatggatgcggctgccacggctgctgctcagcgtgacaccactctcatccgacattccccccagccctcacccagcagcagcttcaatgagggtctgctcactggtggccacaggcatcaggagatggaaagcaggttaaaggtgctccatgcccagatcctggagaaggatgcagtgatcaaggtccttcagcagcgctccaggagagaccctggcaaggccatccagggctccctgcggcctgccaagtcggtgccatctgttttcgcggctgcggcagcaggaacccagggctggcaagggctctcttctagtgagcgacaaacagcagacgcccctgctcggctgactacagcagacagagcacccacagaggagccagtggtcacagctccccctgctgcccatgccaaacacgggagcagagatgggagcacccagactgagggccccccagacagcacctccacctgcctgccaccggagcctgacagccttctggggtgcagcagtagccagagagcagcctctctggactctgtagctacatccagagtccaggacttgtcagacatggtggagatactgatctgaaggaggtggtgcttcaggactctgagccattctctcccctcctctgccctgtgccactctcagccatttcagcagccccgtcaaccgctgctccgtccctttccccagccagacactcattcccattgaccatctggtcccaggagctcaggaggaggaccccaggggagaggagagctgtgagagcaccggcacccccagaagactctgcttcttagcccacattcctccgggccttatggagaatgaggattcagccttgacttcttgcccaaggcctgctactggggtagcaactgacagctcagaaaggagctgagctccctctgccctgccagttgtcagtcaggcagggagggagtggctgtgttggtttggggaactaatttccacggacggctgcccgtggacaccaggtggactggttcactaatcaagtcagccatattgttctctggctaagtttggttccagccaacgtcatctgctcttcagttcctcactgccttcttgggatactaagacttgaattttttggggactattaagggtgttagtcttggagaagacacagcctcaccttctcacttgctgtgggtgaggggccatttaagtggactgggagacagtgcgcagtttgtatataattccctttcttgtggaacagaagactgaggcctgcaggttccgatgtgtctccatgggctgtgctcccctcttcctactgtcagtttctgaaacttctgactggcctcccagttatgcctcctcctcaagttcctggcccgtggatgttaaagctgctcgattcccaggatctcggctgccttttcctctatcttgagccctataaatgcccacgggacccccaccaccagcctcttgaagtggctccacagctcctgtccctggaacatcctgtcagtttggtcataaaccctgagccagatgaaatgagccaccgtgaacagacatctgccatgcccccaggtgggcttcggtggccctacccggtaccagttctttctgagaaactggagatgtcttgttagcataagtgtcttcattcccacctggagggtttgggagaggagcaaagcagttgaaaactagttaatgagctacaagagtcaaatagtcctctgaatggagcccccatcacaaaacagtgcccaggaggctggctcctcaagctacccatgcccagcgccctaaagcagcaccagatgctttggaattggggtgaaacacccacatggcagcctgctagcagcagtgactttgacttctggtcttaaagagtccctcacttcagccccaggagctattggtgggttttagcagttttgtctttaccgtttttagttctccttgattctttgttttcttcctttatcgtttttaggtttggtatgtgttgttttatttccatggttcctcaagtttcctttttaaacatttgcatttgctggacaattgcaattttttttaaaaaattcccctacccctgtttaaagctgaaaaatacatttggttcatgtgcattgtttacaaagcaaaaagaaaaaagaggaaaaaaaggcaaaaaatattgtgaaagaaaaaaaacaacttaatatattttggattaatatttggtatttcttttaaagtattttttgtgctgtgaacattttctgccaaagaccatgatgtgtgtctgtatgtttaagttatcgtaaatatttaaaatgtaaacatggctgttttgttatgccaccctgtaccaggattgctgccgcattccactgggtataacagtattttaattaaaaaaaaataattaaaagtgatgtctttgcacaggtgagactttgcactgagggaagggaaagggtgaggattttggggggccacccaagtcatagtccaatctcttcaaggacccaagatagaatttaggaattttgtgaagctgcattaaggatagagttggaatgaggatgtggctggcatttttcccctttcatagataacatttcttgaaggctgggaggggaaggagggcctggcagatggcagcctcccgaggtagggctgtgttctaatcagctttgttcggccacacgctgtggttatccacagtgggagtgggtgtccaaagatggctttatccttcccccactccttttcccactcccacctagcacataaagttttgtccgaaaccatccagaaggccaggcaccatgcagaggacattcaagaatgtgcatgttcttagccaccgcctccctcctttgctgtgacatcaccactctttcctgatgctcaggaaagcatattgctccaattcaaaattaaagaaagccattctcagt

SEQ ID NO: 3338 - protein, 405 aa, Homo sapiens
MRNKMDSEMRRLQDFNRDLRERLESANRRLASKTQEAQAGSQDMVAKLLAQSYEQQQEQEKLEREMALLRGAIEDQRRRAELLEQALGNAQGRAARAEEELRKKQAYVEKVERLQQALGQLQAACEKREQLELRLRTRLEQELKALRAQQRQAGAPGGSSGSGGSPELSALRLSEQLREKEEQILALEADMTKWEQKYLEERAMRQFAMDAAATAAAQRDTTLIRHSPQPSPSSSFNEGLLTGGHRHQEMESRLKVLHAQILEKDAVIKVLQQRSRRDPGKAIQGSLRPAKSVPSVFAAAAAGTQGWQGLSSSERQTADAPARLTTADRAPTEEPVVTAPPAAHAKHGSRDGSTQTEGPPDSTSTCLPPEPDSLLGCSSSQRAASLDSVATSRVQDLSDMVEILI

SEQ ID NO: 3339 - DNA, 1553 bp, Homo sapiens
ggtgctctggggccaggtgccaccggccattgtccaggcagctgtgtgcaagccaaagaagcatgaggacactggaagactcctcggggacactcctgtccctggaacatcctgtcagtttggtcataaaccctgagccagatgaaatgagccaccgtgaacagacatctgccatgcccccaggtgggcttcggtggccctacccggtaccagttctttctgagaaactggagatgtcttgttagcataagtgtcttcattcccacctggagggtttgggagaggagcaaagcagttgaaaactagttaatgagctacaagagtcaaatagtcctctgaatggagcccccatcacaaaacagtgcccaggaggctggctcctcaagctacccatgcccagcgccctaaagcagcaccagatgctttggaattggggtgaaacacccacatggcagcctgctagcagcagtgactttgacttctggtcttaaagagtccctcacttcagccccaggagctattggtgggttttagcagttttgtctttaccgtttttagttctccttgattctttgttttcttcctttatcgtttttaggtttggtatgtgttgttttatttccatggttcctcaagtttcctttttaaacatttgcatttgctggacaattgcaattttttttaaaaaattcccctacccctgtttaaagctgaaaaatacatttggttcatgtgcattgtttacaaagcaaaaagaaaaaagaggaaaaaaaggcaaaaaatattgtgaaagaaaaaaaacaacttaatatattttggattaatatttggtatttcttttaaagtattttttgtgctgtgaacattttctgccaaagaccatgatgtgtgtctgtatgtttaagttatcgtaaatatttaaaatgtaaacatggctgttttgttatgccaccctgtaccaggattgctgccgcattccactgggtataacagtattttaattaaaaaaaaataattaaaagtgatgtctttgcacaggtgagactttgcactgagggaagggaaagggtgaggattttggggggccacccaagtcatagtccaatctcttcaaggacccaagatagaatttaggaattttgtgaagctgcattaaggatagagttggaatgaggatgtggctggcatttttcccctttcatagataacatttcttgaaggctgggaggggaaggagggcctggcagatggcagcctcccgaggtagggctgtgttctaatcagctttgttcggccacacgctgtggttatccacagtgggagtgggtgtccaaagatggctttatccttcccccactccttttcccactcccacctagcacataaagttttgtccgaaaccatccagaaggccaggcaccatgcagaggacattcaagaatgtgcatgttcttagccaccgcctccctcctttgctgtgacatcaccactctttcctgatgctcaggaaagcatattgctccaattcaaaattaaagaaagccattctcagt

SEQ ID NO: 3340 - protein, 60 aa, Homo sapiens
MRTLEDSSGTLLSLEHPVSLVINPEPDEMSHREQTSAMPPGGLRWPYPVPVLSEKLEMSC

SEQ ID NO: 3341 - DNA, 2175 bp, Homo sapiens
agagcgtcggcgccacggccgagaacacatcttcgccgccgagctgagctgggccgagccggaggttgtggtgtctgactgcgctgggcaccctcgggccgcagcggtgctctggggccaggtgccaccggccattgtccaggcagctgtgtgcaagccaaagaagcatgaggacactggaagactcctcggggacactaatttccacggacggctgcccgtggacaccaggtggactggttcactaatcaagtcagccatattgttctctggctaagtttggttccagccaacgtcatctgctcttcagttcctcactgccttcttgggatactaagacttgaattttttggggactattaagggtgttagtcttggagaagacacagcctcaccttctcacttgctgtgggtgaggggccatttaagtggactgggagacagtgcgcagtttgtatataattccctttcttgtggaacagaagactgaggcctgcaggttccgatgtgtctccatgggctgtgctcccctcttcctactgtcagtttctgaaacttctgactggcctcccagttatgcctcctcctcaagttcctggcccgtggatgttaaagctgctcgattcccaggatctcggctgccttttcctctatcttgagccctataaatgcccacgggacccccaccaccagcctcttgaagtggctccacagctcctgtccctggaacatcctgtcagtttggtcataaaccctgagccagatgaaatgagccaccgtgaacagacatctgccatgcccccaggtgggcttcggtggccctacccggtaccagttctttctgagaaactggagatgtcttgttagcataagtgtcttcattcccacctggagggtttgggagaggagcaaagcagttgaaaactagttaatgagctacaagagtcaaatagtcctctgaatggagcccccatcacaaaacagtgcccaggaggctggctcctcaagctacccatgcccagcgccctaaagcagcaccagatgctttggaattggggtgaaacacccacatggcagcctgctagcagcagtgactttgacttctggtcttaaagagtccctcacttcagccccaggagctattggtgggttttagcagttttgtctttaccgtttttagttctccttgattctttgttttcttcctttatcgtttttaggtttggtatgtgttgttttatttccatggttcctcaagtttcctttttaaacatttgcatttgctggacaattgcaattttttttaaaaaattcccctacccctgtttaaagctgaaaaatacatttggttcatgtgcattgtttacaaagcaaaaagaaaaaagaggaaaaaaaggcaaaaaatattgtgaaagaaaaaaaacaacttaatatattttggattaatatttggtatttcttttaaagtattttttgtgctgtgaacattttctgccaaagaccatgatgtgtgtctgtatgtttaagttatcgtaaatatttaaaatgtaaacatggctgttttgttatgccaccctgtaccaggattgctgccgcattccactgggtataacagtattttaattaaaaaaaaataattaaaagtgatgtctttgcacaggtgagactttgcactgagggaagggaaagggtgaggattttggggggccacccaagtcatagtccaatctcttcaaggacccaagatagaatttaggaattttgtgaagctgcattaaggatagagttggaatgaggatgtggctggcatttttcccctttcatagataacatttcttgaaggctgggaggggaaggagggcctggcagatggcagcctcccgaggtagggctgtgttctaatcagctttgttcggccacacgctgtggttatccacagtgggagtgggtgtccaaagatggctttatccttcccccactccttttcccactcccacctagcacataaagttttgtccgaaaccatccagaaggccaggcaccatgcagaggacattcaagaatgtgcatgttcttagccaccgcctccctcctttgctgtgacatcaccactctttcctgatgctcaggaaagcatattgctccaattcaaaattaaagaaagccattctcagt

SEQ ID NO: 3342 - protein, 96 aa, Homo sapiens [sequence omitted]

SEQ ID NO: 3343 - DNA, 4987 bp, Homo sapiens
ggttatttgtggttcgctttgatcccgagggggaacctgaaactctcacattcctggcatagcagccgcctccggcgcgggccgaccctggggctgcgcgctggggcgcgaacagccagagcgtcggcgccacggccgagaacacatcttcgccgccgagctgagctgggccgagccggaggttgtggtgtctgactgcgctgggcaccctcgggccgcagcggtgctctggggccaggtgccaccggccattgtccaggcagctgtgtgcaagccaaagaagcatgaggacactggaagactcctcggggacagtcctgcaccgcctcatccaggagcagctgcgctacggcaacctgactgagacgcgcacgctgctagccatccagcagcaggccctgaggggtggggctggaactgggggtacagggagcccccaggcctccctggagatcctggccccagaggacagtcaggtgctgcagcaggccaccaggcaggagccccagggccaggagcaccagggcggtgagaaccacctggcagagaacaccctctaccggctatgcccacagcccagcaagggagaggagctgcccacctatgaggaggccaaagcccactcgcagtactatgcggcccagcaggcagggacccggccacatgcgggggaccgagatccccgtggggccccgggaggcagtcggaggcaggacgaggccctgcgggagctgaggcatgggcacgtgcgctcgttgagtgaacggctccttcagttgtccctggagaggaacggcgcccgggcccccagccacatgagctcctcccacagcttcccacagctggcccgcaaccagcagggccccccactgaggggcccccctgctgagggcccagagtcccgaggacccccacctcagtaccctcatgttgtactagctcatgagaccaccactgctgtcactgacccacggtaccgtgcccgcggcagcccgcacttccagcatgctgaagtcaggatcctgcaggcccaggtgcctcctgtgttcctccaacagcagcagcagtaccagtacctgcagcaatctcaggagcacccccctcccccacatccagctgctctcggccatggccccctgagctccctcagtccacctgctgtggaggggccagtgagtgcccaggcctcctcagccacctcgggcagtgcccacctggcccagatggaggccgtgctgagggagaatgccaggctgcagagagacaatgagcggctgcagagggagctggagagctctgcggagaaggctggccgcattgagaagctggaaagcgaaatccagcggctctctgaggcccatgagagcctgaccagagcctcctccaagcgtgaggccctggagaagaccatgcggaacaagatggacagtgaaatgaggaggctgcaagacttcaaccgggatcttagagagagattggaatctgcaaatcgccgcctggcaagcaagacacaggaggcccaggccggcagtcaggacatggtggccaagctgcttgctcagagctacgaacagcagcaggagcaagagaagctggagcgagagatggcactgctgcgcggcgccatcgaggaccagcggcggcgtgccgagctgctggagcaggctctgggcaatgcgcagggccgggcagctcgagccgaagaggagctgcgcaagaagcaggcctatgtggagaaagtggagcggctgcagcaggcgctcgggcagctgcaggcagcctgtgagaagcgggagcagctggagctgcgtctgcggactcgcctggagcaggaactcaaggccctgcgtgcacagcagagacaggcaggtgccccaggtggtagcagtggcagtggtgggtctccagagctcagcgccctgcgactgtcagaacaactgcgagagaaggaggagcagatcctggcgctggaggccgacatgaccaagtgggagcagaagtatttggaggaacgtgccatgaggcagtttgccatggatgcggctgccacggctgctgctcagcgtgacaccactctcatccgacattccccccagccctcacccagcagcagcttcaatgagggtctgctcactggtggccacaggcatcaggagatggaaagcaggttaaaggtgctccatgcccagatcctggagaaggatgcagtgatcaaggtccttcagcagcgctccaggagagaccctggcaaggccatccagggctccctgcggcctgccaagtcggtgccatctgttttcgcggctgcggcagcaggaacccagggctggcaagggctctcttctagtgagcgacaaacagcagacgcccctgctcggctgactacagcagacagagcacccacagaggagccagtggtcacagctccccctgctgcccatgccaaacacgggagcagagatgggagcacccagactgagggccccccagacagcacctccacctgcctgccaccggagcctgacagccttctggggtgcagcagtagccagagagcagcctctctggactctgtagctacatccagagtccaggacttgtcagacatggtggagatactgatctgaaggaggtggtgcttcaggactctgagccattctctcccctcctctgccctgtgccactctcagccatttcagcagccccgtcaaccgctgctccgtccctttccccagccagacactcattcccattgaccatctggtcccaggagctcaggaggaggaccccaggggagaggagagctgtgagagcaccggcacccccagaagactctgcttcttagcccacattcctccgggccttatggagaatgaggattcagccttgacttcttgcccaaggcctgctactggggtagcaactgacagctcagaaaggagctgagctccctctgccctgccagttgtcagtcaggcagggagggagtggctgtgttggtttggggaactaatttccacggacggctgcccgtggacaccaggtggactggttcactaatcaagtcagccatattgttctctggctaagtttggttccagccaacgtcatctgctcttcagttcctcactgccttcttgggatactaagacttgaattttttggggactattaagggtgttagtcttggagaagacacagcctcaccttctcacttgctgtgggtgaggggccatttaagtggactgggagacagtgcgcagtttgtatataattccctttcttgtggaacagaagactgaggcctgcaggttccgatgtgtctccatgggctgtgctcccctcttcctactgtcagtttctgaaacttctgactggcctcccagttatgcctcctcctcaagttcctggcccgtggatgttaaagctgctcgattcccaggatctcggctgccttttcctctatcttgagccctataaatgcccacgggacccccaccaccagcctcttgaagtggctccacagctcctgtccctggaacatcctgtcagtttggtcataaaccctgagccagatgaaatgagccaccgtgaacagacatctgccatgcccccaggtgggcttcggtggccctacccggtaccagttctttctgagaaactggagatgtcttgttagcataagtgtcttcattcccacctggagggtttgggagaggagcaaagcagttgaaaactagttaatgagctacaagagtcaaatagtcctctgaatggagcccccatcacaaaacagtgcccaggaggctggctcctcaagctacccatgcccagcgccctaaagcagcaccagatgctttggaattggggtgaaacacccacatggcagcctgctagcagcagtgactttgacttctggtcttaaagagtccctcacttcagccccaggagctattggtgggttttagcagttttgtctttaccgtttttagttctccttgattctttgttttcttcctttatcgtttttaggtttggtatgtgttgttttatttccatggttcctcaagtttcctttttaaacatttgcatttgctggacaattgcaattttttttaaaaaattcccctacccctgtttaaagctgaaaaatacatttggttcatgtgcattgtttacaaagcaaaaagaaaaaagaggaaaaaaaggcaaaaaatattgtgaaagaaaaaaaacaacttaatatattttggattaatatttggtatttcttttaaagtattttttgtgctgtgaacattttctgccaaagaccatgatgtgtgtctgtatgtttaagttatcgtaaatatttaaaatgtaaacatggctgttttgttatgccaccctgtaccaggattgctgccgcattccactgggtataacagtattttaattaaaaaaaaataattaaaagtgatgtctttgcacaggtgagactttgcactgagggaagggaaagggtgaggattttggggggccacccaagtcatagtccaatctcttcaaggacccaagatagaatttaggaattttgtgaagctgcattaaggatagagttggaatgaggatgtggctggcatttttcccctttcatagataacatttcttgaaggctgggaggggaaggagggcctggcagatggcagcctcccgaggtagggctgtgttctaatcagctttgttcggccacacgctgtggttatccacagtgggagtgggtgtccaaagatggctttatccttcccccactccttttcccactcccacctagcacataaagttttgtccgaaaccatccagaaggccaggcaccatgcagaggacattcaagaatgtgcatgttcttagccaccgcctccctcctttgctgtgacatcaccactctttcctgatgctcaggaaagcatattgctccaattcaaaattaaagaaagccattctcagt

SEQ ID NO: 3344 - protein, 780 aa, Homo sapiens; identical to SEQ ID NO: 375

SEQ ID NO: 3345 - DNA, 2437 bp, Homo sapiens
gaggagggcggtgcgctgagaggttatttgtggttcgctttgatcccgagggggaacctgaaactctcacattcctggcatagcagccgcctccggcgcgggccgaccctggggctgcgcgctggggcgcgaacagccagagcgtcggcgccacggccgagaacacatcttcgccgccgagctgagctgggccgagccggaggttgtggtgtctgactgcgctgggcaccctcgggccgcagcggtgctctggggccaggtgccaccggccattgtccaggcagctgtgtgcaagccaaagaagcatgaggacactggaagactcctcggggacagtcctgcaccgcctcatccaggagcagctgcgctacggcaacctgactgagacgcgcacgctgctagccatccagcagcaggccctgaggggtggggctggaactgggggtacagggagcccccaggcctccctggagatcctggccccagaggacagtcaggtgctgcagcaggccaccaggcaggagccccagggccaggagcaccagggcggtgagaaccacctggcagagaacaccctctaccggctatgcccacagcccagcaagggagaggagctgcccacctatgaggaggccaaagcccactcgcagtactatgcggcccagcaggcagggacccggccacatgcgggggaccgagatccccgtggggccccgggaggcagtcggaggcaggacgaggccctgcgggagctgaggcatgggcacgtgcgctcgttgagtgaacggtcccctcttcctactgtcagtttctgaaacttctgactggcctcccagttatgcctcctcctcaagttcctggcccgtggatgttaaagctgctcgattcccaggatctcggctgccttttcctctatcttgagccctataaatgcccacgggacccccaccaccagcctcttgaagtggctccacagctcctgtccctggaacatcctgtcagtttggtcataaaccctgagccagatgaaatgagccaccgtgaacagacatctgccatgcccccaggtgggcttcggtggccctacccggtaccagttctttctgagaaactggagatgtcttgttagcataagtgtcttcattcccacctggagggtttgggagaggagcaaagcagttgaaaactagttaatgagctacaagagtcaaatagtcctctgaatggagcccccatcacaaaacagtgcccaggaggctggctcctcaagctacccatgcccagcgccctaaagcagcaccagatgctttggaattggggtgaaacacccacatggcagcctgctagcagcagtgactttgacttctggtcttaaagagtccctcacttcagccccaggagctattggtgggttttagcagttttgtctttaccgtttttagttctccttgattctttgttttcttcctttatcgtttttaggtttggtatgtgttgttttatttccatggttcctcaagtttcctttttaaacatttgcatttgctggacaattgcaattttttttaaaaaattcccctacccctgtttaaagctgaaaaatacatttggttcatgtgcattgtttacaaagcaaaaagaaaaaagaggaaaaaaaggcaaaaaatattgtgaaagaaaaaaaacaacttaatatattttggattaatatttggtatttcttttaaagtattttttgtgctgtgaacattttctgccaaagaccatgatgtgtgtctgtatgtttaagttatcgtaaatatttaaaatgtaaacatggctgttttgttatgccaccctgtaccaggattgctgccgcattccactgggtataacagtattttaattaaaaaaaaataattaaaagtgatgtctttgcacaggtgagactttgcactgagggaagggaaagggtgaggattttggggggccacccaagtcatagtccaatctcttcaaggacccaagatagaatttaggaattttgtgaagctgcattaaggatagagttggaatgaggatgtggctggcatttttcccctttcatagataacatttcttgaaggctgggaggggaaggagggcctggcagatggcagcctcccgaggtagggctgtgttctaatcagctttgttcggccacacgctgtggttatccacagtgggagtgggtgtccaaagatggctttatccttcccccactccttttcccactcccacctagcacataaagttttgtccgaaaccatccagaaggccaggcaccatgcagaggacattcaagaatgtgcatgttcttagccaccgcctccctcctttgctgtgacatcaccactctttcctgatgctcaggaaagcatattgctccaattcaaaattaaagaaagccattctcagt

SEQ ID NO: 3346 - protein, 169 aa, Homo sapiens
MRTLEDSSGTVLHRLIQEQLRYGNLTETRTLLAIQQQALRGGAGTGGTGSPQASLEILAPEDSQVLQQATRQEPQGQEHQGGENHLAENTLYRLCPQPSKGEELPTYEEAKAHSQYYAAQQAGTRPHAGDRDPRGAPGGSRRQDEALRELRHGHVRSLSERSPLPTVSF

SEQ ID NO: 3347 - DNA, 3610 bp, Homo sapiens
agttttagcagatggcctcaggcctcccttgactgtcctgtggtgtccaagttaggtcaaaccaccccatcatggctggagtctttcggtgcccacttctggccaactgtactcagtttcttggtggaagccagccaagagtagaatgtttccttctggacactgggcacagggaagctgtgtttagtcaccccgcaggcagctacttccaaagtacctggccctgggttcactcagcatctggtccttggggcagccgatgggaccgttgcttgctggtcccagcagtctattctacttccggaggctacaagcttctgaccatcccaccatagtcacctggaggttttgctcctgtttggtggcctctcatctgtcaccttttctgatggagagtagtgggtcagcctcgaatcactccctgggagctctcgccttcattcagctctgctgtctgactcttgcagctggaaagcgaaatccagcggctctctgaggcccatgagagcctgaccagagcctcctccaagcgtgaggccctggagaagaccatgcggaacaagatggacagtgaaatgaggaggctgcaagacttcaaccgggatcttagagagagattggaatctgcaaatcgccgcctggcaagcaagacacaggaggcccaggccggcagtcaggacatggtggccaagctgcttgctcagagctacgaacagcagcaggagcaagagaagctggagcgagagatggcactgctgcgcggcgccatcgaggaccagcggcggcgtgccgagctgctggagcaggctctgggcaatgcgcagggccgggcagctcgagccgaagaggagctgcgcaagaagcaggcctatgtggagaaagtggagcggctgcagcaggcgctcgggcagctgcaggcagcctgtgagaagcgggagcagctggagctgcgtctgcggactcgcctggagcaggaactcaaggccctgcgtgcacagcagagacaggcaggtgccccaggtggtagcagtggcagtggtgggtctccagagctcagcgccctgcgactgtcagaacaactgcgagagaaggaggagcagatcctggcgctggaggccgacatgaccaagtgggagcagaagtatttggaggaacgtgccatgaggcagtttgccatggatgcggctgccacggctgctgctcagcgtgacaccactctcatccgacattccccccagccctcacccagcagcagcttcaatgagggtctgctcactggtggccacaggcatcaggagatggaaagcaggttaaaggtgctccatgcccagatcctggagaaggatgcagtgatcaaggtccttcagcagcgctccaggagagaccctggcaaggccatccagggctccctgcggcctgccaagtcggtgccatctgttttcgcggctgcggcagcaggaacccagggctggcaagggctctcttctagtgagcgacaaacagcagacgcccctgctcggctgactacagcagacagagcacccacagaggagccagtggtcacagctccccctgctgcccatgccaaacacgggagcagagatgggagcacccagactgagggccccccagacagcacctccacctgcctgccaccggagcctgacagccttctggggtgcagcagtagccagagagcagcctctctggactctgtagctacatccagagtccaggacttgtcagacatggtggagatactgatctgaaggaggtggtgcttcaggactctgagccattctctcccctcctctgccctgtgccactctcagccatttcagcagccccgtcaaccgctgctccgtccctttccccagccagacactcattcccattgaccatctggtcccaggagctcaggaggaggaccccaggggagaggagagctgtgagagcaccggcacccccagaagactctgcttcttagcccacattcctccgggccttatggagaatgaggattcagccttgacttcttgcccaaggcctgctactggggtagcaactgacagctcagaaaggagctgagctccctctgccctgccagttgtcagtcaggcagggagggagtggctgtgttggtttggggaactaatttccacggacggctgcccgtggacaccaggtggactggttcactaatcaagtcagccatattgttctctggctaagtttggttccagccaacgtcatctgctcttcagttcctcactgccttcttgggatactaagacttgaattttttggggactattaagggtgttagtcttggagaagacacagcctcaccttctcacttgctgtgggtgaggggccatttaagtggactgggagacagtgcgcagtttgtatataattccctttcttgtggaacagaagactgaggcctgcaggttccgatgtgtctccatgggctgtgctcccctcttcctactgtcagtttctgaaacttctgactggcctcccagttatgcctcctcctcaagttcctggcccgtggatgttaaagctgctcgattcccaggatctcggctgccttttcctctatcttgagccctataaatgcccacgggacccccaccaccagcctcttgaagtggctccacagctcctgtccctggaacatcctgtcagtttggtcataaaccctgagccagatgaaatgagccaccgtgaacagacatctgccatgcccccaggtgggcttcggtggccctacccggtaccagttctttctgagaaactggagatgtcttgttagcataagtgtcttcattcccacctggagggtttgggagaggagcaaagcagttgaaaactagttaatgagctacaagagtcaaatagtcctctgaatggagcccccatcacaaaacagtgcccaggaggctggctcctcaagctacccatgcccagcgccctaaagcagcaccagatgctttggaattggggtgaaacacccacatggcagcctgctagcagcagtgactttgacttctggtcttaaagagtccctcacttcagccccaggagctattggtgggttttagcagttttgtctttaccgtttttagttctccttgattctttgttttcttcctttatcgtttttaggtttggtatgtgttgttttatttccatggttcctcaagtttcctttttaaacatttgcatttgctggacaattgcaattttttttaaaaaattcccctacccctgtttaaagctgaaaaatacatttggttcatgtgcattgtttacaaagcaaaaagaaaaaagaggaaaaaaaggcaaaaaatattgtgaaagaaaaaaaacaacttaatatattttggattaatatttggtatttcttttaaagtattttttgtgctgtgaacattttctgccaaagaccatgatgtgtgtctgtatgtttaagttatcgtaaatatttaaaatgtaaacatggctgttttgttatgccaccctgtaccaggattgctgccgcattccactgggtataacagtattttaattaaaaaaaaataattaaaagtgatgtctttgc

SEQ ID NO: 3348 - protein, 405 aa, Homo sapiens; identical to SEQ ID NO: 3338

SEQ ID NO: 3349 - DNA, 1034 bp, Homo sapiens
ggtgctctggggccaggtgccaccggccattgtccaggcagctgtgtgcaagccaaagaagcatgaggacactggaagactcctcggggacactcctgtccctggaacatcctgtcagtttggtcataaaccctgagccagatgaaatgagccaccgtgaacagacatctgccatgcccccaggtgggcttcggtggccctacccggtaccagttctttctgagaaactggagatgtcttgttagcataagtgtcttcattcccacctggagggtttgggagaggagcaaagcagttgaaaactagttaatgagctacaagagtcaaatagtcctctgaatggagcccccatcacaaaacagtgcccaggaggctggctcctcaagctacccatgcccagcgccctaaagcagcaccagatgctttggaattggggtgaaacacccacatggcagcctgctagcagcagtgactttgacttctggtcttaaagagtccctcacttcagccccaggagctattggtgggttttagcagttttgtctttaccgtttttagttctccttgattctttgttttcttcctttatcgtttttaggtttggtatgtgttgttttatttccatggttcctcaagtttcctttttaaacatttgcatttgctggacaattgcaattttttttaaaaaattcccctacccctgtttaaagctgaaaaatacatttggttcatgtgcattgtttacaaagcaaaaagaaaaaagaggaaaaaaaggcaaaaaatattgtgaaagaaaaaaaacaacttaatatattttggattaatatttggtatttcttttaaagtattttttgtgctgtgaacattttctgccaaagaccatgatgtgtgtctgtatgtttaagttatcgtaaatatttaaaatgtaaacatggctgttttgttatgccaccctgtaccaggattgctgccgcattccactgggtataacagtattttaattaaaaaaaaataattaaaagtgatgtctttgc

SEQ ID NO: 3350 - protein, 60 aa, Homo sapiens; identical to SEQ ID NO: 3340

SEQ ID NO: 3351 - DNA, 1656 bp, Homo sapiens
agagcgtcggcgccacggccgagaacacatcttcgccgccgagctgagctgggccgagccggaggttgtggtgtctgactgcgctgggcaccctcgggccgcagcggtgctctggggccaggtgccaccggccattgtccaggcagctgtgtgcaagccaaagaagcatgaggacactggaagactcctcggggacactaatttccacggacggctgcccgtggacaccaggtggactggttcactaatcaagtcagccatattgttctctggctaagtttggttccagccaacgtcatctgctcttcagttcctcactgccttcttgggatactaagacttgaattttttggggactattaagggtgttagtcttggagaagacacagcctcaccttctcacttgctgtgggtgaggggccatttaagtggactgggagacagtgcgcagtttgtatataattccctttcttgtggaacagaagactgaggcctgcaggttccgatgtgtctccatgggctgtgctcccctcttcctactgtcagtttctgaaacttctgactggcctcccagttatgcctcctcctcaagttcctggcccgtggatgttaaagctgctcgattcccaggatctcggctgccttttcctctatcttgagccctataaatgcccacgggacccccaccaccagcctcttgaagtggctccacagctcctgtccctggaacatcctgtcagtttggtcataaaccctgagccagatgaaatgagccaccgtgaacagacatctgccatgcccccaggtgggcttcggtggccctacccggtaccagttctttctgagaaactggagatgtcttgttagcataagtgtcttcattcccacctggagggtttgggagaggagcaaagcagttgaaaactagttaatgagctacaagagtcaaatagtcctctgaatggagcccccatcacaaaacagtgcccaggaggctggctcctcaagctacccatgcccagcgccctaaagcagcaccagatgctttggaattggggtgaaacacccacatggcagcctgctagcagcagtgactttgacttctggtcttaaagagtccctcacttcagccccaggagctattggtgggttttagcagttttgtctttaccgtttttagttctccttgattctttgttttcttcctttatcgtttttaggtttggtatgtgttgttttatttccatggttcctcaagtttcctttttaaacatttgcatttgctggacaattgcaattttttttaaaaaattcccctacccctgtttaaagctgaaaaatacatttggttcatgtgcattgtttacaaagcaaaaagaaaaaagaggaaaaaaaggcaaaaaatattgtgaaagaaaaaaaacaacttaatatattttggattaatatttggtatttcttttaaagtattttttgtgctgtgaacattttctgccaaagaccatgatgtgtgtctgtatgtttaagttatcgtaaatatttaaaatgtaaacatggctgttttgttatgccaccctgtaccaggattgctgccgcattccactgggtataacagtattttaattaaaaaaaaataattaaaagtgatgtctttgc

SEQ ID NO: 3352 - protein, 96 aa, Homo sapiens [sequence omitted]

SEQ ID NO: 3353 - DNA, 4468 bp, Homo sapiens
ggttatttgtggttcgctttgatcccgagggggaacctgaaactctcacattcctggcatagcagccgcctccggcgcgggccgaccctggggctgcgcgctggggcgcgaacagccagagcgtcggcgccacggccgagaacacatcttcgccgccgagctgagctgggccgagccggaggttgtggtgtctgactgcgctgggcaccctcgggccgcagcggtgctctggggccaggtgccaccggccattgtccaggcagctgtgtgcaagccaaagaagcatgaggacactggaagactcctcggggacagtcctgcaccgcctcatccaggagcagctgcgctacggcaacctgactgagacgcgcacgctgctagccatccagcagcaggccctgaggggtggggctggaactgggggtacagggagcccccaggcctccctggagatcctggccccagaggacagtcaggtgctgcagcaggccaccaggcaggagccccagggccaggagcaccagggcggtgagaaccacctggcagagaacaccctctaccggctatgcccacagcccagcaagggagaggagctgcccacctatgaggaggccaaagcccactcgcagtactatgcggcccagcaggcagggacccggccacatgcgggggaccgagatccccgtggggccccgggaggcagtcggaggcaggacgaggccctgcgggagctgaggcatgggcacgtgcgctcgttgagtgaacggctccttcagttgtccctggagaggaacggcgcccgggcccccagccacatgagctcctcccacagcttcccacagctggcccgcaaccagcagggccccccactgaggggcccccctgctgagggcccagagtcccgaggacccccacctcagtaccctcatgttgtactagctcatgagaccaccactgctgtcactgacccacggtaccgtgcccgcggcagcccgcacttccagcatgctgaagtcaggatcctgcaggcccaggtgcctcctgtgttcctccaacagcagcagcagtaccagtacctgcagcaatctcaggagcacccccctcccccacatccagctgctctcggccatggccccctgagctccctcagtccacctgctgtggaggggccagtgagtgcccaggcctcctcagccacctcgggcagtgcccacctggcccagatggaggccgtgctgagggagaatgccaggctgcagagagacaatgagcggctgcagagggagctggagagctctgcggagaaggctggccgcattgagaagctggaaagcgaaatccagcggctctctgaggcccatgagagcctgaccagagcctcctccaagcgtgaggccctggagaagaccatgcggaacaagatggacagtgaaatgaggaggctgcaagacttcaaccgggatcttagagagagattggaatctgcaaatcgccgcctggcaagcaagacacaggaggcccaggccggcagtcaggacatggtggccaagctgcttgctcagagctacgaacagcagcaggagcaagagaagctggagcgagagatggcactgctgcgcggcgccatcgaggaccagcggcggcgtgccgagctgctggagcaggctctgggcaatgcgcagggccgggcagctcgagccgaagaggagctgcgcaagaagcaggcctatgtggagaaagtggagcggctgcagcaggcgctcgggcagctgcaggcagcctgtgagaagcgggagcagctggagctgcgtctgcggactcgcctggagcaggaactcaaggccctgcgtgcacagcagagacaggcaggtgccccaggtggtagcagtggcagtggtgggtctccagagctcagcgccctgcgactgtcagaacaactgcgagagaaggaggagcagatcctggcgctggaggccgacatgaccaagtgggagcagaagtatttggaggaacgtgccatgaggcagtttgccatggatgcggctgccacggctgctgctcagcgtgacaccactctcatccgacattccccccagccctcacccagcagcagcttcaatgagggtctgctcactggtggccacaggcatcaggagatggaaagcaggttaaaggtgctccatgcccagatcctggagaaggatgcagtgatcaaggtccttcagcagcgctccaggagagaccctggcaaggccatccagggctccctgcggcctgccaagtcggtgccatctgttttcgcggctgcggcagcaggaacccagggctggcaagggctctcttctagtgagcgacaaacagcagacgcccctgctcggctgactacagcagacagagcacccacagaggagccagtggtcacagctccccctgctgcccatgccaaacacgggagcagagatgggagcacccagactgagggccccccagacagcacctccacctgcctgccaccggagcctgacagccttctggggtgcagcagtagccagagagcagcctctctggactctgtagctacatccagagtccaggacttgtcagacatggtggagatactgatctgaaggaggtggtgcttcaggactctgagccattctctcccctcctctgccctgtgccactctcagccatttcagcagccccgtcaaccgctgctccgtccctttccccagccagacactcattcccattgaccatctggtcccaggagctcaggaggaggaccccaggggagaggagagctgtgagagcaccggcacccccagaagactctgcttcttagcccacattcctccgggccttatggagaatgaggattcagccttgacttcttgcccaaggcctgctactggggtagcaactgacagctcagaaaggagctgagctccctctgccctgccagttgtcagtcaggcagggagggagtggctgtgttggtttggggaactaatttccacggacggctgcccgtggacaccaggtggactggttcactaatcaagtcagccatattgttctctggctaagtttggttccagccaacgtcatctgctcttcagttcctcactgccttcttgggatactaagacttgaattttttggggactattaagggtgttagtcttggagaagacacagcctcaccttctcacttgctgtgggtgaggggccatttaagtggactgggagacagtgcgcagtttgtatataattccctttcttgtggaacagaagactgaggcctgcaggttccgatgtgtctccatgggctgtgctcccctcttcctactgtcagtttctgaaacttctgactggcctcccagttatgcctcctcctcaagttcctggcccgtggatgttaaagctgctcgattcccaggatctcggctgccttttcctctatcttgagccctataaatgcccacgggacccccaccaccagcctcttgaagtggctccacagctcctgtccctggaacatcctgtcagtttggtcataaaccctgagccagatgaaatgagccaccgtgaacagacatctgccatgcccccaggtgggcttcggtggccctacccggtaccagttctttctgagaaactggagatgtcttgttagcataagtgtcttcattcccacctggagggtttgggagaggagcaaagcagttgaaaactagttaatgagctacaagagtcaaatagtcctctgaatggagcccccatcacaaaacagtgcccaggaggctggctcctcaagctacccatgcccagcgccctaaagcagcaccagatgctttggaattggggtgaaacacccacatggcagcctgctagcagcagtgactttgacttctggtcttaaagagtccctcacttcagccccaggagctattggtgggttttagcagttttgtctttaccgtttttagttctccttgattctttgttttcttcctttatcgtttttaggtttggtatgtgttgttttatttccatggttcctcaagtttcctttttaaacatttgcatttgctggacaattgcaattttttttaaaaaattcccctacccctgtttaaagctgaaaaatacatttggttcatgtgcattgtttacaaagcaaaaagaaaaaagaggaaaaaaaggcaaaaaatattgtgaaagaaaaaaaacaacttaatatattttggattaatatttggtatttcttttaaagtattttttgtgctgtgaacattttctgccaaagaccatgatgtgtgtctgtatgtttaagttatcgtaaatatttaaaatgtaaacatggctgttttgttatgccaccctgtaccaggattgctgccgcattccactgggtataacagtattttaattaaaaaaaaataattaaaagtgatgtctttgc

SEQ ID NO: 3354 - protein, 780 aa, Homo sapiens; identical to SEQ ID NO: 375

SEQ ID NO: 3355 - DNA, 1918 bp, Homo sapiens
gaggagggcggtgcgctgagaggttatttgtggttcgctttgatcccgagggggaacctgaaactctcacattcctggcatagcagccgcctccggcgcgggccgaccctggggctgcgcgctggggcgcgaacagccagagcgtcggcgccacggccgagaacacatcttcgccgccgagctgagctgggccgagccggaggttgtggtgtctgactgcgctgggcaccctcgggccgcagcggtgctctggggccaggtgccaccggccattgtccaggcagctgtgtgcaagccaaagaagcatgaggacactggaagactcctcggggacagtcctgcaccgcctcatccaggagcagctgcgctacggcaacctgactgagacgcgcacgctgctagccatccagcagcaggccctgaggggtggggctggaactgggggtacagggagcccccaggcctccctggagatcctggccccagaggacagtcaggtgctgcagcaggccaccaggcaggagccccagggccaggagcaccagggcggtgagaaccacctggcagagaacaccctctaccggctatgcccacagcccagcaagggagaggagctgcccacctatgaggaggccaaagcccactcgcagtactatgcggcccagcaggcagggacccggccacatgcgggggaccgagatccccgtggggccccgggaggcagtcggaggcaggacgaggccctgcgggagctgaggcatgggcacgtgcgctcgttgagtgaacggtcccctcttcctactgtcagtttctgaaacttctgactggcctcccagttatgcctcctcctcaagttcctggcccgtggatgttaaagctgctcgattcccaggatctcggctgccttttcctctatcttgagccctataaatgcccacgggacccccaccaccagcctcttgaagtggctccacagctcctgtccctggaacatcctgtcagtttggtcataaaccctgagccagatgaaatgagccaccgtgaacagacatctgccatgcccccaggtgggcttcggtggccctacccggtaccagttctttctgagaaactggagatgtcttgttagcataagtgtcttcattcccacctggagggtttgggagaggagcaaagcagttgaaaactagttaatgagctacaagagtcaaatagtcctctgaatggagcccccatcacaaaacagtgcccaggaggctggctcctcaagctacccatgcccagcgccctaaagcagcaccagatgctttggaattggggtgaaacacccacatggcagcctgctagcagcagtgactttgacttctggtcttaaagagtccctcacttcagccccaggagctattggtgggttttagcagttttgtctttaccgtttttagttctccttgattctttgttttcttcctttatcgtttttaggtttggtatgtgttgttttatttccatggttcctcaagtttcctttttaaacatttgcatttgctggacaattgcaattttttttaaaaaattcccctacccctgtttaaagctgaaaaatacatttggttcatgtgcattgtttacaaagcaaaaagaaaaaagaggaaaaaaaggcaaaaaatattgtgaaagaaaaaaaacaacttaatatattttggattaatatttggtatttcttttaaagtattttttgtgctgtgaacattttctgccaaagaccatgatgtgtgtctgtatgtttaagttatcgtaaatatttaaaatgtaaacatggctgttttgttatgccaccctgtaccaggattgctgccgcattccactgggtataacagtattttaattaaaaaaaaataattaaaagtgatgtctttgc

SEQ ID NO: 3356 - protein, 169 aa, Homo sapiens; identical to SEQ ID NO: 3346

SEQ ID NO: 3357 - DNA, 817 bp, Homo sapiens
gatgtgtagctggctgtacgggtggtggttcctggtgctctggggccaggtgccaccggccattgtccaggcagctgtgtgcaagccaaagaagcatgaggacactggaagactcctcggggacagtcctgcaccgcctcatccaggagcagctgcgctacggcaacctgactgagacgcgcacgctgctagccatccagcagcaggccctgaggggtggggctggaactgggggtacagggagcccccaggcctccctggagatcctggccccagaggacagtcaggtgctgcagcaggccaccaggcaggagccccagggccaggagcaccagggcggtgagaaccacctggcagagaacaccctctaccggctatgcccacagcccagcaagggagaggagctgcccacctatgaggaggccaaagcccactcgcagtactatgcggcccagcaggcagggacccggccacatgcgggggaccgagatccccgtggggccccgggaggcagtcggaggcaggacgaggccctgcgggagctgaggcatgggcacgtgcgctcgttgagtgaacggctccttcagttgtccctggagaggaacggcgcccgggcccccagccacatgagctcctcccacagcttcccacagctggcccgcaaccagcagggccccccactgaggggcccccctgctgagggcccagagtcccgaggacccccacctcagtaccctcatgttgtactagctcatgagaccaccactgctgtcactgacccacggtaccgtgcccgcggcagcccgcacttccagca

SEQ ID NO: 3358 - protein, 57 aa, Homo sapiens
MCSWLYGWWFLVLWGQVPPAIVQAAVCKPKKHEDTGRLLGDSPAPPHPGAAALRQPD

SEQ ID NO: 3359 - DNA, 912 bp, Homo sapiens
accggctcgccccaggcgtaccagcggccaccggtgctccaggcgagcaggagcccaggccaaggctggagacgcgcgctggcttagaaaggcggccttcagagagcgcagcgggcgagtgcagcagaggtgctctggggccaggtgccaccggccattgtccaggcagctgtgtgcaagccaaagaagcatgaggacactggaagactcctcggggacagtcctgcaccgcctcatccaggagcagctgcgctacggcaacctgactgagacgcgcacgctgctagccatccagcagcaggccctgaggggtggggctggaactgggggtacagggagcccccaggcctccctggagatcctggccccagaggacagtcaggtgctgcagcaggccaccaggcaggagccccagggccaggagcaccagggcggtgagaaccacctggcagagaacaccctctaccggctatgcccacagcccagcaagggagaggagctgcccacctatgaggaggccaaagcccactcgcagtactatgcggcccagcaggcagggacccggccacatgcgggggaccgagatccccgtggggccccgggaggcagtcggaggcaggacgaggccctgcgggagctgaggcatgggcacgtgcgctcgttgagtgaacggctccttcagttgtccctggagaggaacggcgcccgggcccccagccacatgagctcctcccacagcttcccacagctggcccgcaaccagcagggccccccactgaggggcccccctgctgagggcccagagtcccgaggacccccacctcagtaccctcatgttgtactagctcatgagaccaccactgctgtcactgacccacggtaccgtgcccgcggcagcccgcacttccagca

SEQ ID NO: 3360 - protein, 239 aa, Homo sapiens
MRTLEDSSGTVLHRLIQEQLRYGNLTETRTLLAIQQQALRGGAGTGGTGSPQASLEILAPEDSQVLQQATRQEPQGQEHQGGENHLAENTLYRLCPQPSKGEELPTYEEAKAHSQYYAAQQAGTRPHAGDRDPRGAPGGSRRQDEALRELRHGHVRSLSERLLQLSLERNGARAPSHMSSSHSFPQLARNQQGPPLRGPPAEGPESRGPPPQYPHVVLAHETTTAVTDPRYRARGSPHF

SEQ ID NO: 3361 - DNA, 892 bp, Homo sapiens
agggctcgagagggagggaggcggacccgcgatgcttaaagacctctccgggcctcgggctaccctcaccggctcgccccaggcgtaccagcggccaccggtgctccaggtgctctggggccaggtgccaccggccattgtccaggcagctgtgtgcaagccaaagaagcatgaggacactggaagactcctcggggacagtcctgcaccgcctcatccaggagcagctgcgctacggcaacctgactgagacgcgcacgctgctagccatccagcagcaggccctgaggggtggggctggaactgggggtacagggagcccccaggcctccctggagatcctggccccagaggacagtcaggtgctgcagcaggccaccaggcaggagccccagggccaggagcaccagggcggtgagaaccacctggcagagaacaccctctaccggctatgcccacagcccagcaagggagaggagctgcccacctatgaggaggccaaagcccactcgcagtactatgcggcccagcaggcagggacccggccacatgcgggggaccgagatccccgtggggccccgggaggcagtcggaggcaggacgaggccctgcgggagctgaggcatgggcacgtgcgctcgttgagtgaacggctccttcagttgtccctggagaggaacggcgcccgggcccccagccacatgagctcctcccacagcttcccacagctggcccgcaaccagcagggccccccactgaggggcccccctgctgagggcccagagtcccgaggacccccacctcagtaccctcatgttgtactagctcatgagaccaccactgctgtcactgacccacggtaccgtgcccgcggcagcccgcacttccagca

SEQ ID NO: 3362 - protein, 72 aa, Homo sapiens
MLKDLSGPRATLTGSPQAYQRPPVLQVLWGQVPPAIVQAAVCKPKKHEDTGRLLGDSPAPPHPGAAALRQPD

SEQ ID NO: 3363 - DNA, 1065 bp, Homo sapiens
aagagggctcgagagggagggaggcggacccgcgatgcttaaagacctctccgggcctcgggctaccctcaccggctcgccccaggcgtaccagcggccaccggtgctccaggtccgcccgggctcgtggtggggcgggagccctggctggggtgccagaacctcctagcttggagactgtctttggttccttaggcgagcaggagcccaggccaaggctggagacgcgcgctggcttagaaaggcggccttcagagagcgcagcgggcgagtgcagcagaggtgctctggggccaggtgccaccggccattgtccaggcagctgtgtgcaagccaaagaagcatgaggacactggaagactcctcggggacagtcctgcaccgcctcatccaggagcagctgcgctacggcaacctgactgagacgcgcacgctgctagccatccagcagcaggccctgaggggtggggctggaactgggggtacagggagcccccaggcctccctggagatcctggccccagaggacagtcaggtgctgcagcaggccaccaggcaggagccccagggccaggagcaccagggcggtgagaaccacctggcagagaacaccctctaccggctatgcccacagcccagcaagggagaggagctgcccacctatgaggaggccaaagcccactcgcagtactatgcggcccagcaggcagggacccggccacatgcgggggaccgagatccccgtggggccccgggaggcagtcggaggcaggacgaggccctgcgggagctgaggcatgggcacgtgcgctcgttgagtgaacggctccttcagttgtccctggagaggaacggcgcccgggcccccagccacatgagctcctcccacagcttcccacagctggcccgcaaccagcagggccccccactgaggggcccccctgctgagggcccagagtcccgaggacccccacctcagtaccctcatgttgtactagctcatgagaccaccactgctgtcactgacccacggtaccgtgcccgcggcagcccgcacttccagca

SEQ ID NO: 3364 - protein, 239 aa, Homo sapiens; identical to SEQ ID NO: 3360

SEQ ID NO: 3365 - DNA, 1153 bp, Homo sapiens
ccgggagtcggagcctcgaggatcgagcgtcctcggggcgcagtgcgccctttcgaggcagccgcagtgcctggcaagggccgctctgcccagggagcgcagcgcgctgggctttgcggggctctagaaacgcgcgggtctcttggggctgggggagaggggagagggccgactccggagacaacagccacagtgtttcgggttgcaggaatagtaagtctccatgaatgttatcattagtaatcgtttaccaggattttcactgtgccaggagctcgcaggccactgcctctttttttttcctcatctccatgagtcaagcagaattctttgcatttttctggtggagaaactgaggctcagagattaggtgctctggggccaggtgccaccggccattgtccaggcagctgtgtgcaagccaaagaagcatgaggacactggaagactcctcggggacagtcctgcaccgcctcatccaggagcagctgcgctacggcaacctgactgagacgcgcacgctgctagccatccagcagcaggccctgaggggtggggctggaactgggggtacagggagcccccaggcctccctggagatcctggccccagaggacagtcaggtgctgcagcaggccaccaggcaggagccccagggccaggagcaccagggcggtgagaaccacctggcagagaacaccctctaccggctatgcccacagcccagcaagggagaggagctgcccacctatgaggaggccaaagcccactcgcagtactatgcggcccagcaggcagggacccggccacatgcgggggaccgagatccccgtggggccccgggaggcagtcggaggcaggacgaggccctgcgggagctgaggcatgggcacgtgcgctcgttgagtgaacggctccttcagttgtccctggagaggaacggcgcccgggcccccagccacatgagctcctcccacagcttcccacagctggcccgcaaccagcagggccccccactgaggggcccccctgctgagggcccagagtcccgaggacccccacctcagtaccctcatgttgtactagctcatgagaccaccactgctgtcactgacccacggtaccgtgcccgcggcagcccgcacttccagca

SEQ ID NO: 3366 - protein, 239 aa, Homo sapiens; identical to SEQ ID NO: 3360

SEQ ID NO: 3367 - DNA, 654 bp, Homo sapiens
agagcgtcggcgccacggccgagaacacatcttcgccgccgagctgagctgggccgagccggaggttgtggtgtctgactgcgctgggcaccctcgggccgcagcggtgctctggggccaggtgccaccggccattgtccaggcagctgagccccagggccaggagcaccagggcggtgagaaccacctggcagagaacaccctctaccggctatgcccacagcccagcaagggagaggagctgcccacctatgaggaggccaaagcccactcgcagtactatgcggcccagcaggcagggacccggccacatgcgggggaccgagatccccgtggggccccgggaggcagtcggaggcaggacgaggccctgcgggagctgaggcatgggcacgtgcgctcgttgagtgaacggctccttcagttgtccctggagaggaacggcgcccgggcccccagccacatgagctcctcccacagcttcccacagctggcccgcaaccagcagggccccccactgaggggcccccctgctgagggcccagagtcccgaggacccccacctcagtaccctcatgttgtactagctcatgagaccaccactgctgtcactgacccacggtaccgtgcccgcggcagcccgcacttccagca

SEQ ID NO: 3368 - protein, 62 aa, Homo sapiens
MSSSHSFPQLARNQQGPPLRGPPAEGPESRGPPPQYPHVVLAHETTTAVTDPRYRARGSPHF

SEQ ID NO: 3369 - DNA, 632 bp, Homo sapiens
aacctgaaactctcacattcctggcatagcagccgcctccggcgcgggccgaccctggggctgcgcgctggggcgcgaacagccagagcgtcggcgccacggccgagaacacatcttcgccgccgagctgagctgggccgagccggaggttgtggtgtctgactgcgctgggcaccctcgggccgcagcggtgctctggggccaggtgccaccggccattgtccaggcagctgtgaggccaaagcccactcgcagtactatgcggcccagcaggcagggacccggccacatgcgggggaccgagatccccgtggggccccgggaggcagtcggaggcaggacgaggccctgcgggagctgaggcatgggcacgtgcgctcgttgagtgaacggctccttcagttgtccctggagaggaacggcgcccgggcccccagccacatgagctcctcccacagcttcccacagctggcccgcaaccagcagggccccccactgaggggcccccctgctgagggcccagagtcccgaggacccccacctcagtaccctcatgttgtactagctcatgagaccaccactgctgtcactgacccacggtaccgtgcccgcggcagcccgcacttccagca

SEQ ID NO: 3370 - protein, 62 aa, Homo sapiens; identical to SEQ ID NO: 3368

SEQ ID NO: 3371 - DNA, 884 bp, Homo sapiens
acacacacacacacacagccggagtcccctcccgcagcaaccccaggacacgcgtggtacagcccttgctgtcgtcccgtcgatgggtttagggatgaagggtgctctggggccaggtgccaccggccattgtccaggcagctgtgtgcaagccaaagaagcatgaggacactggaagactcctcggggacagtcctgcaccgcctcatccaggagcagctgcgctacggcaacctgactgagacgcgcacgctgctagccatccagcagcaggccctgaggggtggggctggaactgggggtacagggagcccccaggcctccctggagatcctggccccagaggacagtcaggtgctgcagcaggccaccaggcaggagccccagggccaggagcaccagggcggtgagaaccacctggcagagaacaccctctaccggctatgcccacagcccagcaagggagaggagctgcccacctatgaggaggccaaagcccactcgcagtactatgcggcccagcaggcagggacccggccacatgcgggggaccgagatccccgtggggccccgggaggcagtcggaggcaggacgaggccctgcgggagctgaggcatgggcacgtgcgctcgttgagtgaacggctccttcagttgtccctggagaggaacggcgcccgggcccccagccacatgagctcctcccacagcttcccacagctggcccgcaaccagcagggccccccactgaggggcccccctgctgagggcccagagtcccgaggacccccacctcagtaccctcatgttgtactagctcatgagaccaccactgctgtcactgacccacggtaccgtgcccgcggcagcccgcacttccagca

SEQ ID NO: 3372 - protein, 239 aa, Homo sapiens; identical to SEQ ID NO: 3360

SEQ ID NO: 3373 - DNA, 634 bp, Homo sapiens
gctgagaggttatttgtggttcgctttgatcccgagggggaacctgaaactctcacattcctggcatagcagccgcctccggcgcgggccgaccctggggctgcgcgctggggcgcgaacagccagagcgtcggcgccacggccgagaacacatcttcgccgccgagctgagctgggccgagccggaggttgtggtgtctgactgcgctgggcaccctcgggccgcagcggtgctctggggccaggtgccaccggccattgtccaggcagctgtgtgcaagccaaagaagcatgaggacactggaagactcctcggggacagtcctgcaccgcctcatccaggagcagctgcgctacggcaacctgactgagacgcgcacgctgctagccatccagcagcaggccctgaggggtggggctggaactgggggtacagggagcccccaggcctccctggagatcctggccccagaggacagtcaggtgctgcagcaggccaccaggcaggagccccagggccaggagcaccagggcggtgagaaccacctggcagagaacaccctctaccggctatgcccacagcccagcaagggagaggagctgcccacctatgaggaggcagtcggaggcagga

SEQ ID NO: 3374 - protein, 113 aa, Homo sapiens
MRTLEDSSGTVLHRLIQEQLRYGNLTETRTLLAIQQQALRGGAGTGGTGSPQASLEILAPEDSQVLQQATRQEPQGQEHQGGENHLAENTLYRLCPQPSKGEELPTYEEAVGG

SEQ ID NO: 3375 - DNA, 540 bp, Homo sapiens
ctgagctttccaaaacaactgcagcagcagcagctgccgcttcagcagccacagaagtgttggtgtcaccaggacacagcctcagagcttcattctaaaaggaaatgtctcacatggatcttatgcagagaagcctgagcgacttgcactttcaacaatggttttgtcatagatgtaaaggtctgtttccatggttacccaaattccaggcactggccccaggcccaccacaacgcatccctcaaagtctctttggcagaggaaaagcatttctccttgctgcggcaagtcagagccagaatctcgggttctcctgctccaaagcccccactacaccctcattcgcgtgtgattcatgcgtttaggtggttctgctcagcgtcgttttttgagttggggagcggtgagtaagcacaatataagtttccttcatttctcttctccttgtttgagctaaggaattactttcttgtaccaaacattacacccttggaaaacactccagatggttctcattaaaattccaattcctttttttgc

SEQ ID NO: 3376 - protein, 86 aa, Homo sapiens
MSHMDLMQRSLSDLHFQQWFCHRCKGLFPWLPKFQALAPGPPQRIPQSLFGRGKAFLLAAASQSQNLGFSCSKAPTTPSFACDSCV

SEQ ID NO: 3377 - DNA, 1442 bp, Homo sapiens
atgagcttcctgaacctgaacaagacaatggtggcaccacagaatctgtcaaagaacaagaaatgaagtggacagacttagccttacagtacctccatgagaatgttccccccattggaaactgacgcttggctcctttcttgtggatggattttctcaaagtacacagataaagcatggtttgtttcagtctccaaattcaaacctttgagtaataaatcagcactcaaaaatgtacacccatttaaaactgagatttctcagtaatggtgaatatttcgctctttaaacctaaaactcttcattgagtagcttatatttgaacatgattggttaaacatttgcctctacctctgattttgctttgctgtcaaagtttaacaccttccaactacttatgtgtgtcctgtaacacaggtgattgaacgtatgagagggaaaggcaaagaaaaaggaagccagacactaggagaattattaacttctcatacttccccacattgagaagcattcggagtgtatttagcctgtagatgttgtgatatgcaaatatcccattccctggttactggcattcctaagattcttcatggtattttcaaactttggataaatttacagattagaaagatatctgacagttaatctctgttctccttacaaattccttttgtgctgctggaaaggatctttggctaggtggatgactagttttattcaaagccttttctcaaagccctttcagttacaaccaccccactatggaatcagtatttagttatacatttgtataagaacctgtattttgaaaaacacattcatgtatatttattcctggaattatttgcctgttaaacagtgtctttcatgttctctccccagattgtaaactctgtaagaagctgcttgtatctgtatcccttgttgaaactctgaaaacactgaataactaaaatctcttctcatcctttttatgctgggtctttttgtttacttagcttttaggaggaagaggtacatgaaaaaacaaattagcttattttaggttttcaatcacaaacatgattttagcagctatcctataatccagatacatccaggctgatttcttctctttgcatcagtagttctgcctagaaatcttttatcttcagaataaagaccccaaggcaccagtcccttcagtaagcaaagaaagacaacctaatagaaaagagacttacaatattaaaaaaacttatacaagagaaaaagcttttcaaaaaattaaaatacctagaacgccacagttctttcacattcttgttaaatgaggattttacagcttacttgtggtatgtaatctctgagacactaacatctaagaacttgacaaatgttcatgtgaatcctgcctagcctttccctggaatattagtagaccagtaaaatatgaaagctat

SEQ ID NO: 3378 - protein, 56 aa, Homo sapiens [sequence omitted]

SEQ ID NO: 3379 - DNA, 1927 bp, Homo sapiens
aatgttcaagttagaagagaagagctacattgagatgcaacatattaatatttgagggcctcgtttaacgtgttgctctcctgtcacactctatgacactggtctgtcagctgggctatgcctgtccagtatacactataaaatatgtatcagttggggttggagagaggaactgtgatcaaagtagtcacccggcccatatgagaaaatgaaccttttcccaaaaggtggccccagactaaaaagcctggagaatcctaatagtggattataccatctcttcagtcttcgtgtttaagaaataacctctttggcttacagatttgacaagatcaaagctgcaggaaaatggacagtgaggttcagagagatggaaggatcttggatttgattgatgatgcttggcgagaagacaagctgccttatgaggatgtcgcaataccactgaatgagcttcctgaacctgaacaagacaatggtggcaccacagaatctgtcaaagaacaagaaatgaagtggacagacttagccttacagtacctccatgagaatgttccccccattggaaactgacgcttggctcctttcttgtggatggattttctcaaagtacacagataaagcatggtttgtttcagtctccaaattcaaacctttgagtaataaatcagcactcaaaaatgtacacccatttagtttgtggtagcaaagtgcaatgcgaaattgaatgagaaactgagatttctcagtaatggtgaatatttcgctctttaaacctaaaactcttcattgagtagcttatatttgaacatgattggttaaacatttgcctctacctctgattttgctttgctgtcaaagtttaacaccttccaactacttatgtgtgtcctgtaacacaggtgattgaacgtatgagagggaaaggcaaagaaaaaggaagccagacactaggagaattattaacttctcatacttccccacattgagaagcattcggagtgtatttagcctgtagatgttgtgatatgcaaatatcccattccctggttactggcattcctaagattcttcatggtattttcaaactttggataaatttacagattagaaagatatctgacagttaatctctgttctccttacaaattccttttgtgctgctggaaaggatctttggctaggtggatgactagttttattcaaagccttttctcaaagccctttcagttacaaccaccccactatggaatcagtatttagttatacatttgtataagaacctgtattttgaaaaacacattcatgtatatttattcctggaattatttgcctgttaaacagtgtctttcatgttctctccccagattgtaaactctgtaagaagctgcttgtatctgtatcccttgttgaaactctgaaaacactgaataactaaaatctcttctcatcctttttatgctgggtctttttgtttacttagcttttaggaggaagaggtacatgaaaaaacaaattagcttattttaggttttcaatcacaaacatgattttagcagctatcctataatccagatacatccaggctgatttcttctctttgcatcagtagttctgcctagaaatcttttatcttcagaataaagaccccaaggcaccagtcccttcagtaagcaaagaaagacaacctaatagaaaagagacttacaatattaaaaaaacttatacaagagaaaaagcttttcaaaaaattaaaatacctagaacgccacagttctttcacattcttgttaaatgaggattttacagcttacttgtggtatgtaatctctgagacactaacatctaagaacttgacaaatgttcatgtgaatcctgcctagcctttccctggaatattagtagaccagtaaaatatgaaagctat

SEQ ID NO: 3380 - protein, 74 aa, Homo sapiens; identical to SEQ ID NO: 378

SEQ ID NO: 3381 - DNA, 1689 bp, Homo sapiens
aaggatagaaggcctactgaagctcgagtgatttgagaaaactttacaaaggtggaaaatctacgtgggcctccgaaagtcagatttgacaagatcaaagctgcaggaaaatggacagtgaggttcagagagatggaaggatcttggatttgattgatgatgcttggcgagaagacaagctgccttatgaggatgtcgcaataccactgaatgagcttcctgaacctgaacaagacaatggtggcaccacagaatctgtcaaagaacaagaaatgaagtggacagacttagccttacagtacctccatgagaatgttccccccattggaaactgacgcttggctcctttcttgtggatggattttctcaaagtacacagataaagcatggtttgtttcagtctccaaattcaaacctttgagtaataaatcagcactcaaaaatgtacacccatttagtttgtggtagcaaagtgcaatgcgaaattgaatgagaaactgagatttctcagtaatggtgaatatttcgctctttaaacctaaaactcttcattgagtagcttatatttgaacatgattggttaaacatttgcctctacctctgattttgctttgctgtcaaagtttaacaccttccaactacttatgtgtgtcctgtaacacaggtgattgaacgtatgagagggaaaggcaaagaaaaaggaagccagacactaggagaattattaacttctcatacttccccacattgagaagcattcggagtgtatttagcctgtagatgttgtgatatgcaaatatcccattccctggttactggcattcctaagattcttcatggtattttcaaactttggataaatttacagattagaaagatatctgacagttaatctctgttctccttacaaattccttttgtgctgctggaaaggatctttggctaggtggatgactagttttattcaaagccttttctcaaagccctttcagttacaaccaccccactatggaatcagtatttagttatacatttgtataagaacctgtattttgaaaaacacattcatgtatatttattcctggaattatttgcctgttaaacagtgtctttcatgttctctccccagattgtaaactctgtaagaagctgcttgtatctgtatcccttgttgaaactctgaaaacactgaataactaaaatctcttctcatcctttttatgctgggtctttttgtttacttagcttttaggaggaagaggtacatgaaaaaacaaattagcttattttaggttttcaatcacaaacatgattttagcagctatcctataatccagatacatccaggctgatttcttctctttgcatcagtagttctgcctagaaatcttttatcttcagaataaagaccccaaggcaccagtcccttcagtaagcaaagaaagacaacctaatagaaaagagacttacaatattaaaaaaacttatacaagagaaaaagcttttcaaaaaattaaaatacctagaacgccacagttctttcacattcttgttaaatgaggattttacagcttacttgtggtatgtaatctctgagacactaacatctaagaacttgacaaatgttcatgtgaatcctgcctagcctttccctggaatattagtagaccagtaaaatatgaaagctat

SEQ ID NO: 3382 - protein, 74 aa, Homo sapiens; identical to SEQ ID NO: 378

SEQ ID NO: 3383 - DNA, 1416 bp, Homo sapiens
aggagcaagcgtctgccgcggtggccgggtgccgatttgacaagatcaaagctgcaggaaaatggacagtgaggttcagagagatggattttctcaaagtacacagataaagcatggtttgtttcagtctccaaattcaaacctttgagtaataaatcagcactcaaaaatgtacacccatttagtttgtggtagcaaagtgcaatgcgaaattgaatgagaaactgagatttctcagtaatggtgaatatttcgctctttaaacctaaaactcttcattgagtagcttatatttgaacatgattggttaaacatttgcctctacctctgattttgctttgctgtcaaagtttaacaccttccaactacttatgtgtgtcctgtaacacaggtgattgaacgtatgagagggaaaggcaaagaaaaaggaagccagacactaggagaattattaacttctcatacttccccacattgagaagcattcggagtgtatttagcctgtagatgttgtgatatgcaaatatcccattccctggttactggcattcctaagattcttcatggtattttcaaactttggataaatttacagattagaaagatatctgacagttaatctctgttctccttacaaattccttttgtgctgctggaaaggatctttggctaggtggatgactagttttattcaaagccttttctcaaagccctttcagttacaaccaccccactatggaatcagtatttagttatacatttgtataagaacctgtattttgaaaaacacattcatgtatatttattcctggaattatttgcctgttaaacagtgtctttcatgttctctccccagattgtaaactctgtaagaagctgcttgtatctgtatcccttgttgaaactctgaaaacactgaataactaaaatctcttctcatcctttttatgctgggtctttttgtttacttagcttttaggaggaagaggtacatgaaaaaacaaattagcttattttaggttttcaatcacaaacatgattttagcagctatcctataatccagatacatccaggctgatttcttctctttgcatcagtagttctgcctagaaatcttttatcttcagaataaagaccccaaggcaccagtcccttcagtaagcaaagaaagacaacctaatagaaaagagacttacaatattaaaaaaacttatacaagagaaaaagcttttcaaaaaattaaaatacctagaacgccacagttctttcacattcttgttaaatgaggattttacagcttacttgtggtatgtaatctctgagacactaacatctaagaacttgacaaatgttcatgtgaatcctgcctagcctttccctggaatattagtagaccagtaaaatatgaaagctat

SEQ ID NO: 3384 - protein, 33 aa, Homo sapiens
MQISHSLVTGIPKILHGIFKLWINLQIRKISDS

SEQ ID NO: 3385 - DNA, 1921 bp, Homo sapiens
gtgatgcgggggagggggggggggcgtggcaggagcaagcgtctgccgcggtggccgggtgccggtaagggtttccagcgcccccggcctaggttttggaggcgcgggaatgcgttcgttgctcagtgtcggacttccccctattcccatcggccgaggctgtcactttacgctcataaccgtttttctttactgcactcgtgtcgggaggaaagggacttgcgtggcacccccagacctccccgtctccgcttccacgtttggtacatcctgcctgaggcaggaagccgcagctgagggacggcctgtcgtacgatttgacaagatcaaagctgcaggaaaatggacagtgaggttcagagagatggaaggatcttggatttgattgatgatgcttggcgagaagacaagctgccttatgaggatgtcgcaataccactgaatgagcttcctgaacctgaacaagacaatggtggcaccacagaatctgtcaaagaacaagaaatgaagtggacagacttagccttacagtacctccatgagaatgttccccccattggaaactgacgcttggctcctttcttgtggatggattttctcaaagtacacagataaagcatggtttgtttcagtctccaaattcaaacctttgagtaataaatcagcactcaaaaatgtacacccatttagtttgtggtagcaaagtgcaatgcgaaattgaatgagaaactgagatttctcagtaatggtgaatatttcgctctttaaacctaaaactcttcattgagtagcttatatttgaacatgattggttaaacatttgcctctacctctgattttgctttgctgtcaaagtttaacaccttccaactacttatgtgtgtcctgtaacacaggtgattgaacgtatgagagggaaaggcaaagaaaaaggaagccagacactaggagaattattaacttctcatacttccccacattgagaagcattcggagtgtatttagcctgtagatgttgtgatatgcaaatatcccattccctggttactggcattcctaagattcttcatggtattttcaaactttggataaatttacagattagaaagatatctgacagttaatctctgttctccttacaaattccttttgtgctgctggaaaggatctttggctaggtggatgactagttttattcaaagccttttctcaaagccctttcagttacaaccaccccactatggaatcagtatttagttatacatttgtataagaacctgtattttgaaaaacacattcatgtatatttattcctggaattatttgcctgttaaacagtgtctttcatgttctctccccagattgtaaactctgtaagaagctgcttgtatctgtatcccttgttgaaactctgaaaacactgaataactaaaatctcttctcatcctttttatgctgggtctttttgtttacttagcttttaggaggaagaggtacatgaaaaaacaaattagcttattttaggttttcaatcacaaacatgattttagcagctatcctataatccagatacatccaggctgatttcttctctttgcatcagtagttctgcctagaaatcttttatcttcagaataaagaccccaaggcaccagtcccttcagtaagcaaagaaagacaacctaatagaaaagagacttacaatattaaaaaaacttatacaagagaaaaagcttttcaaaaaattaaaatacctagaacgccacagttctttcacattcttgttaaatgaggattttacagcttacttgtggtatgtaatctctgagacactaacatctaagaacttgacaaatgttcatgtgaatcctgcctagcctttccctggaatattagtagaccagtaaaatatgaaagctat

SEQ ID NO: 3386 - protein, 91 aa, Homo sapiens
MRSLLSVGLPPIPIGRGCHFTLITVFLYCTRVGRKGTCVAPPDLPVSASTFGTSCLRQEAAAEGRPVVRFDKIKAAGKWTVRFREMEGSWI

SEQ ID NO: 3387 - DNA, 1676 bp, Homo sapiens
agacacgtgatgcgggggagggggggggggcgtggcaggagcaagcgtctgccgcggtggccgggtgccgatttgacaagatcaaagctgcaggaaaatggacagtgaggttcagagagatggaaggatcttggatttgattgatgatgcttggcgagaagacaagctgccttatgaggatgtcgcaataccactgaatgagcttcctgaacctgaacaagacaatggtggcaccacagaatctgtcaaagaacaagaaatgaagtggacagacttagccttacagtacctccatgagaatgttccccccattggaaactgacgcttggctcctttcttgtggatggattttctcaaagtacacagataaagcatggtttgtttcagtctccaaattcaaacctttgagtaataaatcagcactcaaaaatgtacacccatttagtttgtggtagcaaagtgcaatgcgaaattgaatgagaaactgagatttctcagtaatggtgaatatttcgctctttaaacctaaaactcttcattgagtagcttatatttgaacatgattggttaaacatttgcctctacctctgattttgctttgctgtcaaagtttaacaccttccaactacttatgtgtgtcctgtaacacaggtgattgaacgtatgagagggaaaggcaaagaaaaaggaagccagacactaggagaattattaacttctcatacttccccacattgagaagcattcggagtgtatttagcctgtagatgttgtgatatgcaaatatcccattccctggttactggcattcctaagattcttcatggtattttcaaactttggataaatttacagattagaaagatatctgacagttaatctctgttctccttacaaattccttttgtgctgctggaaaggatctttggctaggtggatgactagttttattcaaagccttttctcaaagccctttcagttacaaccaccccactatggaatcagtatttagttatacatttgtataagaacctgtattttgaaaaacacattcatgtatatttattcctggaattatttgcctgttaaacagtgtctttcatgttctctccccagattgtaaactctgtaagaagctgcttgtatctgtatcccttgttgaaactctgaaaacactgaataactaaaatctcttctcatcctttttatgctgggtctttttgtttacttagcttttaggaggaagaggtacatgaaaaaacaaattagcttattttaggttttcaatcacaaacatgattttagcagctatcctataatccagatacatccaggctgatttcttctctttgcatcagtagttctgcctagaaatcttttatcttcagaataaagaccccaaggcaccagtcccttcagtaagcaaagaaagacaacctaatagaaaagagacttacaatattaaaaaaacttatacaagagaaaaagcttttcaaaaaattaaaatacctagaacgccacagttctttcacattcttgttaaatgaggattttacagcttacttgtggtatgtaatctctgagacactaacatctaagaacttgacaaatgttcatgtgaatcctgcctagcctttccctggaatattagtagaccagtaaaatatgaaagctat

SEQ ID NO: 3388 - protein, 74 aa, Homo sapiens; identical to SEQ ID NO: 378

SEQ ID NO: 3389 - DNA, 2399 bp, Homo sapiens
tttaataattgaaacaatgccttctccagacttcccctgcacgcgagcaaatgaactcacccacatccgggaatccgaggaaagcgagtgcagacacgtgatgcgggggagggggggggggcgtggcaggagcaagcgtctgccgcggtggccgggtgccggtaagggtttccagcgcccccggcctaggttttggaggcgcgggaatgcgttcgttgctcagtgtcggacttccccctattcccatcggccgaggctgtcactttacgctcataaccgtttttctttactgcactcgtgtcgggaggaaagggacttgcgtggcacccccagacctccccgtctccgcttccacgtttggtacatcctgcctgaggcaggaagccgcagctgagggacggcctgtcgtacggtgcggatggtggtggcctgcgaggctcatttctagcaaggaacaaggctttcccgctttgattttataaatattatgtttacaaagctgtaatatatagaaattgataagacgtgtccctgtccctggaaacgcaggcaccgcgtgtttggaaagacattcatctgggctgtttgacagactccccagttggtgccatgctctgtgcttagggaactgtgagacccctggaggggtgggtaccgggaccgcactcagcctggggtttggaggcggcctcctataggaagcgacctgggacctaagatttttagactgactgtgggttcactggaataaaaaggaagaaacaaagagcattgcaggcatcgggactgtcacatttgacaagatcaaagctgcaggaaaatggacagtgaggttcagagagatggaaggatcttggatttgattgatgatgcttggcgagaagacaagctgccttatgaggatgtcgcaataccactgaatgagcttcctgaacctgaacaagacaatggtggcaccacagaatctgtcaaagaacaagaaatgaagtggacagacttagccttacagtacctccatgagaatgttccccccattggaaactgacgcttggctcctttcttgtggatggattttctcaaagtacacagataaagcatggtttgtttcagtctccaaattcaaacctttgagtaataaatcagcactcaaaaatgtacacccatttagtttgtggtagcaaagtgcaatgcgaaattgaatgagaaactgagatttctcagtaatggtgaatatttcgctctttaaacctaaaactcttcattgagtagcttatatttgaacatgattggttaaacatttgcctctacctctgattttgctttgctgtcaaagtttaacaccttccaactacttatgtgtgtcctgtaacacaggtgattgaacgtatgagagggaaaggcaaagaaaaaggaagccagacactaggagaattattaacttctcatacttccccacattgagaagcattcggagtgtatttagcctgtagatgttgtgatatgcaaatatcccattccctggttactggcattcctaagattcttcatggtattttcaaactttggataaatttacagattagaaagatatctgacagttaatctctgttctccttacaaattccttttgtgctgctggaaaggatctttggctaggtggatgactagttttattcaaagccttttctcaaagccctttcagttacaaccaccccactatggaatcagtatttagttatacatttgtataagaacctgtattttgaaaaacacattcatgtatatttattcctggaattatttgcctgttaaacagtgtctttcatgttctctccccagattgtaaactctgtaagaagctgcttgtatctgtatcccttgttgaaactctgaaaacactgaataactaaaatctcttctcatcctttttatgctgggtctttttgtttacttagcttttaggaggaagaggtacatgaaaaaacaaattagcttattttaggttttcaatcacaaacatgattttagcagctatcctataatccagatacatccaggctgatttcttctctttgcatcagtagttctgcctagaaatcttttatcttcagaataaagaccccaaggcaccagtcccttcagtaagcaaagaaagacaacctaatagaaaagagacttacaatattaaaaaaacttatacaagagaaaaagcttttcaaaaaattaaaatacctagaacgccacagttctttcacattcttgttaaatgaggattttacagcttacttgtggtatgtaatctctgagacactaacatctaagaacttgacaaatgttcatgtgaatcctgcctagcctttccctggaatattagtagaccagtaaaatatgaaagctat

SEQ ID NO: 3390 - protein, 74 aa, Homo sapiens; identical to SEQ ID NO: 378

SEQ ID NO: 3391 - DNA, 1736 bp, Homo sapiens
acactaaatgagcgggtccccttgtgccgtgaatgaagtagtcccaacagcgctagctagacagcagccctggcagggaggccgcactggggtctctccgctgaaaaggaaggtgggtccgccggggaagatttgacaagatcaaagctgcaggaaaatggacagtgaggttcagagagatggaaggatcttggatttgattgatgatgcttggcgagaagacaagctgccttatgaggatgtcgcaataccactgaatgagcttcctgaacctgaacaagacaatggtggcaccacagaatctgtcaaagaacaagaaatgaagtggacagacttagccttacagtacctccatgagaatgttccccccattggaaactgacgcttggctcctttcttgtggatggattttctcaaagtacacagataaagcatggtttgtttcagtctccaaattcaaacctttgagtaataaatcagcactcaaaaatgtacacccatttagtttgtggtagcaaagtgcaatgcgaaattgaatgagaaactgagatttctcagtaatggtgaatatttcgctctttaaacctaaaactcttcattgagtagcttatatttgaacatgattggttaaacatttgcctctacctctgattttgctttgctgtcaaagtttaacaccttccaactacttatgtgtgtcctgtaacacaggtgattgaacgtatgagagggaaaggcaaagaaaaaggaagccagacactaggagaattattaacttctcatacttccccacattgagaagcattcggagtgtatttagcctgtagatgttgtgatatgcaaatatcccattccctggttactggcattcctaagattcttcatggtattttcaaactttggataaatttacagattagaaagatatctgacagttaatctctgttctccttacaaattccttttgtgctgctggaaaggatctttggctaggtggatgactagttttattcaaagccttttctcaaagccctttcagttacaaccaccccactatggaatcagtatttagttatacatttgtataagaacctgtattttgaaaaacacattcatgtatatttattcctggaattatttgcctgttaaacagtgtctttcatgttctctccccagattgtaaactctgtaagaagctgcttgtatctgtatcccttgttgaaactctgaaaacactgaataactaaaatctcttctcatcctttttatgctgggtctttttgtttacttagcttttaggaggaagaggtacatgaaaaaacaaattagcttattttaggttttcaatcacaaacatgattttagcagctatcctataatccagatacatccaggctgatttcttctctttgcatcagtagttctgcctagaaatcttttatcttcagaataaagaccccaaggcaccagtcccttcagtaagcaaagaaagacaacctaatagaaaagagacttacaatattaaaaaaacttatacaagagaaaaagcttttcaaaaaattaaaatacctagaacgccacagttctttcacattcttgttaaatgaggattttacagcttacttgtggtatgtaatctctgagacactaacatctaagaacttgacaaatgttcatgtgaatcctgcctagcctttccctggaatattagtagaccagtaaaatatgaaagctat

SEQ ID NO: 3392 - protein, 74 aa, Homo sapiens; identical to SEQ ID NO: 378

SEQ ID NO: 3393 - DNA, 973 bp, Homo sapiens
atgagcttcctgaacctgaacaagacaatggtggcaccacagaatctgtcaaagaacaagaaatgaagtggacagacttagccttacagtacctccatgagaatgttccccccattggaaactgacgcttggctcctttcttgtggatggattttctcaaagtacacagataaagcatggtttgtttcagtctccaaattcaaacctttgagtaataaatcagcactcaaaaatgtacacccatttaaaactgagatttctcagtaatggtgaatatttcgctctttaaacctaaaactcttcattgagtagcttatatttgaacatgattggttaaacatttgcctctacctctgattttgctttgctgtcaaagtttaacaccttccaactacttatgtgtgtcctgtaacacaggtgattgaacgtatgagagggaaaggcaaagaaaaaggaagccagacactaggagaattattaacttctcatacttccccacattgagaagcattcggagtgtatttagcctgtagatgttgtgatatgcaaatatcccattccctggttactggcattcctaagattcttcatggtattttcaaactttggataaatttacagattagaaagatatctgacagttaatctctgttctccttacaaattccttttgtgctgctggaaaggatctttggctaggtggatgactagttttattcaaagccttttctcaaagccctttcagttacaaccaccccactatggaatcagtatttagttatacatttgtataagaacctgtattttgaaaaacacattcatgtatatttattcctggaattatttgcctgttaaacagtgtctttcatgttctctccccagattgtaaactctgtaagaagctgcttgtatctgtatcccttgttgaaactctgaaaacactgaataactaaaatctcttctcatccttttt

SEQ ID NO: 3394 - protein, 56 aa, Homo sapiens [sequence omitted]

SEQ ID NO: 3395 - DNA, 1458 bp, Homo sapiens
aatgttcaagttagaagagaagagctacattgagatgcaacatattaatatttgagggcctcgtttaacgtgttgctctcctgtcacactctatgacactggtctgtcagctgggctatgcctgtccagtatacactataaaatatgtatcagttggggttggagagaggaactgtgatcaaagtagtcacccggcccatatgagaaaatgaaccttttcccaaaaggtggccccagactaaaaagcctggagaatcctaatagtggattataccatctcttcagtcttcgtgtttaagaaataacctctttggcttacagatttgacaagatcaaagctgcaggaaaatggacagtgaggttcagagagatggaaggatcttggatttgattgatgatgcttggcgagaagacaagctgccttatgaggatgtcgcaataccactgaatgagcttcctgaacctgaacaagacaatggtggcaccacagaatctgtcaaagaacaagaaatgaagtggacagacttagccttacagtacctccatgagaatgttccccccattggaaactgacgcttggctcctttcttgtggatggattttctcaaagtacacagataaagcatggtttgtttcagtctccaaattcaaacctttgagtaataaatcagcactcaaaaatgtacacccatttagtttgtggtagcaaagtgcaatgcgaaattgaatgagaaactgagatttctcagtaatggtgaatatttcgctctttaaacctaaaactcttcattgagtagcttatatttgaacatgattggttaaacatttgcctctacctctgattttgctttgctgtcaaagtttaacaccttccaactacttatgtgtgtcctgtaacacaggtgattgaacgtatgagagggaaaggcaaagaaaaaggaagccagacactaggagaattattaacttctcatacttccccacattgagaagcattcggagtgtatttagcctgtagatgttgtgatatgcaaatatcccattccctggttactggcattcctaagattcttcatggtattttcaaactttggataaatttacagattagaaagatatctgacagttaatctctgttctccttacaaattccttttgtgctgctggaaaggatctttggctaggtggatgactagttttattcaaagccttttctcaaagccctttcagttacaaccaccccactatggaatcagtatttagttatacatttgtataagaacctgtattttgaaaaacacattcatgtatatttattcctggaattatttgcctgttaaacagtgtctttcatgttctctccccagattgtaaactctgtaagaagctgcttgtatctgtatcccttgttgaaactctgaaaacactgaataactaaaatctcttctcatccttttt

SEQ ID NO: 3396 - protein, 74 aa, Homo sapiens; identical to SEQ ID NO: 378

SEQ ID NO: 3397 - DNA, 1220 bp, Homo sapiens
aaggatagaaggcctactgaagctcgagtgatttgagaaaactttacaaaggtggaaaatctacgtgggcctccgaaagtcagatttgacaagatcaaagctgcaggaaaatggacagtgaggttcagagagatggaaggatcttggatttgattgatgatgcttggcgagaagacaagctgccttatgaggatgtcgcaataccactgaatgagcttcctgaacctgaacaagacaatggtggcaccacagaatctgtcaaagaacaagaaatgaagtggacagacttagccttacagtacctccatgagaatgttccccccattggaaactgacgcttggctcctttcttgtggatggattttctcaaagtacacagataaagcatggtttgtttcagtctccaaattcaaacctttgagtaataaatcagcactcaaaaatgtacacccatttagtttgtggtagcaaagtgcaatgcgaaattgaatgagaaactgagatttctcagtaatggtgaatatttcgctctttaaacctaaaactcttcattgagtagcttatatttgaacatgattggttaaacatttgcctctacctctgattttgctttgctgtcaaagtttaacaccttccaactacttatgtgtgtcctgtaacacaggtgattgaacgtatgagagggaaaggcaaagaaaaaggaagccagacactaggagaattattaacttctcatacttccccacattgagaagcattcggagtgtatttagcctgtagatgttgtgatatgcaaatatcccattccctggttactggcattcctaagattcttcatggtattttcaaactttggataaatttacagattagaaagatatctgacagttaatctctgttctccttacaaattccttttgtgctgctggaaaggatctttggctaggtggatgactagttttattcaaagccttttctcaaagccctttcagttacaaccaccccactatggaatcagtatttagttatacatttgtataagaacctgtattttgaaaaacacattcatgtatatttattcctggaattatttgcctgttaaacagtgtctttcatgttctctccccagattgtaaactctgtaagaagctgcttgtatctgtatcccttgttgaaactctgaaaacactgaataactaaaatctcttctcatccttttt

SEQ ID NO: 3398 - protein, 74 aa, Homo sapiens; identical to SEQ ID NO: 378

SEQ ID NO: 3399 - DNA, 947 bp, Homo sapiens
aggagcaagcgtctgccgcggtggccgggtgccgatttgacaagatcaaagctgcaggaaaatggacagtgaggttcagagagatggattttctcaaagtacacagataaagcatggtttgtttcagtctccaaattcaaacctttgagtaataaatcagcactcaaaaatgtacacccatttagtttgtggtagcaaagtgcaatgcgaaattgaatgagaaactgagatttctcagtaatggtgaatatttcgctctttaaacctaaaactcttcattgagtagcttatatttgaacatgattggttaaacatttgcctctacctctgattttgctttgctgtcaaagtttaacaccttccaactacttatgtgtgtcctgtaacacaggtgattgaacgtatgagagggaaaggcaaagaaaaaggaagccagacactaggagaattattaacttctcatacttccccacattgagaagcattcggagtgtatttagcctgtagatgttgtgatatgcaaatatcccattccctggttactggcattcctaagattcttcatggtattttcaaactttggataaatttacagattagaaagatatctgacagttaatctctgttctccttacaaattccttttgtgctgctggaaaggatctttggctaggtggatgactagttttattcaaagccttttctcaaagccctttcagttacaaccaccccactatggaatcagtatttagttatacatttgtataagaacctgtattttgaaaaacacattcatgtatatttattcctggaattatttgcctgttaaacagtgtctttcatgttctctccccagattgtaaactctgtaagaagctgcttgtatctgtatcccttgttgaaactctgaaaacactgaataactaaaatctcttctcatccttttt

SEQ ID NO: 3400 - protein, 33 aa, Homo sapiens; identical to SEQ ID NO: 3384

SEQ ID NO: 3401 - DNA, 1460 bp, Homo sapiens
gagggggggggggcgtggcaggagcaagcgtctgccgcggtggccgggtgccggtaagggtttccagcgcccccggcctaggttttggaggcgcgggaatgcgttcgttgctcagtgtcggacttccccctattcccatcggccgaggctgtcaaaggctttcccgctttgattttataaatattatgtttacaaagctgtaatatatagaaattgataagacgtgtccctgtccctggaaacgcaggcaccgcgtgtttggaaagacattcatctgggctgtttgacagactccccagttggtgccatgctctgtgcttaggatttgacaagatcaaagctgcaggaaaatggacagtgaggttcagagagatggaaggatcttggatttgattgatgatgcttggcgagaagacaagctgccttatgaggatgtcgcaataccactgaatgagcttcctgaacctgaacaagacaatggtggcaccacagaatctgtcaaagaacaagaaatgaagtggacagacttagccttacagtacctccatgagaatgttccccccattggaaactgacgcttggctcctttcttgtggatggattttctcaaagtacacagataaagcatggtttgtttcagtctccaaattcaaacctttgagtaataaatcagcactcaaaaatgtacacccatttagtttgtggtagcaaagtgcaatgcgaaattgaatgagaaactgagatttctcagtaatggtgaatatttcgctctttaaacctaaaactcttcattgagtagcttatatttgaacatgattggttaaacatttgcctctacctctgattttgctttgctgtcaaagtttaacaccttccaactacttatgtgtgtcctgtaacacaggtgattgaacgtatgagagggaaaggcaaagaaaaaggaagccagacactaggagaattattaacttctcatacttccccacattgagaagcattcggagtgtatttagcctgtagatgttgtgatatgcaaatatcccattccctggttactggcattcctaagattcttcatggtattttcaaactttggataaatttacagattagaaagatatctgacagttaatctctgttctccttacaaattccttttgtgctgctggaaaggatctttggctaggtggatgactagttttattcaaagccttttctcaaagccctttcagttacaaccaccccactatggaatcagtatttagttatacatttgtataagaacctgtattttgaaaaacacattcatgtatatttattcctggaattatttgcctgttaaacagtgtctttcatgttctctccccagattgtaaactctgtaagaagctgcttgtatctgtatcccttgttgaaactctgaaaacactgaataactaaaatctcttctcatccttttt

SEQ ID NO: 3402 - protein, 74 aa, Homo sapiens; identical to SEQ ID NO: 378

SEQ ID NO: 3403 - DNA, 1452 bp, Homo sapiens
gtgatgcgggggagggggggggggcgtggcaggagcaagcgtctgccgcggtggccgggtgccggtaagggtttccagcgcccccggcctaggttttggaggcgcgggaatgcgttcgttgctcagtgtcggacttccccctattcccatcggccgaggctgtcactttacgctcataaccgtttttctttactgcactcgtgtcgggaggaaagggacttgcgtggcacccccagacctccccgtctccgcttccacgtttggtacatcctgcctgaggcaggaagccgcagctgagggacggcctgtcgtacgatttgacaagatcaaagctgcaggaaaatggacagtgaggttcagagagatggaaggatcttggatttgattgatgatgcttggcgagaagacaagctgccttatgaggatgtcgcaataccactgaatgagcttcctgaacctgaacaagacaatggtggcaccacagaatctgtcaaagaacaagaaatgaagtggacagacttagccttacagtacctccatgagaatgttccccccattggaaactgacgcttggctcctttcttgtggatggattttctcaaagtacacagataaagcatggtttgtttcagtctccaaattcaaacctttgagtaataaatcagcactcaaaaatgtacacccatttagtttgtggtagcaaagtgcaatgcgaaattgaatgagaaactgagatttctcagtaatggtgaatatttcgctctttaaacctaaaactcttcattgagtagcttatatttgaacatgattggttaaacatttgcctctacctctgattttgctttgctgtcaaagtttaacaccttccaactacttatgtgtgtcctgtaacacaggtgattgaacgtatgagagggaaaggcaaagaaaaaggaagccagacactaggagaattattaacttctcatacttccccacattgagaagcattcggagtgtatttagcctgtagatgttgtgatatgcaaatatcccattccctggttactggcattcctaagattcttcatggtattttcaaactttggataaatttacagattagaaagatatctgacagttaatctctgttctccttacaaattccttttgtgctgctggaaaggatctttggctaggtggatgactagttttattcaaagccttttctcaaagccctttcagttacaaccaccccactatggaatcagtatttagttatacatttgtataagaacctgtattttgaaaaacacattcatgtatatttattcctggaattatttgcctgttaaacagtgtctttcatgttctctccccagattgtaaactctgtaagaagctgcttgtatctgtatcccttgttgaaactctgaaaacactgaataactaaaatctcttctcatccttttt

SEQ ID NO: 3404 - protein, 91 aa, Homo sapiens; identical to SEQ ID NO: 3386

SEQ ID NO: 3405 - DNA, 1207 bp, Homo sapiens
agacacgtgatgcgggggagggggggggggcgtggcaggagcaagcgtctgccgcggtggccgggtgccgatttgacaagatcaaagctgcaggaaaatggacagtgaggttcagagagatggaaggatcttggatttgattgatgatgcttggcgagaagacaagctgccttatgaggatgtcgcaataccactgaatgagcttcctgaacctgaacaagacaatggtggcaccacagaatctgtcaaagaacaagaaatgaagtggacagacttagccttacagtacctccatgagaatgttccccccattggaaactgacgcttggctcctttcttgtggatggattttctcaaagtacacagataaagcatggtttgtttcagtctccaaattcaaacctttgagtaataaatcagcactcaaaaatgtacacccatttagtttgtggtagcaaagtgcaatgcgaaattgaatgagaaactgagatttctcagtaatggtgaatatttcgctctttaaacctaaaactcttcattgagtagcttatatttgaacatgattggttaaacatttgcctctacctctgattttgctttgctgtcaaagtttaacaccttccaactacttatgtgtgtcctgtaacacaggtgattgaacgtatgagagggaaaggcaaagaaaaaggaagccagacactaggagaattattaacttctcatacttccccacattgagaagcattcggagtgtatttagcctgtagatgttgtgatatgcaaatatcccattccctggttactggcattcctaagattcttcatggtattttcaaactttggataaatttacagattagaaagatatctgacagttaatctctgttctccttacaaattccttttgtgctgctggaaaggatctttggctaggtggatgactagttttattcaaagccttttctcaaagccctttcagttacaaccaccccactatggaatcagtatttagttatacatttgtataagaacctgtattttgaaaaacacattcatgtatatttattcctggaattatttgcctgttaaacagtgtctttcatgttctctccccagattgtaaactctgtaagaagctgcttgtatctgtatcccttgttgaaactctgaaaacactgaataactaaaatctcttctcatccttttt

SEQ ID NO: 3406 - protein, 74 aa, Homo sapiens; identical to SEQ ID NO: 378

SEQ ID NO: 3407 - DNA, 1930 bp, Homo sapiens
tttaataattgaaacaatgccttctccagacttcccctgcacgcgagcaaatgaactcacccacatccgggaatccgaggaaagcgagtgcagacacgtgatgcgggggagggggggggggcgtggcaggagcaagcgtctgccgcggtggccgggtgccggtaagggtttccagcgcccccggcctaggttttggaggcgcgggaatgcgttcgttgctcagtgtcggacttccccctattcccatcggccgaggctgtcactttacgctcataaccgtttttctttactgcactcgtgtcgggaggaaagggacttgcgtggcacccccagacctccccgtctccgcttccacgtttggtacatcctgcctgaggcaggaagccgcagctgagggacggcctgtcgtacggtgcggatggtggtggcctgcgaggctcatttctagcaaggaacaaggctttcccgctttgattttataaatattatgtttacaaagctgtaatatatagaaattgataagacgtgtccctgtccctggaaacgcaggcaccgcgtgtttggaaagacattcatctgggctgtttgacagactccccagttggtgccatgctctgtgcttagggaactgtgagacccctggaggggtgggtaccgggaccgcactcagcctggggtttggaggcggcctcctataggaagcgacctgggacctaagatttttagactgactgtgggttcactggaataaaaaggaagaaacaaagagcattgcaggcatcgggactgtcacatttgacaagatcaaagctgcaggaaaatggacagtgaggttcagagagatggaaggatcttggatttgattgatgatgcttggcgagaagacaagctgccttatgaggatgtcgcaataccactgaatgagcttcctgaacctgaacaagacaatggtggcaccacagaatctgtcaaagaacaagaaatgaagtggacagacttagccttacagtacctccatgagaatgttccccccattggaaactgacgcttggctcctttcttgtggatggattttctcaaagtacacagataaagcatggtttgtttcagtctccaaattcaaacctttgagtaataaatcagcactcaaaaatgtacacccatttagtttgtggtagcaaagtgcaatgcgaaattgaatgagaaactgagatttctcagtaatggtgaatatttcgctctttaaacctaaaactcttcattgagtagcttatatttgaacatgattggttaaacatttgcctctacctctgattttgctttgctgtcaaagtttaacaccttccaactacttatgtgtgtcctgtaacacaggtgattgaacgtatgagagggaaaggcaaagaaaaaggaagccagacactaggagaattattaacttctcatacttccccacattgagaagcattcggagtgtatttagcctgtagatgttgtgatatgcaaatatcccattccctggttactggcattcctaagattcttcatggtattttcaaactttggataaatttacagattagaaagatatctgacagttaatctctgttctccttacaaattccttttgtgctgctggaaaggatctttggctaggtggatgactagttttattcaaagccttttctcaaagccctttcagttacaaccaccccactatggaatcagtatttagttatacatttgtataagaacctgtattttgaaaaacacattcatgtatatttattcctggaattatttgcctgttaaacagtgtctttcatgttctctccccagattgtaaactctgtaagaagctgcttgtatctgtatcccttgttgaaactctgaaaacactgaataactaaaatctcttctcatccttttt

SEQ ID NO: 3408 - protein, 74 aa, Homo sapiens; identical to SEQ ID NO: 378

SEQ ID NO: 3409 - DNA, 1267 bp, Homo sapiens
acactaaatgagcgggtccccttgtgccgtgaatgaagtagtcccaacagcgctagctagacagcagccctggcagggaggccgcactggggtctctccgctgaaaaggaaggtgggtccgccggggaagatttgacaagatcaaagctgcaggaaaatggacagtgaggttcagagagatggaaggatcttggatttgattgatgatgcttggcgagaagacaagctgccttatgaggatgtcgcaataccactgaatgagcttcctgaacctgaacaagacaatggtggcaccacagaatctgtcaaagaacaagaaatgaagtggacagacttagccttacagtacctccatgagaatgttccccccattggaaactgacgcttggctcctttcttgtggatggattttctcaaagtacacagataaagcatggtttgtttcagtctccaaattcaaacctttgagtaataaatcagcactcaaaaatgtacacccatttagtttgtggtagcaaagtgcaatgcgaaattgaatgagaaactgagatttctcagtaatggtgaatatttcgctctttaaacctaaaactcttcattgagtagcttatatttgaacatgattggttaaacatttgcctctacctctgattttgctttgctgtcaaagtttaacaccttccaactacttatgtgtgtcctgtaacacaggtgattgaacgtatgagagggaaaggcaaagaaaaaggaagccagacactaggagaattattaacttctcatacttccccacattgagaagcattcggagtgtatttagcctgtagatgttgtgatatgcaaatatcccattccctggttactggcattcctaagattcttcatggtattttcaaactttggataaatttacagattagaaagatatctgacagttaatctctgttctccttacaaattccttttgtgctgctggaaaggatctttggctaggtggatgactagttttattcaaagccttttctcaaagccctttcagttacaaccaccccactatggaatcagtatttagttatacatttgtataagaacctgtattttgaaaaacacattcatgtatatttattcctggaattatttgcctgttaaacagtgtctttcatgttctctccccagattgtaaactctgtaagaagctgcttgtatctgtatcccttgttgaaactctgaaaacactgaataactaaaatctcttctcatccttttt

SEQ ID NO: 3410 - protein, 74 aa, Homo sapiens; identical to SEQ ID NO: 378

SEQ ID NO: 3411 - DNA, 685 bp, Homo sapiens
gaatgttcaagttagaagagaagagctacattgagatgcaacatattaatatttgagggcctcgtttaacgtgttgctctcctgtcacactctatgacactggtctgtcagctgggctatgcctgtccagtatacactataaaatatgtatcagttggggttggagagaggaactgtgatcaaagtagtcacccggcccatatgagaaaatgaaccttttcccaaaaggtggccccagactaaaaagcctggagaatcctaatagtggattataccatctcttcagtcttcgtgtttaagaaataacctctttggcttacagatttgacaagatcaaagctgcaggaaaatggacagtgaggttcagagagatggaaggatcttggatttgattgatgatgcttggcgagaagacaagctgccttatgaggatgtcgcaataccactgaatgagcttcctgaacctgaacaagacaatggtggcaccacagaatctgtcaaagaacaagaaatgaagtggacagacttagccttacagtacctccatgagaatgttccccccattggaaactgacgcttggctcctttcttgtggatggattttctcaaagtacacagataaagcatggtttgtttcagtctccaaattcaaacctttgagtaataaatcagcactcaaaaatgt

SEQ ID NO: 3412 - protein, 74 aa, Homo sapiens; identical to SEQ ID NO: 378

SEQ ID NO: 3413 - DNA, 410 bp, Homo sapiens
gggggggcgtggcaggagcaagcgtctgccgcggtggccgggtgccgatttgacaagatcaaagctgcaggaaaatggacagtgaggttcagagagatggaaggatcttggatttgattgatgatgcttggcgagaagacaagctgccttatgaggatgtcgcaataccactgaatgagcttcctgaacctgaacaagacaatggtggcaccacagaatctgtcaaagaacaagaaatgaagtggacagacttagccttacagtacctccatgagaatgttccccccattggaaactgacgcttggctcctttcttgtggatggattttctcaaagtacacagataaagcatggtttgtttcagtctccaaattcaaacctttgagtaataaatcagcactcaaaaatgt

SEQ ID NO: 3414 - protein, 74 aa, Homo sapiens; identical to SEQ ID NO: 378

SEQ ID NO: 3415 - DNA, 678 bp, Homo sapiens
gtgatgcgggggagggggggggggcgtggcaggagcaagcgtctgccgcggtggccgggtgccggtaagggtttccagcgcccccggcctaggttttggaggcgcgggaatgcgttcgttgctcagtgtcggacttccccctattcccatcggccgaggctgtcactttacgctcataaccgtttttctttactgcactcgtgtcgggaggaaagggacttgcgtggcacccccagacctccccgtctccgcttccacgtttggtacatcctgcctgaggcaggaagccgcagctgagggacggcctgtcgtacgatttgacaagatcaaagctgcaggaaaatggacagtgaggttcagagagatggaaggatcttggatttgattgatgatgcttggcgagaagacaagctgccttatgaggatgtcgcaataccactgaatgagcttcctgaacctgaacaagacaatggtggcaccacagaatctgtcaaagaacaagaaatgaagtggacagacttagccttacagtacctccatgagaatgttccccccattggaaactgacgcttggctcctttcttgtggatggattttctcaaagtacacagataaagcatggtttgtttcagtctccaaattcaaacctttgagtaataaatcagcactcaaaaatgt

SEQ ID NO: 3416 - protein, 91 aa, Homo sapiens; identical to SEQ ID NO: 3386

SEQ ID NO: 3417 - DNA, 1156 bp, Homo sapiens
tttaataattgaaacaatgccttctccagacttcccctgcacgcgagcaaatgaactcacccacatccgggaatccgaggaaagcgagtgcagacacgtgatgcgggggagggggggggggcgtggcaggagcaagcgtctgccgcggtggccgggtgccggtaagggtttccagcgcccccggcctaggttttggaggcgcgggaatgcgttcgttgctcagtgtcggacttccccctattcccatcggccgaggctgtcactttacgctcataaccgtttttctttactgcactcgtgtcgggaggaaagggacttgcgtggcacccccagacctccccgtctccgcttccacgtttggtacatcctgcctgaggcaggaagccgcagctgagggacggcctgtcgtacggtgcggatggtggtggcctgcgaggctcatttctagcaaggaacaaggctttcccgctttgattttataaatattatgtttacaaagctgtaatatatagaaattgataagacgtgtccctgtccctggaaacgcaggcaccgcgtgtttggaaagacattcatctgggctgtttgacagactccccagttggtgccatgctctgtgcttagggaactgtgagacccctggaggggtgggtaccgggaccgcactcagcctggggtttggaggcggcctcctataggaagcgacctgggacctaagatttttagactgactgtgggttcactggaataaaaaggaagaaacaaagagcattgcaggcatcgggactgtcacatttgacaagatcaaagctgcaggaaaatggacagtgaggttcagagagatggaaggatcttggatttgattgatgatgcttggcgagaagacaagctgccttatgaggatgtcgcaataccactgaatgagcttcctgaacctgaacaagacaatggtggcaccacagaatctgtcaaagaacaagaaatgaagtggacagacttagccttacagtacctccatgagaatgttccccccattggaaactgacgcttggctcctttcttgtggatggattttctcaaagtacacagataaagcatggtttgtttcagtctccaaattcaaacctttgagtaataaatcagcactcaaaaatgt

SEQ ID NO: 3418 - protein, 74 aa, Homo sapiens; identical to SEQ ID NO: 378

SEQ ID NO: 3419 - DNA, 983 bp, Homo sapiens
tttaataattgaaacaatgccttctccagacttcccctgcacgcgagcaaatgaactcacccacatccgggaatccgaggaaagcgagtgcagacacgtgatgcgggggagggggggggggcgtggcaggagcaagcgtctgccgcggtggccgggtgccggtaagggtttccagcgcccccggcctaggttttggaggcgcgggaatgcgttcgttgctcagtgtcggacttccccctattcccatcggccgaggctgtcactttacgctcataaccgtttttctttactgcactcgtgtcgggaggaaagggacttgcgtggcacccccagacctccccgtctccgcttccacgtttggtacatcctgcctgaggcaggaagccgcagctgagggacggcctgtcgtacggtgcggatggtggtggcctgcgaggctcatttctagcaaggaacaaggctttcccgctttgattttataaatattatgtttacaaagctgtaatatatagaaattgataagacgtgtccctgtccctggaaacgcaggcaccgcgtgtttggaaagacattcatctgggctgtttgacagactccccagttggtgccatgctctgtgcttagggaactgtgagacccctggaggggtgggtaccgggaccgcactcagcctggggtttggaggcggcctcctataggaagcgacctgggacctaagatttttagactgactgtgggttcactggaataaaaaggaagaaacaaagagcattgcaggcatcgggactgtcacatttgacaagatcaaagctgcaggaaaatggacagtgaggttcagagagatggaaggatcttggatttgattgatgatgcttggcgagaagacaagctgccttatgaggatgtcgcaataccactggtaggttatgatttgagctgaggatgggttaaaggtattgatctggcagtaactagtggaggag

SEQ ID NO: 3420 - protein, 125 aa, Homo sapiens
MPSPDFPCTRANELTHIRESEESECRHVMRGRGGGRGRSKRLPRWPGAGKGFQRPRPRFWRRGNAFVAQCRTSPYSHRPRLSLYAHNRFSLLHSCREERDLRGTPRPPRLRFHVWYILPEAGSRS

SEQ ID NO: 3421 - DNA, 2324 bp, Homo sapiens
ctcacagttccctaagcacagagcatggcaccaactggggagtctgtcaaacagcccagatgaatgtctttccaaacacgcggtgcctgcgtttccagggacagggacacgtcttatcaatttctatatattacagctttgtaaacataatatttataaaatcaaagcgggaaagccttgttccttgctagaaatgagcctcgcaggccaccaccatccgcaccgtacgacaggccgtccctcagctgcggcttcctgcctcaggcaggatgtaccaaacgtggaagcggagacggggaggtctgggggtgccacgcaagtccctttcctcccgacacgagtgcagtaaagaaaaacggttatgagcgtaaagtgacagcctcggccgatgggaatagggggaagtccgacactgagcaacgaacgcattcccgcgcctccaaaacctaggccgggggcgctggaaacccttaccggcacccggccaccgcggcagacgcttgctcctgccacgccccccccccctcccccgcatcacgtgtctgcactcgctttcctcggattcccggatgtggttgccaaaacaaaggggatttggtgatggaggctttgttagaaggaatacaaaatcgagggcatggtgggggatttttgacatcttgtgaagcagaactacaggagctcatgaaacagattgacataatggtggctcataaaaaatctgaatgggaaggacgtacacatgctctagaaacttgcttgaaaatccgtgaacaggaacttaagagtcttaggagtcagttggatgtgacacataaggaggttggaatgttgcatcagcaggtagaagaacatgaaaaaatcaagcaagagatgaccatggaatataagcaggagttgaagaaactacatgaagaattatgcatactgaagagaagctatgaaaagcttcagaaaaagcaaatgagggaattcagaggaaataccaaaaatcacagggaagatcggtctgaaattgagaggttaactgcaaaaatagaggaattccgtcagaaatcgctggactgggagaagcaacgcttgatttatcagcaacaggtatcttcactggaggcacaaaggaaggctctggctgaacaatcagagataattcaggctcagcttgtcaatcggaaacagaaattagagtctgtggaactttctagccaatcagaaattcaacacttaagcagtaaactggagcgggctaatgacactatctgtgccaatgagttggaaatagagcgcctcaccatgagggtcaatgacttggttggaaccagtatgactgtcctacaggagcagcagcaaaaagaagaaaaattgagggaatctgaaaaactattagaggctctgcaggaagaaaagagagaattgaaggcagctcttcagtctcaagaaaatctcatacatgaggccagaatacaaaaggagaagttacaagaaaaagtaaaggcaactaacactcaacatgctgtagaagctataagtttggaatctgtgagtgcaacgtgtaaacagctgagccaagaactaatggaaaaatatgaagaactgaagaggatggaagcacataacaatgaatacaaagcagagattaagaagttgaaagaacagattttacagggtgaacaaagttacagttctgcactagaaggaatgaagatggaaatctcccatctaactcaggagttacatcagcgagatatcactattgcttccaccaaaggttcttcctcagacatggaaaagcgactcagagcagagatgcaaaaggcagaagacaaagcagtagagcataaggagattttggatcagctggagtcactcaaattagaaaatcgtcatctttctgaaatggtgatgaaattggaattgggtttacatgagtgttccttgcctgtatctccccttggttcaatagctaccagatttttggaagaggaggaactgaggtctcatcacattctagagcgcttggatgcccatattgaagaactaaaaagagagagtgaaaagacagtgagacaattcacagccttaaagtagcctcttaaaaaaatcactatcttggaaataaaaataaacaccaaagagttactgtcatctgaagtagcagctctttaaaaacatgaagagataaaattataaaaatgatacatctaaagcagtggtgaagaaagctgaaaaactgatacttttgataggcattttctctgcactggtttgtttaaaggacttcttccagcaataagttgaaagaataaaccactttgctagacttt

SEQ ID NO: 3422 - protein, 495 aa, Homo sapiens
MEALLEGIQNRGHGGGFLTSCEAELQELMKQIDIMVAHKKSEWEGRTHALETCLKIREQELKSLRSQLDVTHKEVGMLHQQVEEHEKIKQEMTMEYKQELKKLHEELCILKRSYEKLQKKQMREFRGNTKNHREDRSEIERLTAKIEEFRQKSLDWEKQRLIYQQQVSSLEAQRKALAEQSEIIQAQLVNRKQKLESVELSSQSEIQHLSSKLERANDTICANELEIERLTMRVNDLVGTSMTVLQEQQQKEEKLRESEKLLEALQEEKRELKAALQSQENLIHEARIQKEKLQEKVKATNTQHAVEAISLESVSATCKQLSQELMEKYEELKRMEAHNNEYKAEIKKLKEQILQGEQSYSSALEGMKMEISHLTQELHQRDITIASTKGSSSDMEKRLRAEMQKAEDKAVEHKEILDQLESLKLENRHLSEMVMKLELGLHECSLPVSPLGSIATRFLEEEELRSHHILERLDAHIEELKRESEKTVRQFTALK

SEQ ID NO: 3423 - DNA, 2148 bp, Homo sapiens
ctcacagttccctaagcacagagcatggcaccaactggggagtctgtcaaacagcccagatgaatgtctttccaaacacgcggtgcctgcgtttccagggacagggacacgtcttatcaatttctatatattacagctttgtaaacataatatttataaaatcaaagcgggaaagccttgttccttgctagaaatgagcctcgcaggccaccaccatccgcaccgtacgacaggccgtccctcagctgcggcttcctgcctcaggcaggatgtaccaaacgtggaagcggagacggggaggtctgggggtgccacgcaagtccctttcctcccgacacgagtgcagtaaagaaaaacggttatgagcgtaaagtgacagcctcggccgatgggaatagggggaagtccgacactgagcaacgaacgcattcccgcgcctccaaaacctaggccgggggcgctggaaacccttaccggcacccggccaccgcggcagacgcttgctcctgccacgccccccccccctcccccgcatcacgtgtctgcactcgctttcctcggattcccggatgtggttgccaaaacaaaggggatttggtgatggaggctttgttagaaggaatacaaaatcgagggcatggtgggggatttttgacatcttgtgaagcagaactacaggagctcatgaaacagattgacataatggtggctcataaaaaatctgaatgggaaggacgtacacatgctctagaaacttgcttgaaaatccgtgaacaggaacttaagagtcttaggagtcagttggatgtgacacataaggaggttggaatgttgcatcagcaggtagaagaacatgaaaaaatcaagcaagagatgaccatggaatataagcaggagttgaagaaactacatgaagaattatgcatactgaagagaagctatgaaaagcttcagaaaaagcaaatgagggaattcagaggaaataccaaaaatcacagggaagatcggtctgaaattgagaggttaactgcaaaaatagaggaattccgtcagaaatcgctggactgggagaagcaacgcttgatttatcagcaacaggtatcttcactggaggcacaaaggaaggctctggctgaacaatcagagataattcaggctcagcttgtcaatcggaaacagaaattagagtctgtggaactttctagccaatcagaaattcaacacttaagcagtaaactggagcgggctaatgacactatctgtgccaatgagttggaaatagagcgcctcaccatgagggtcaatgacttggttggaaccagtatgactgtcctacaggagcagcagcaaaaagaagaaaaattgagggaatctgaaaaactattagaggctctgcaggaagaaaagagagaattgaaggcagctcttcagtctcaagaaaatctcatacatgaggccagaatacaaaaggagaagttacaagaaaaagtaaaggcaactaacactcaacatgctgtagaagctataagtttggaatctgtgagtgcaacgtgtaaacagctgagccaagaactaatggaaaaatatgaagaactgaagaggatggaagcacataacaatgaatacaaagcagagattaagaagttgaaagaacagattttacagggtgaacaaagttacagttctgcactagaaggaatgaagatggaaatctcccatctaactcaggagttacatcagcgagatatcactattgcttccaccaaaggttcttcctcagacatggaaaagcgactcagagcagagatgcaaaaggcagaagacaaagcagtagagcataaggagattttggatcagctggagtcactcaaattagaaaatcgtcatctttctgaaatggtgatgaaattggaattgggtttacatgagagatggggttttaccatgttgtccagtctggttttgaacttcgggattcaagcaatccgccagcctcagcgtcccaaagtgctggaattacaagtgtgagctaccaccactggcagttaagaattttaacaatttgtcaatgaaacaagaatctcaattagagtctttatatacaatctgtactgttggaattttcaaataaatattgtaaagaaaatt

SEQ ID NO: 3424 - protein, 475 aa, Homo sapiens
MEALLEGIQNRGHGGGFLTSCEAELQELMKQIDIMVAHKKSEWEGRTHALETCLKIREQELKSLRSQLDVTHKEVGMLHQQVEEHEKIKQEMTMEYKQELKKLHEELCILKRSYEKLQKKQMREFRGNTKNHREDRSEIERLTAKIEEFRQKSLDWEKQRLIYQQQVSSLEAQRKALAEQSEIIQAQLVNRKQKLESVELSSQSEIQHLSSKLERANDTICANELEIERLTMRVNDLVGTSMTVLQEQQQKEEKLRESEKLLEALQEEKRELKAALQSQENLIHEARIQKEKLQEKVKATNTQHAVEAISLESVSATCKQLSQELMEKYEELKRMEAHNNEYKAEIKKLKEQILQGEQSYSSALEGMKMEISHLTQELHQRDITIASTKGSSSDMEKRLRAEMQKAEDKAVEHKEILDQLESLKLENRHLSEMVMKLELGLHERWGFTMLSSLVLNFGIQAIRQPQRPKVLELQV

SEQ ID NO: 3425 - DNA, 2035 bp, Homo sapiens
gagttcatttgctcgcgtgcaggggaagtctggagaaggcattgtttcaattattaaaagtgtgggggcagtgggcggaacaaacgcgccgactacagaggctggacgtaagcttagcggtggcgcgcgtgcgcagcgccggcccgagttgccaaaacaaaggggatttggtgatggaggctttgttagaaggaatacaaaatcgagggcatggtgggggatttttgacatcttgtgaagcagaactacaggagctcatgaaacagattgacataatggtggctcataaaaaatctgaatgggaaggacgtacacatgctctagaaacttgcttgaaaatccgtgaacaggaacttaagagtcttaggagtcagttggatgtgacacataaggaggttggaatgttgcatcagcaggtagaagaacatgaaaaaatcaagcaagagatgaccatggaatataagcaggagttgaagaaactacatgaagaattatgcatactgaagagaagctatgaaaagcttcagaaaaagcaaatgagggaattcagaggaaataccaaaaatcacagggaagatcggtctgaaattgagaggttaactgcaaaaatagaggaattccgtcagaaatcgctggactgggagaagcaacgcttgatttatcagcaacaggtatcttcactggaggcacaaaggaaggctctggctgaacaatcagagataattcaggctcagcttgtcaatcggaaacagaaattagagtctgtggaactttctagccaatcagaaattcaacacttaagcagtaaactggagcgggctaatgacactatctgtgccaatgagttggaaatagagcgcctcaccatgagggtcaatgacttggttggaaccagtatgactgtcctacaggagcagcagcaaaaagaagaaaaattgagggaatctgaaaaactattagaggctctgcaggaagaaaagagagaattgaaggcagctcttcagtctcaagaaaatctcatacatgaggccagaatacaaaaggagaagttacaagaaaaagtaaaggcaactaacactcaacatgctgtagaagctataaggccacgggaagaatctctggcagaaaagaagtacacctctcaagggcagggggacttagacagtgtgctctcccagttgaattttacccatactagtgaggaccttctgcaggcagaggtgacttgtcttgaaggcagtttggaatctgtgagtgcaacgtgtaaacagctgagccaagaactaatggaaaaatatgaagaactgaagaggatggaagcacataacaatgaatacaaagcagagattaagaagttgaaagaacagattttacagggtgaacaaagttacagttctgcactagaaggaatgaagatggaaatctcccatctaactcaggagttacatcagcgagatatcactattgcttccaccaaaggttcttcctcagacatggaaaagcgactcagagcagagatgcaaaaggcagaagacaaagcagtagagcataaggagattttggatcagctggagtcactcaaattagaaaatcgtcatctttctgaaatggtgatgaaattggaattgggtttacatgagtgttccttgcctgtatctccccttggttcaatagctaccagatttttggaagaggaggaactgaggtctcatcacattctagagcgcttggatgcccatattgaagaactaaaaagagagagtgaaaagacagtgagacaattcacagccttaaagtagcctcttaaaaaaatcactatcttggaaataaaaataaacaccaaagagttactgtcatctgaagtagcagctctttaaaaacatgaagagataaaattataaaaatgatacatctaaagcagtggtgaagaaagctgaaaaactgatacttttgataggcattttctctgcactggtttgtttaaaggacttcttccagcaataagttgaaagaataaaccactttgctagacttt

SEQ ID NO: 3426 - protein, 541 aa, Homo sapiens
MEALLEGIQNRGHGGGFLTSCEAELQELMKQIDIMVAHKKSEWEGRTHALETCLKIREQELKSLRSQLDVTHKEVGMLHQQVEEHEKIKQEMTMEYKQELKKLHEELCILKRSYEKLQKKQMREFRGNTKNHREDRSEIERLTAKIEEFRQKSLDWEKQRLIYQQQVSSLEAQRKALAEQSEIIQAQLVNRKQKLESVELSSQSEIQHLSSKLERANDTICANELEIERLTMRVNDLVGTSMTVLQEQQQKEEKLRESEKLLEALQEEKRELKAALQSQENLIHEARIQKEKLQEKVKATNTQHAVEAIRPREESLAEKKYTSQGQGDLDSVLSQLNFTHTSEDLLQAEVTCLEGSLESVSATCKQLSQELMEKYEELKRMEAHNNEYKAEIKKLKEQILQGEQSYSSALEGMKMEISHLTQELHQRDITIASTKGSSSDMEKRLRAEMQKAEDKAVEHKEILDQLESLKLENRHLSEMVMKLELGLHECSLPVSPLGSIATRFLEEEELRSHHILERLDAHIEELKRESEKTVRQFTALK

SEQ ID NO: 3427 - DNA, 2661 bp, Homo sapiens
gagttcatttgctcgcgtgcaggggaagtctggagaaggcattgtttcaattattaaaagtgtgggggcagtgggcggaacaaacgcgccgactacagaggctggacgtaagcttagcggtggcgcgcgtgcgcagcgccggcccgagttgccaaaacaaaggggatttggtgatggaggctttgttagaaggaatacaaaatcgagggcatggtgggggatttttgacatcttgtgaagcagaactacaggagctcatgaaacagattgacataatggtggctcataaaaaatctgaatgggaaggacgtacacatgctctagaaacttgcttgaaaatccgtgaacaggaacttaagagtcttaggagtcagttggatgtgacacataaggaggttggaatgttgcatcagcaggtagaagaacatgaaaaaatcaagcaagagatgaccatggaatataagcaggagttgaagaaactacatgaagaattatgcatactgaagagaagctatgaaaagcttcagaaaaagcaaatgagggaattcagaggaaataccaaaaatcacagggaagatcggtctgaaattgagaggttaactgcaaaaatagaggaattccgtcagaaatcgctggactgggagaagcaacgcttgatttatcagcaacaggtatcttcactggaggcacaaaggaaggctctggctgaacaatcagagataattcaggctcagcttgtcaatcggaaacagaaattagagtctgtggaactttctagccaatcagaaattcaacacttaagcagtaaactggagcgggctaatgacactatctgtgccaatgagttggaaatagagcgcctcaccatgagggtcaatgacttggttggaaccagtatgactgtcctacaggagcagcagcaaaaagaagaaaaattgagggaatctgaaaaactattagaggctctgcaggaagaaaagagagaattgaaggcagctcttcagtctcaagaaaatctcatacatgaggccagaatacaaaaggagaagttacaagaaaaagtaaaggcaactaacactcaacatgctgtagaagctataaggccacgggaagaatctctggcagaaaagaagtacacctctcaagggcagggggacttagacagtgtgctctcccagttgaattttacccatactagtgaggaccttctgcaggcagaggtgacttgtcttgaaggcagtttggaatctgtgagtgcaacgtgtaaacagctgagccaagaactaatggaaaaatatgaagaactgaagaggatggaagcacataacaatgaatacaaagcagagattaagaagttgaaagaacagattttacagggtgaacaaagttacagttctgcactagaaggaatgaagatggaaatctcccatctaactcaggagttacatcagcgagatatcactattgcttccaccaaaggttcttcctcagacatggaaaagcgactcagagcagagatgcaaaaggcagaagacaaagcagtagagcataaggagattttggatcagctggagtcactcaaattagaaaatcgtcatctttctgaaatggtgatgaaattggaattgggtttacatgagtgttccttgcctgtatctccccttggttcaatagctaccagatttttggaagaggaggaactgaggtctcatcacattctagagcgcttggatgcccatattgaagaactaaaaagagagagtgaaaagacagtgagacaattcacagccttaaagtagcctcttaaaaaaatcactatcttggaaataaaaataaacaccaaagagttactgtcatctgaagtagcagctctttaaaaacatgaagagataaaattataaaaatgatacatctaaagcagtggtgaagaaagctgaaaaactgatacttttgataggcattttctctgcactggtttgtttaaaggacttcttccagcaataagttgaaagaataaaccactttgctagacttttttctcatacgaatatttattatcataaagtgatacttaccttgctgacttaaatgtgaatagctatgtactaattgaaataaggattttatgatacatgttgaaaataaagtaactgcaggaactttctttaggggaaatgtgtagaagcatggatttaggggtcaaacatacctggatcgatagactggttttgccacttaccagccaacggggcttgttatttactgggctggtagcccctcctagccaaggggctggtagtgtgtaaagtcaggctggtagtgaataaggggggggtgtgctaaagaaccttatcaagcagtcctctcttgctcaacactcatgcagaggagagaggcagggagggcaagggactggctgtcatgcacggtgcccatggaatatccattggaaataaatgttcatcgtctgcactgctgaggacaagtttagatgggagacaaagatctggatgttgatgtgccgcaggcatttgaaacgatgggagttgataagatccaccagggaggctgtggagagagagaggagcaggaggctgggtttggggccctgaaagatgccagcatctgaggatcacaggaaatagatctagcaaaggaact

SEQ ID NO: 3428 - protein, 541 aa, Homo sapiens; identical to SEQ ID NO: 3426

SEQ ID NO: 3429 - DNA, 2941 bp, Homo sapiens
ttcatttgctcgcgtgcaggggaagtctggagaaggcattgtttcaattattaaaagtgtgggggcagtgggcggaacaaacgcgccgactacagaggctggacgtaagcttagcggtggcgcgcgtgcgcagcgccggcccgaggtaacggcgggaaggctcaggggcgtgcttgcggcaaccctgtaaccgccggtgcgcaagttggaggggcaaggggctgccgtgtcctggtctggaggcggcccaggctgccttggtgattctggcttcgcggcctcatggcttgcggccggtttgcgcaacggcctgcgaaccaccaggcgcgtccccgccggcttgggtccgccccgaagcccagtccctcggcctggcccgctatgccctgcacactggcggagtctggcgtggcgcagcccggcgtggggttcggccccgccaggtggtcagcccttcctcggagtccaggtggctgggggcgcttcggagagtggccaggggcccccaaacccggggccgcagagcagtaccagtccgtggcctgttaggaaccaggctacagagcaggagttgccaaaacaaaggggatttggtgatggaggctttgttagaaggaatacaaaatcgagggcatggtgggggatttttgacatcttgtgaagcagaactacaggagctcatgaaacagattgacataatggtggctcataaaaaatctgaatgggaaggacgtacacatgctctagaaacttgcttgaaaatccgtgaacaggaacttaagagtcttaggagtcagttggatgtgacacataaggaggttggaatgttgcatcagcaggtagaagaacatgaaaaaatcaagcaagagatgaccatggaatataagcaggagttgaagaaactacatgaagaattatgcatactgaagagaagctatgaaaagcttcagaaaaagcaaatgagggaattcagaggaaataccaaaaatcacagggaagatcggtctgaaattgagaggttaactgcaaaaatagaggaattccgtcagaaatcgctggactgggagaagcaacgcttgatttatcagcaacaggtatcttcactggaggcacaaaggaaggctctggctgaacaatcagagataattcaggctcagcttgtcaatcggaaacagaaattagagtctgtggaactttctagccaatcagaaattcaacacttaagcagtaaactggagcgggctaatgacactatctgtgccaatgagttggaaatagagcgcctcaccatgagggtcaatgacttggttggaaccagtatgactgtcctacaggagcagcagcaaaaagaagaaaaattgagggaatctgaaaaactattagaggctctgcaggaagaaaagagagaattgaaggcagctcttcagtctcaagaaaatctcatacatgaggccagaatacaaaaggagaagttacaagaaaaagtaaaggcaactaacactcaacatgctgtagaagctataaggccacgggaagaatctctggcagaaaagaagtacacctctcaagggcagggggacttagacagtgtgctctcccagttgaattttacccatactagtgaggaccttctgcaggcagaggtgacttgtcttgaaggcagtttggaatctgtgagtgcaacgtgtaaacagctgagccaagaactaatggaaaaatatgaagaactgaagaggatggaagcacataacaatgaatacaaagcagagattaagaagttgaaagaacagattttacagggtgaacaaagttacagttctgcactagaaggaatgaagatggaaatctcccatctaactcaggagttacatcagcgagatatcactattgcttccaccaaaggttcttcctcagacatggaaaagcgactcagagcagagatgcaaaaggcagaagacaaagcagtagagcataaggagattttggatcagctggagtcactcaaattagaaaatcgtcatctttctgaaatggtgatgaaattggaattgggtttacatgaggcaaaagagatttcactagcagacctccaggagaattatattgaggcattaaataaattagtgtctgaaaatcaacaactacagaaagatttgatgaataccaaatctcagctggagatttctactcagatgtgcaaaaaacaaaatgacaggatctttaaaccaacacacagcagaacaactgagttcaagaatacagagttcaagccaacccatggccagcacagacatgatggaataaagactgagcactacaaaacagatcttcattctccaagaggacaagcgtcggatagtataaaccccatgtctagggtgctaagccccctgagtcctcaaatcagcccttgcagctccaccaggtctttgacttcctactctctatgtaaaactcattctttgccttcagcgctagatacaaatgaagccaatttttctgacactatgtctgagagtatgaatgaccaagaagagtttatatcttcgtgttccttgcctgtatctccccttggttcaatagctaccagatttttggaagaggaggaactgaggtctcatcacattctagagcgcttggatgcccatattgaagaactaaaaagagagagtgaaaagacagtgagacaattcacagccttaaagtagcctcttaaaaaaatcactatcttggaaataaaaataaacaccaaagagttactgtcatctgaagtagcagctctttaaaaacatgaagagataaaattataaaaatgatacatctaaagcagtggtgaagaaagctgaaaaactgatacttttgataggcattttctctgcactggtttgtttaaaggacttcttccagcaataagttgaaagaataaaccactttgctagac

SEQ ID NO: 3430 - protein, 703 aa, Homo sapiens; identical to SEQ ID NO: 380

SEQ ID NO: 3431 - DNA, 3570 bp, Homo sapiens
ttcatttgctcgcgtgcaggggaagtctggagaaggcattgtttcaattattaaaagtgtgggggcagtgggcggaacaaacgcgccgactacagaggctggacgtaagcttagcggtggcgcgcgtgcgcagcgccggcccgaggtaacggcgggaaggctcaggggcgtgcttgcggcaaccctgtaaccgccggtgcgcaagttggaggggcaaggggctgccgtgtcctggtctggaggcggcccaggctgccttggtgattctggcttcgcggcctcatggcttgcggccggtttgcgcaacggcctgcgaaccaccaggcgcgtccccgccggcttgggtccgccccgaagcccagtccctcggcctggcccgctatgccctgcacactggcggagtctggcgtggcgcagcccggcgtggggttcggccccgccaggtggtcagcccttcctcggagtccaggtggctgggggcgcttcggagagtggccaggggcccccaaacccggggccgcagagcagtaccagtccgtggcctgttaggaaccaggctacagagcaggagttgccaaaacaaaggggatttggtgatggaggctttgttagaaggaatacaaaatcgagggcatggtgggggatttttgacatcttgtgaagcagaactacaggagctcatgaaacagattgacataatggtggctcataaaaaatctgaatgggaaggacgtacacatgctctagaaacttgcttgaaaatccgtgaacaggaacttaagagtcttaggagtcagttggatgtgacacataaggaggttggaatgttgcatcagcaggtagaagaacatgaaaaaatcaagcaagagatgaccatggaatataagcaggagttgaagaaactacatgaagaattatgcatactgaagagaagctatgaaaagcttcagaaaaagcaaatgagggaattcagaggaaataccaaaaatcacagggaagatcggtctgaaattgagaggttaactgcaaaaatagaggaattccgtcagaaatcgctggactgggagaagcaacgcttgatttatcagcaacaggtatcttcactggaggcacaaaggaaggctctggctgaacaatcagagataattcaggctcagcttgtcaatcggaaacagaaattagagtctgtggaactttctagccaatcagaaattcaacacttaagcagtaaactggagcgggctaatgacactatctgtgccaatgagttggaaatagagcgcctcaccatgagggtcaatgacttggttggaaccagtatgactgtcctacaggagcagcagcaaaaagaagaaaaattgagggaatctgaaaaactattagaggctctgcaggaagaaaagagagaattgaaggcagctcttcagtctcaagaaaatctcatacatgaggccagaatacaaaaggagaagttacaagaaaaagtaaaggcaactaacactcaacatgctgtagaagctataaggccacgggaagaatctctggcagaaaagaagtacacctctcaagggcagggggacttagacagtgtgctctcccagttgaattttacccatactagtgaggaccttctgcaggcagaggtgacttgtcttgaaggcagtttggaatctgtgagtgcaacgtgtaaacagctgagccaagaactaatggaaaaatatgaagaactgaagaggatggaagcacataacaatgaatacaaagcagagattaagaagttgaaagaacagattttacagggtgaacaaagttacagttctgcactagaaggaatgaagatggaaatctcccatctaactcaggagttacatcagcgagatatcactattgcttccaccaaaggttcttcctcagacatggaaaagcgactcagagcagagatgcaaaaggcagaagacaaagcagtagagcataaggagattttggatcagctggagtcactcaaattagaaaatcgtcatctttctgaaatggtgatgaaattggaattgggtttacatgaggcaaaagagatttcactagcagacctccaggagaattatattgaggcattaaataaattagtgtctgaaaatcaacaactacagaaagatttgatgaataccaaatctcagctggagatttctactcagatgtgcaaaaaacaaaatgacaggatctttaaaccaacacacagcagaacaactgagttcaagaatacagagttcaagccaacccatggccagcacagacatgatggaataaagactgagcactacaaaacagatcttcattctccaagaggacaagcgtcggatagtataaaccccatgtctagggtgctaagccccctgagtcctcaaatcagcccttgcagctccaccaggtctttgacttcctactctctatgtaaaactcattctttgccttcagcgctagatacaaatgaagccaatttttctgacactatgtctgagagtatgaatgaccaagaagagtttatatcttcgtgttccttgcctgtatctccccttggttcaatagctaccagatttttggaagaggaggaactgaggtctcatcacattctagagcgcttggatgcccatattgaagaactaaaaagagagagtgaaaagacagtgagacaattcacagccttaaagtagcctcttaaaaaaatcactatcttggaaataaaaataaacaccaaagagttactgtcatctgaagtagcagctctttaaaaacatgaagagataaaattataaaaatgatacatctaaagcagtggtgaagaaagctgaaaaactgatacttttgataggcattttctctgcactggtttgtttaaaggacttcttccagcaataagttgaaagaataaaccactttgctagacttttttctcatacgaatatttattatcataaagtgatacttaccttgctgacttaaatgtgaatagctatgtactaattgaaataaggattttatgatacatgttgaaaataaagtaactgcaggaactttctttaggggaaatgtgtagaagcatggatttaggggtcaaacatacctggatcgatagactggttttgccacttaccagccaacggggcttgttatttactgggctggtagcccctcctagccaaggggctggtagtgtgtaaagtcaggctggtagtgaataaggggggggtgtgctaaagaaccttatcaagcagtcctctcttgctcaacactcatgcagaggagagaggcagggagggcaagggactggctgtcatgcacggtgcccatggaatatccattggaaataaatgttcatcgtctgcactgctgaggacaagtttagatgggagacaaagatctggatgttgatgtgccgcaggcatttgaaacgatgggagttgataagatccaccagggaggctgtggagagagagaggagcaggaggctgggtttggggccctgaaagatgccagcatctgaggatcacaggaaatagatctagcaaaggaact

SEQ ID NO: 3432 - protein, 703 aa, Homo sapiens; identical to SEQ ID NO: 380

SEQ ID NO: 3433 - DNA, 2436 bp, Homo sapiens
ctctactggatattttttaccagcatccaaatttccctcctcttaaatatcctctcttgacccgtctcttcctcctctgccccattttatttcttccattttataactaaaaaattacttcagtcatctatacttgtctccagttcctcttgtctcattgttcttgtacccactcaataaggcttttgtcccctcacactgcagaagctgttcacatagaggtcaccagtgacttccacattcccaaagcctgtgggctggtccttatcttcctcatcctacctacagctttgtaggagagctggtctctcccaactccttaaccactttcttgacttggcttgagaaaaaccacatttctctcattttttccttgttcatcactcctcagtctccattattccttaaccacctagggtcatgtcattggacctttcctttcctttttttttttcctatctacgctcactcccctattgatcccattgaatttcatagctttaacactgtgtatatgctgacaattcctaaatttatatatctagccaagacctcgcctcttcatgacagaataactttcaactgcctgtttcctatctccactatgatgtctaaaatgtgtcaaacttaacatgtccaagctaaaggtcctgtctttctcttcctcatctccccaacactgattcatgttttagttgataacaactcaatttgctcaacctaaaacctcggagtcatcctagacttctcttttctcagcatgatagccagaatgattctgctgtaatgtaagtcaaattatatcacttcctatacaaaaaccttccagcagcttctcttaaaaatctgttatcctaatggcctacgtggtctcattcccagttatctctcttaccttgtcttctcctactttccctttcattcactttattccagccacaccaatttcctttctcacccttaaacacaccaggatgctcttatttcaaggctattctttccacccagaatattgtaacttcaccctcatctccctaggtgtttacttaaatgtttttcactcagtctggccatcccttttaaaaattacaaccccaactgtgaagacttcatgctctgttttctccaaaacgtgtattaccatctgctataccatacaagaaatgtgtcatctgttgcccccagttgagtaggactagggtttttgtttgttttgttaagtattgtatccctgactcctaaagcagtacctggcatatatagtagaatgattgaatgaatgaatgaatatcagaaatttggttaacaacacttatcttaaggagcctgagacttctggagttgagggtcctggaagacagtgatagaaagattgagtttcctttccctttgatttgccccattttcataaatattgaaatcactttcttgatcatgcaatttgatgttactattgatccatcattaattttgaactgtttggctttgggttacaaatatttgttaaaatttggtacagattttctttgttattcaaacttttgcagttcctctgttgagataatacaaatttggatatcaaaggatattgtgttatctgaatctacttggttccttagttttagatactgggaagtaagatttgggttaccaagggacttatctgaaaatttaatctgttcaattcctgggtctggatatcaagaatttggatagcgagggatatctgtaatcatactttaaaattttagttatcttagcatcagttttctgaaaattcactagaaaattataacaacccttaggtggcagcaaatcagtgaaaaacatctgaatccagtgcttaacatctgcgtgtcatactcctcaccatcagggtgttaaatttagaaagacagatatccagaggcacagtatgtgaggaagttagtattactctccagctctgttagctgagtgagtaatggggctcccgctgtggagaaaggtgcaagcgtacccagggacatggggagaaattaaagttaaagggagtctgggaagtagtgacagtgaggagaagcactcagaaattaagtactctaattgcctcctcaggaattccgtcagaaatcgctggactgggagaagcaacgcttgatttatcagcaacaggtatcttcactggaggcacaaaggaaggctctggctgaacaatcagagataattcagagatggggttttaccatgttgtccagtctggttttgaacttcgggattcaagcaatccgccagcctcagcgtcccaaagtgctggaattacaagtgtgagctaccaccactggcagttaagaattttaacaatttgtcaatgaaacaagaatctcaattagagtctttatatacaatctgtactgttggaattttcaaataaatattgtaaagaaaattaacact

SEQ ID NO: 3434 - protein, 111 aa, Homo sapiens
MAYVVSFPVISLTLSSPTFPFIHFIPATPISFLTLKHTRMLLFQGYSFHPEYCNFTLISLGVYLNVFHSVWPSLLKITTPTVKTSCSVFSKTCITICYTIQEMCHLLPPVE

SEQ ID NO: 3435 - DNA, 287 bp, Homo sapiens
atcaccttttaatattgctagttagaaaatgtcatgaacagtgtatcttagaaatataatattctacttatttacacatgtcaaaatttgtgtctcttccagtgttccttgcctgtatctccccttggttcaatagctaccagatttttggaagaggaggaactgaggtctcatcacattctagagcgcttggatgcccatattgaagaacttctctctcttacatacacataacacctggtaaactgtgggtgatgattttctgtttgcaaaacactcgagtccag

SEQ ID NO: 3436 - protein, 42 aa, Homo sapiens
MSKFVSLPVFLACISPWFNSYQIFGRGGTEVSSHSRALGCPY

SEQ ID NO: 3437 - DNA, 539 bp, Homo sapiens
cctcctcgaggccctaatacagcacacccttcctgctccccaggtgacagccaagagtggcctagacgaactggtgagtgacctgctccaggaggcccacactgacctggaaagggtccgcgccatctggatctggatctgccatcacatagagtatgacattgcagctgctcaggagaaggaccgccaagccttcaaacccactgacatcctgcggacccagaagaccaactgtgatggctatgctggcctcttcgagagaatgtgcaggctcgccggagtgcagtgtatgaccgtgcctggctactccaagggtttcggctaccagacagggcagagcttctcgggggagtttgaccatgcctggaatgctgtgtacctggagggaagatggcacctggtggacagcacctggggcagcggcctggtggacaccatcacctccaaattcaccttcctgtactggactcgagtgttttgcaaacagaaaatcatcacccacagtttaccaggtgttatgtgtatgtaagagagagaag

SEQ ID NO: 3438 - protein, 88 aa, Homo sapiens
MCRLAGVQCMTVPGYSKGFGYQTGQSFSGEFDHAWNAVYLEGRWHLVDSTWGSGLVDTITSKFTFLYWTRVFCKQKIITHSLPGVMCM

SEQ ID NO: 3439 - DNA, 587 bp, Homo sapiens
agcacttttccttgctgccgccatgagaagaagtatgtgttttcttccccttctgacatgattgttaagtttcctgaggcctccccagccatgctgaactgtattgcctccagcacactgtttacattcctactgtgtctcagcatctgttctcctgggaatagaactggtccacctgaacatatgatctgtgctgctgttggtgcaggaggacaggagggaaataagctggaagccatggatgtggagagtctggcttcaagatggagcttgtttacctgcaggttgtcccccaggatgccctcacagcttgtgcgtgacaaagatgtcctccgtgtacacataaggtagcgctgagaagccacgagaaagcacctagtgattttaacataaacatttccacagcattttcaagttctgcgaaaaagcccggtgatagatcagcctcgcggtgtgcagcgccggcagctccgcacttcggacacctgggggcgcccgtgccattccgccggcgactgggactcgtcgcccgggaaacaaagatggggatttaaagaaaagccttcaaaatgcaactccgaatgtct

SEQ ID NO: 3440 - protein, 97 aa, Homo sapiens; identical to SEQ ID NO: 382

SEQ ID NO: 3441 - DNA, 593 bp, Homo sapiens
atgattgttaagtttcctgaggcctccccagccatgctgaactgtattgcctccagcacactgtttacattcctactgtgtctcagcatctgttctcctgggaatagaactggtccacctgaacatatgatctgtgctgctgttggtgcaggaggacaggagggaaataagctggaagccatggatgtggagagtctggcttcaagatggagcttgtttacctgcaggtagggctccacctctgcaccccattgagtcccccgcctggctgtggtacgaagagccaccctgcataccctcacccagtagtgaagtaggccgaggcagccagtgtggggtccagcgagtgacatgcatcatcgaaggtgcttattattttgatgaaacacaatacatttctttcagcccgtaaaatcaaaggtgtgcaaaaaggctgttttcagggtgtaaaacacccctcgtttccctgtggtggtgcataactattatgcctctggggcctttgtgcatttttcgggcatgagtgacacgaggctgactgggtggccttggcaccttgtctctttagagaaaaaggagacagtgcttctttc

SEQ ID NO: 3442 - protein, 76 aa, Homo sapiens
MIVKFPEASPAMLNCIASSTLFTFLLCLSICSPGNRTGPPEHMICAAVGAGGQEGNKLEAMDVESLASRWSLFTCR

SEQ ID NO: 3443 - DNA, 581 bp, Homo sapiens
acattcctactgtgtctcagcatctgttctcctgggaatagaactggtccacctgaacatatgatctgtgctgctgttggtgcaggaggacaggagggaaataagctggaagccatggatgtggagagtctggcttcaagatggagcttgtttacctgcagggccccatgcagaacctcatgagacgtgacttcagaggcctcctctctgaaggtgagggaggcgtcagctgttcagagagagaggctgccttgcctggggacacacagctagccagtggccggagcagcagtggatgcagttgtcctgatgcatagttcaagaagctttttttttttttttttttttcacgtgtgaaaacatctattgggaaaatggaaaaatcatttgacctcatattcctcatagctgacatgtctccttgttcccaccccactgaccactgaattgctgcttgaattgccaggaacttcctggtgtggcagaaggaagactaagaaccaggaagtggctgacaagaaagggagctgcattctgcaactggagttagtatttgctctgacctaacactttgggtgatt

SEQ ID NO: 3444 - protein, 58 aa, Homo sapiens
MELVYLQGPMQNLMRRDFRGLLSEGEGGVSCSEREAALPGDTQLASGRSSSGCSCPDA

SEQ ID NO: 3445 - DNA, 569 bp, Homo sapiens
aacatatgatctgtgctgctgttggtgcaggaggacaggagggaaataagctggaagccatggatgtggagagtctggcttcaagatggagcttgtttacctgcagggccccatgcagaacctcatgagacgtgacttcagaggcctcctctctgaaggtgagggaggcgtcagctgttcagagagagaggctgccttgcctggggacacacagctagccagtggccggagcagcagtggatgcagttgtcctgatgcatagttcaagaagctttttttttttttttttttttcacgtgtgaaaacatctattgggaaaatggaaaaatcatttgacctcatattcctcatagctgacatgcctggctcctttctgtggagaagatcctgagaggaaccacaacttgacaaaaccaaaatgtggtggtgagccaacttcaattttgcagaaactgacttggaaagaactgattacctgaaggaccgtgaggatcaaagttgtcccactgaccaggctgtaaactttggaactgataagtgagagagataaggtaaacttctttaccttt

SEQ ID NO: 3446 - protein, 58 aa, Homo sapiens; identical to SEQ ID NO: 3444

SEQ ID NO: 3447 - DNA, 3338 bp, Homo sapiens
gggccgtaactggggggagctcctgactccaacaccccacccaactccctcctagggagagagagctgtcaacctccaaaaccaacccagggaaggagtgaggtcgaggccaaaacttggacaatctctgcacatcttgcaattcaatctggagcccctttgctgtctttccttttcctgaatctactctcaatgttgacagcactgtgcgatttctgtatttgccaggggcttctcgtgggaggtcggctccagccctctcgagaaccctccggagaccgtggggatgaggcagcgctcagccagagaagccctggagcccaggaccagcgcttcaagtgcaccgggcgggaggcaggggcgcagggagggaggctctggaccggccgcccctgctgactatggccccggtgcaggtcaaggcttgggcccggggatttcctttcaaaggtgacttagagccgcttcattagggtagcgccctcccaggcgggccctaatggcgtgtttggcagagtcagcgaaaagcagcgccctgcggctccagcggcgggggagcgccctcttccgcgccctcgccctctcccgtgtggggcagctgcgcgcacggggccatttgcagcgcaagcagcctagcgtgcggccgcggcgcccaggtcggaaaggaggcggcatcatggagctgaagaaggacatcaacgctgtatctatcgacatgctgctgatcgtgcactcggagaagcggcgcgccgcacagggtacgctctcagaccagcaggcgaacccgagctcgctgctgcagcgcggaggaggattccaaggtgttggaaatggagtccgaagatggcagaaattagaaggaaatgactttcacgaaaacttggtggagaagcagcaccctcagcagccccaggtcatcacttcctacaacagccaagggacacaactgactgtggaagtccaccctcgagatgccatgccccagctgctcaagaagttctccttggctaaacgtttacaaggtgataaaaatggaaacacaagaccccggcaacctggagggaaagatgcccatgcctacccctgggatcgatctagcctgaaatccatgtccctggacctgcagcagtttgagaaattggatatctacgcctcacaggtgacagccaagagtggcctagacgaactggtgagtgacctgctccaggaggcccacactgacctggaaagggtccgcgccatctggatctggatctgccatcacatagagtatgacattgcagctgctcaggagaaggaccgccaagccttcaaacccactgacatcctgcggacccagaagaccaactgtgatggctatgctggcctcttcgagagaatgtgcaggctcgccggagtgcagtgtatgaccgtgcctggctactccaagggtttcggctaccagacagggcagagcttctcgggggagtttgaccatgcctggaatgctgtgtacctggagggaagatggcacctggtggacagcacctggggcagcggcctggtggacaccatcacctccaaattcaccttcctctacaatgagttctacttcctcacccaccctgcactgttcatcgaggaccacttcccagacaacaagaactggcagctgctaaaacctcctcaatctctgaggcagtttgagaacaacatgtatcacaagagtgaattctacaacaaagggatgctgagtgcccacccagagacttccatgatcagaacagtgaatgggaaggccacggtcaccattgagagctgcgccccgacgctgttcatgttcatgctcaatggcaagcaagagcatgggctgctgagcctaaggaagaatgggatgaagttggaggtgtaccctccaaccatgggcactcacaagctgcagatctttgccaagggcaactccgacatctacagctcagtgctggagtacacgctcaagtgcaattatgtggacatgggtgtccagctgcctgctgagcttcaccagcccgtgggccccagctggttctcggagcagatgggcatcatgaagccctcccaccctgaccctatcatccacaccagcgacgggcgctgctccatcagcttcagcgtggaggagggcattaatgtcctggcttccctccacggggatgatggccccatcactgaggagacacagcggcgctacatcttccagctgcaccgggagaagcagaccgagctgaaagtccagctgccccatgcaggcaagtttgccctcaagatcttttctatgtcatggtgctggagaatgccaaccacaatttctactcctacatcctgaaatacaaagtgaatgcccagtgagggctgtgccccggtcttaccctcccaaagggccaaggccagacctccccagggagggctcgaaggaagtgcagggagccctggacaccactgagtctgcatgaaatcccttctaggcctctgcctcagtgtcccacctctgccacaggagctgtgatctttgtgttctgaaggcttcactcaggtgtggctgtgactgagggggcagaggcagtggctctttagaaggaaaaggtgctatgtaaatctaaggtattgtaaactgtacacctgcatccagatgccccttctcgtattagtgctgctgctgttgttgttgctgtagggttgatgagggaaagcagggatattgcccaggttgacagcttttcacatgatgcttagagaattctcttccatgcccaaggggacatgatttgcaaggctgggttgtccttgaatcacagagcccctttcaagcaatatcaccgtgcctctcgacagctccgagcccccagggaatcttggactatcttctcctcccagacctgatcatcttctgcatcctgctgcctcttcattagctacttcttgttcttcaagagcccaagaaaaagggtgtggtgaggaagccagctgacccacaactggctggaagctgatcgtctccaacatccctaagtatagtcaggaatgtgacaaccagaaagttgtgaggagactgcaaagcaaagagcagcccatgcccgctgtggctgtgcaggtgggagggacactgtcggcagagctgcagccttggtctgagggtgtaagacctccagctctgctctgagaggagtacacagggcaggtagttcagtctaaggcctggagtgccctccaggccctcacagagcctgggcctcaggcccctgccccacctccacagagagcctccagaggctggccaggcccttggggagtcttgtggatagccctgaataaggacctgg

SEQ ID NO: 3448 - protein, 614 aa, Homo sapiens
MACLAESAKSSALRLQRRGSALFRALALSRVGQLRARGHLQRKQPSVRPRRPGRKGGGIMELKKDINAVSIDMLLIVHSEKRRAAQGTLSDQQANPSSLLQRGGGFQGVGNGVRRWQKLEGNDFHENLVEKQHPQQPQVITSYNSQGTQLTVEVHPRDAMPQLLKKFSLAKRLQGDKNGNTRPRQPGGKDAHAYPWDRSSLKSMSLDLQQFEKLDIYASQVTAKSGLDELVSDLLQEAHTDLERVRAIWIWICHHIEYDIAAAQEKDRQAFKPTDILRTQKTNCDGYAGLFERMCRLAGVQCMTVPGYSKGFGYQTGQSFSGEFDHAWNAVYLEGRWHLVDSTWGSGLVDTITSKFTFLYNEFYFLTHPALFIEDHFPDNKNWQLLKPPQSLRQFENNMYHKSEFYNKGMLSAHPETSMIRTVNGKATVTIESCAPTLFMFMLNGKQEHGLLSLRKNGMKLEVYPPTMGTHKLQIFAKGNSDIYSSVLEYTLKCNYVDMGVQLPAELHQPVGPSWFSEQMGIMKPSHPDPIIHTSDGRCSISFSVEEGINVLASLHGDDGPITEETQRRYIFQLHREKQTELKVQLPHAGKFALKIFSMSWCWRMPTTISTPTS

SEQ ID NO: 3449 - DNA, 4100 bp, Homo sapiens
gggccgtaactggggggagctcctgactccaacaccccacccaactccctcctagggagagagagctgtcaacctccaaaaccaacccagggaaggagtgaggtcgaggccaaaacttggacaatctctgcacatcttgcaattcaatctggagcccctttgctgtctttccttttcctgaatctactctcaatgttgacagcactgtgcgatttctgtatttgccaggggcttctcgtgggaggtcggctccagccctctcgagaaccctccggagaccgtggggatgaggcagcgctcagccagagaagccctggagcccaggaccagcgcttcaagtgcaccgggcgggaggcaggggcgcagggagggaggctctggaccggccgcccctgctgactatggccccggtgcaggtcaaggcttgggcccggggatttcctttcaaaggtgacttagagccgcttcattagggtagcgccctcccaggcgggccctaatggcgtgtttggcagagtcagcgaaaagcagcgccctgcggctccagcggcgggggagcgccctcttccgcgccctcgccctctcccgtgtggggcagctgcgcgcacggggccatttgcagcgcaagcagcctagcgtgcggccgcggcgcccaggtcggaaaggaggcggcatcatggagctgaagaaggacatcaacgctgtatctatcgacatgctgctgatcgtgcactcggagaagcggcgcgccgcacagggattccaaggtgttggaaatggagtccgaagatggcagaaattagaaggaaatgactttcacgggacacaactgactgtggaagtccaccctcgagatgccatgccccagctgctcaagaagttctccttggctaaacgtttacaaggtgataaaaatggaaacacaagaccccggcaacctggagggaaagatgcccatgcctacccctgggatcgatctagcctgaaatccatgtccctggaaagggtccgcgccatctggatctggatctgccatcacatagagtatgacattgcagctgctcaggagaaggaccgccaagccttcaaacccactgacatcctgcggacccagaagaccaactgtgatggctatgctggcctcttcgagagaatgtgcaggctcgccggagtgcagtgtatgaccgtgcctggctactccaagggtttcggctaccagacagggcagagcttctcgggggagtttgaccatgcctggaatgctgtgtacctggagggaagatggcacctggtggacagcacctggggcagcggcctggtggacaccatcacctccaaattcaccttcctctacaatgagttctacttcctcacccaccctgcactgttcatcgaggaccacttcccagacaacaagaactggcagctgctaaaacctcctcaatctctgaggcagtttgagaacaacatgtatcacaagagtgaattctacaacaaagggatgctgagtgcccacccagagacttccatgatcagaacaggtgagcccggagcaggtgccagtgtgctagcagcaggaatggagcatttcgcactgtcctccaggagcccgcctgagactgcgctttcaaggcatgcccttccagacgcatggcttgtgagcttagcacaaagcttgtgtgtgcatgtggatgagtggaggctgctgaggcagcccaggccatcagggcagggaagggccataggccacatcagcagggacaaaagctcactcacactagcataaacccagaaagggatgtgtctgaaggctgcaggtttcctagaacttgaaggctgaacacacagcctggcatgtcacagaagccagggctgggcacttcctagctgggtgagtctctctcagttcacatagcagggaaaaggactacgtcaccctggctacacatagcctctgggctcaggtccccaacagaagctactggcctgctgtgttctcttccccaactcctgctggagagaatacatggcctcagcagagctggaatctgggtgttggtggtccaaccagcaaggatggggagcaacatgggtctcccaggacaggtgggggcagtcccacccaagacagagagttggggcagacttccttagggaggtggccactgagctgggtcttgggagaggagaacaggcctagtagctagacagagatggacatgttctaggcagcagaggagaggcggggacacagtaagcccccagcctccaaactcaggcacccctggatgagggccaagctccagcacctctgcctggctggctcagtacccctcccttctggaggcgggacccagccgtttccagcccactcccctggggcagtataggatacccagcttagccatctcccatggctggcctgggctgacatgtgctctcccaaccttcaccacggagccatggcagctgagtatgtttgcacactctgaggcatacgggggctgccctggagggccagaactggtcacaaaaaagcagggccttctctggaagattgtctcttatgcctctccaaggccttggcacctgatccagtgctgggcacacagcctgggcacgctgcacagccctgtaagtcgggtcagtccagcctcccacacctcagcaaaggactgcctggtggcaccgtctctgccactggggcctccatccgcccaggacaggaggtctgagctcacactgactattagcacagggtgcctgtgggtgggcccagagcccctggggagctccaacccacattgcagggcaatggggcagcggggagcacaggtgtccccaagttagttccaactgacttgtcccttccaccacacaatgacttcctttgccaagttgctgagctcttgcaaactcttccaactccaaatacctggcagctcctgcagctaaaataacagcgtgaagttgctcaatttgagaatccatttcctgtgcttacaacagatgcagggcttgttcaatgtatcataggccgtggaaatatcggaaagaactgaccaggtcaaagcaacaccaaactgatgtcattgagtggagtttgcctttttaagagacataaaaatataaacaccagattccttaatttatagaaatctaaacctaaatatgattccatatatctgatacttatgtacagagtatttctttgtggtagctagttctgttaagagaggggaggggaaggaaacaaaatagggaaactgagatgagcagaaaggaagggaaggaagagggcacctagataaggggctggaaagctgccaggctctaggagagtgccgtggaggggagaggggaggaggaggaggaagaggggactggaagagccgtggactcccatagaggtctgcaggggtggctagtcctttatttcaagtcttccatgatgaattacagcagtggaacgttccctgaaggacagccagggctaggagagaagctgccagggaactcagcctcagctgaggggtccgggtgggctgctttgccacggggacattaccatgaagccttatccaggtttgggggaagtggtggggagggaggagagggtaggaggaacctgaggcatgaagggttgtggccttggaggatctgagagagtgcttgatactggcgaggcaggaagagacaggcttctccacgggtctccagcttgagggctctgccgtgagcccaggagtagccaggtggacgttttcaaaggagccctggggctgctgtgtggggtgctgggtggtgctccacaatcaaaggtgaatctcagggggatctgggcttcactgtgcagaaaagactcacagccagttgtgagatggaacaggaccaggggccgtgagcagtgaggagctgaggtagcttctgcccactgagctggttcagaagtgaggggagaggagggttttcaccaagaggggatagcaactctattgatcttggtcactttcctttggaggttaccatgggacagatgtggcatgcagtggctgaaggcagtagagaaagcatgtagacaaataaaatagcatgaaagc

SEQ ID NO: 3450 - protein, 428 aa, Homo sapiens
MACLAESAKSSALRLQRRGSALFRALALSRVGQLRARGHLQRKQPSVRPRRPGRKGGGIMELKKDINAVSIDMLLIVHSEKRRAAQGFQGVGNGVRRWQKLEGNDFHGTQLTVEVHPRDAMPQLLKKFSLAKRLQGDKNGNTRPRQPGGKDAHAYPWDRSSLKSMSLERVRAIWIWICHHIEYDIAAAQEKDRQAFKPTDILRTQKTNCDGYAGLFERMCRLAGVQCMTVPGYSKGFGYQTGQSFSGEFDHAWNAVYLEGRWHLVDSTWGSGLVDTITSKFTFLYNEFYFLTHPALFIEDHFPDNKNWQLLKPPQSLRQFENNMYHKSEFYNKGMLSAHPETSMIRTGEPGAGASVLAAGMEHFALSSRSPPETALSRHALPDAWLVSLAQSLCVHVDEWRLLRQPRPSGQGRAIGHISRDKSSLTLA

SEQ ID NO: 3451 - DNA, 4042 bp, Homo sapiens
gggccgtaactggggggagctcctgactccaacaccccacccaactccctcctagggagagagagctgtcaacctccaaaaccaacccagggaaggagtgaggtcgaggccaaaacttggacaatctctgcacatcttgcaattcaatctggagcccctttgctgtctttccttttcctgaatctactctcaatgttgacagcactgtgcgatttctgtatttgccaggggcttctcgtgggaggtcggctccagccctctcgagaaccctccggagaccgtggggatgaggcagcgctcagccagagaagccctggagcccaggaccagcgcttcaagtgcaccgggcgggaggcaggggcgcagggagggaggctctggaccggccgcccctgctgactatggccccggtgcaggtcaaggcttgggcccggggatttcctttcaaaggtgacttagagccgcttcattagggtagcgccctcccaggcgggccctaatggcgtgtttggcagagtcagcgaaaagcagcgccctgcggctccagcggcgggggagcgccctcttccgcgccctcgccctctcccgtgtggggcagctgcgcgcacggggccatttgcagcgcaagcagcctagcgtgcggccgcggcgcccaggtcggaaaggaggcggcatcatggagctgaagaaggacatcaacgctgtatctatcgacatgctgctgatcgtgcactcggagaagcggcgcgccgcacagggattccaaggtgttggaaatggagtccgaagatggcagaaattagaaggaaatgactttcacgaaaacttggtggagaagcagcaccctcagcagccccaggtcatcacttcctacaacagccaaggttccagggattctggcatggatatctctaaaggccattcttcagcctatcccaggggacaatttaaagtggagtaggtgagaaaggcctcactgagaaagtgacatctaagcaaggaaagagggtgtcactctgtggcccaggttggagtgcagaggtgcgatcatagctcactccagcctcaaactcctgggctcaagcaatcctccttcctcagcctcccgagtagctgggaccacagggacacaactgactgtggaagtccaccctcgagatgccatgccccagctgctcaagaagttctccttggctaaacgtatgtatgacacaggtactcatggtggagggctggcagagaggattgaaggcagctggttgggccagatcccagcccaagcatcttctgagggaaggagaagagtgacatgggcctgcaaactgggaaaaggcagaagcatgacagctttatcctgggagactcttttctctacacccagctaccgctgattttgcatctctggaactagtcataggtttacaaggtgataaaaatggaaacacaagaccccggcaacctggagggaaagatgcccatgcctacccctgggatcgatctagcctgaaatccatgtccctggacctgcagcagtttgagaaattggatatctacgcctcacaggtgacagccaagagtggcctagacgaactggtgagtgacctgctccaggaggcccacactgacctggaaagggtccgcgccatctggatctggatctgccatcacatagtttggaatgcagcttagagaatgagctcgcctggcacagagtatgacattgcagctgctcaggagaaggaccgccaagccttcaaacccactgacatcctgcggacccagaagaccaactgtgatggctatgctggcctcttcgagagaatgtgcagagctgcttgaggagcgtgtcaagcaggctctagggatgaacatttcagaagtgatctgaatggtgttggtctcaggggaggagcagacagcggagactgcagccagtctgtaccaacaggaccagccagcactgtatctccctgtccccagtgccccgagataaaagccatcaaggctgtttatatgctcgccggagtgcagtgtatgaccgtgcctggctactccaagggtttcggctaccagacagggcagagcttctcgggggagtttgaccatgcctggaatgctgtgtacctggagggaagatggcacctggtggacagcacctggggcagcggcctggtggacaccatcacctccaaattcaccttcctctacaatgagttctacttcctcacccaccctgcactgttcatcgaggaccacttcccagacaacaagaactggcagctgctaaaacctcctcaatctctgaggcagtttgagaacaacatgtatcacaagagtgaattctacaacaaagggatgctgagtgcccacccagagacttccatgatcagaacaggtgagcccggagcaggtgccagtgtgctagcagcaggaatggagcatttcgcactgtcctccaggagcccgcctgagactgcgctttcaaggcatgcccttccagacgcatggcttgtgagcttagcacaaagcttgtgtgtgcatgtggatgagtggaggctgctgaggcagcccaggccatcagggcagggaagggccataggccacatcagcagggacaaaagctcactcacactagcataaacccagaaagggatgtgtctgaaggctgcaggtttcctagaacttgaaggctgaacacacagcctggcatgtcacagaagccagggctgggcacttcctagctgggtgagtctctctcagttcacatagcagggaaaaggactacgtcaccctggctacacatagcctctgggctcaggtccccaacagaagctactggcctgctgtgttctcttccccaactcctgctggagagaatacatggcctcagcagagctggaatctgggtgttggtggtccaaccagcaaggatggggagcaacatgggtctcccaggacaggtgggggcagtcccacccaagacagagagttggggcagacttccttagggaggtggccactgagctgggtcttgggagaggagaacaggcctagtagctagacagagatggacatgttctaggcagcagaggagaggcggggacacagtaagcccccagcctccaaactcaggcacccctggatgagggccaagctccagcacctctgcctggctggctcagtacccctcccttctggaggcgggacccagccgtttccagcccactcccctggggcagtataggatacccagcttagccatctcccatggctggcctgggctgacatgtgctctcccaaccttcaccacggagccatggcagctgagtatgtttgcacactctgaggcatacgggggctgccctggagggccagaactggtcacaaaaaagcagggccttctctggaagattgtctcttatgcctctccaaggccttggcacctgatccagtgctgggcacacagcctgggcacgctgcacagccctgtaagtcgggtcagtccagcctcccacacctcagcaaaggactgcctggtggcaccgtctctgccactggggcctccatccgcccaggacaggaggtctgagctcacactgactattagcacagggtgcctgtgggtgggcccagagcccctggggagctccaacccacattgcagggcaatggggcagcggggagcacaggtgtccccaagttagttccaactgacttgtcccttccaccacacaatgacttcctttgccaagttgctgagctcttgcaaactcttccaactccaaatacctggcagctcctgcagctaaaataacagcgtgaagttgctcaatttgagaatccatttcctgtgcttacaacagatgcagggcttgttcaatgtatcataggccgtggaaatatcggaaagaactgaccaggtcaaagcaacaccaaactgatgtcattgagtggagtttgcctttttaagagacataaaaatataaacaccagattccttaatttatagaaatctaaacctaaatatgattccatatatctg

SEQ ID NO: 3452 - protein, 208 aa, Homo sapiens
MLAGVQCMTVPGYSKGFGYQTGQSFSGEFDHAWNAVYLEGRWHLVDSTWGSGLVDTITSKFTFLYNEFYFLTHPALFIEDHFPDNKNWQLLKPPQSLRQFENNMYHKSEFYNKGMLSAHPETSMIRTGEPGAGASVLAAGMEHFALSSRSPPETALSRHALPDAWLVSLAQSLCVHVDEWRLLRQPRPSGQGRAIGHISRDKSSLTLA

SEQ ID NO: 3453 - DNA, 725 bp, Homo sapiens
acaccaggaagttcctggcaattcaagcagcaattcagtggtcagtggggtgggaacaaggagactgtgaaaaggagagtaaagaggaggggtcaaaagcaaggaccaccagaaggtttacaaggtgataaaaatggaaacacaagaccccggcaacctggagggaaagatgcccatgcctacccctgggatcgatctagcctgaaatccatgtccctggacctgcagcagtttgagaaattggatatctacgcctcacaggtgacagccaagagtggcctagacgaactggtgagtgacctgctccaggaggcccacactgacctggaaagggtccgcgccatctggatctggatctgccatcacatagagtatgacattgcagctgctcaggagaaggaccgccaagccttcaaacccactgacatcctgcggacccagaagaccaactgtgatggctatgctggcctcttcgagagaatgtgcaggtggctctgagcagaggacaagcatcagtgggcagcatgtccagaggtccacagcgccgctaaatcagttcaccttaatgcaaaacgagccattctccaagccccattgttcccaggactccccttatccctccacatcatcctagaaagtgatatgcacagacattctaggcagcaatggaaagtaatttcctgaagaatataattttaagtagtatttatggctttttttccaat

SEQ ID NO: 3454 - protein, 95 aa, Homo sapiens
MSLDLQQFEKLDIYASQVTAKSGLDELVSDLLQEAHTDLERVRAIWIWICHHIEYDIAAAQEKDRQAFKPTDILRTQKTNCDGYAGLFERMCRWL

SEQ ID NO: 3455 - DNA, 526 bp, Homo sapiens
ttcattccctcaagggcatcttattcatgggtagcctctctcagattccaagagagccaagatccacctgctctaccataacctagataagtctgcaactggtacatcactcttttgccctgagtctcccacctcagagaagcttgttattttgcaggattccaaggtgttggaaatggagtccgaagatggcagaaattagaaggaaatgactttcacgaaaacttggtggagaagcagcaccctcagcagccccaggtcatcacttcctacaacagccaaggtaagtgattcgccgctagccgtgacctcccctgcagaggtgtgcccagacctgatgctctggccagcgacagcccaggatgtggagctcagactatggggagcagggtcctctctgctcccatgggtgttggaaaacccttttcctctccctgcgtctcatgggaagcagcaagaggctgcacagtctcagtcttcccctcaccatgagatcaagaaataaagcccatgggcctcagagcac

SEQ ID NO: 3456 - protein, 98 aa, Homo sapiens [sequence omitted]

SEQ ID NO: 3457 - DNA, 354 bp, Homo sapiens
atgttccaagttctacaggggccgtaactggggggagctcctgactccaacaccccacccaactccctcctagggagagagagctgtcaacctccaaaaccaacccagggaaggagtgaggccttgcacaatttacagcctcagtttctcctttcttgagactttctcccagcctcctatagatggaaggcatgaaaggcgtaaaaggaacgcaggtttggatagggtaagatttgaaacctgctgtctccacttgaacttatccatcaattttacttgtcctacacactttctgggtaaatttgtaagttgtagattggtaaaataaagtgactgtttatagagtgattgtgg

SEQ ID NO: 3458 - protein, 84 aa, Homo sapiens
GERAVNLQNQPREGVRPCTIYSLSFSFLETFSQPPIDGRHERRKRNAGLDRVRFETCCLHLNLSINFTCPTHFLGKFVSCRLVK

SEQ ID NO: 3459 - DNA, 1730 bp, Homo sapiens
ttattcacagaagaaagcaggtagtatactgttacaatactacagtagaaagtcagaaggtcacaaagcttgcagggtaagtgacacaacttgaaactgcttggccctctttaaaaagaaataataaaatgggagagaatgaagcaagtttacctaacacgtctttgcaaggtaaaaagatggcctatcagaaggtccatgcagatcaaagagctccaggacactcacagtacttagacaatgatgaccttcaagccactgcccttgacttagagtgggacatggagaaggaactagaggagtctggttttgaccaattccagctagacggtgctgagaatcagaacctagggcattcagagactatagacctcaatcttgattccattcaaccagcaacttcacccaaaggaaggttccagagacttcaagaagaatctgactacattacccattatacacgatctgcaccaaagagcaatcgctgcaacttttgccacgtcttaaaaatactttgcacagccaccattttatttatttttgggattttgataggttattatgtacatacaaattgcccttcagatgctccatcttcaggaacagttgatcctcagttatatcaagagattctcaagacaatccaggcagaagatattaagaagtctttcagaaatttggtacaactatataaaaatgaagatgacatggaaatttcaaagaagattaagactcagtggacctctttgggcctagaagatgtacagtttgtaaattactctgtgctgcttgatctgccaggcccttctcccagcactgtgactctgagcagcagtggtcaatgctttcatcctaatggccagccttgcagtgaagaagccagaaaagatagcagccaagacctgctctattcatatgcagcctattctgccaaaggaactctcaaggctgaagtcatcgatgtgagttatggaatggcagatgatttaaaaaggattaggaaaataaaaaacgtaacaaatcagatcgcactcctgaaattaggaaaattgccactgctttataaggttggtccagtgaatgttattcagtggtttggtcaatattttgccttgttttgttggaattatatgcttttgtgagtgtggagtgtgtgtgtgcatataggtgtgtgagagagagaaggggagaggaagaaagagaggcagagagtgtcacagaaagatggcttttccacattagaacattttaatttaagatatttaagaacaatatatttatgcccttatttctttagagagaaaataccttaagtcaggtaacactgagtttgtgggaccttaataaaattggcatactcttcataatggtacctatctggaatagtaaaaaatgagaaccaccctgtgttcatcttatgacatatgtgaaacttctaatctattatcaaatggactaattatcatgttctctatgttagacaagtatctagatgatttacaccctttagtgattattttgtcaactatacaactacagttactaactgtgatcaggattttaattaaaatataattgctaagagtagcagaattttgatttattttatttgaatggaagtttattaacactcatccacagatacacttatgtaattaagtttctgatgatgaaccagcacaatagacagccactactgctcattcttgcttcatttcctttttctattt

SEQ ID NO: 3460 - protein, 337 aa, Homo sapiens
MGENEASLPNTSLQGKKMAYQKVHADQRAPGHSQYLDNDDLQATALDLEWDMEKELEESGFDQFQLDGAENQNLGHSETIDLNLDSIQPATSPKGRFQRLQEESDYITHYTRSAPKSNRCNFCHVLKILCTATILFIFGILIGYYVHTNCPSDAPSSGTVDPQLYQEILKTIQAEDIKKSFRNLVQLYKNEDDMEISKKIKTQWTSLGLEDVQFVNYSVLLDLPGPSPSTVTLSSSGQCFHPNGQPCSEEARKDSSQDLLYSYAAYSAKGTLKAEVIDVSYGMADDLKRIRKIKNVTNQIALLKLGKLPLLYKVGPVNVIQWFGQYFALFCWNYMLL

SEQ ID NO: 3461 - DNA, 4953 bp, Homo sapiens
ttattcacagaagaaagcaggtagtatactgttacaatactacagtagaaagtcagaaggtcacaaagcttgcagggtaagtgacacaacttgaaactgcttggccctctttaaaaagaaataataaaatgggagagaatgaagcaagtttacctaacacgtctttgcaaggtaaaaagatggcctatcagaaggtccatgcagatcaaagagctccaggacactcacagtacttagacaatgatgaccttcaagccactgcccttgacttagagtgggacatggagaaggaactagaggagtctggttttgaccaattccagctagacggtgctgagaatcagaacctagggcattcagagactatagacctcaatcttgattccattcaaccagcaacttcacccaaaggaaggttccagagacttcaagaagaatctgactacattacccattatacacgatctgcaccaaagagcaatcgctgcaacttttgccacgtcttaaaaatactttgcacagccaccattttatttatttttgggattttgataggttattatgtacatacaaattgcccttcagatgctccatcttcaggaacagttgatcctcagttatatcaagagattctcaagacaatccaggcagaagatattaagaagtctttcagaaatttggtacaactatataaaaatgaagatgacatggaaatttcaaagaagattaagactcagtggacctctttgggcctagaagatgtacagtttgtaaattactctgtgctgcttgatctgccaggcccttctcccagcactgtgactctgagcagcagtggtcaatgctttcatcctaatggccagccttgcagtgaagaagccagaaaagatagcagccaagacctgctctattcatatgcagcctattctgccaaaggaactctcaaggctgaagtcatcgatgtgagttatggaatggcagatgatttaaaaaggattaggaaaataaaaaacgtaacaaatcagatcgcactcctgaaattaggaaaattgccactgctttataagctttcctcattggaaaaggctggatttggaggtgttcttctgtatatcgatccttgtgatttgccaaagactgtgaatcctagccatgataccttcatggtgtcactgaatccaggaggagacccttctacgcctggttacccaagtgtcgatgaaagttttagacaaagccgatcaaacctcacctctctattagtgcagcccatctctgcacccctcgttgcaaaactgatctcttcgccaaaagctagaaccaaaaatgaagcgtgtagctctctagagcttccaaataatgaaataagagtcgtcagcatgcaagttcagacagtcacaaaattgaaaacagttactaatgttgttggatttgtaatgggcttgacatctccagaccggtatatcatagttggcagccatcatcacactgcacacagttataatggacaagaatgggccagtagtactgcaataatcacagcgtttatccgtgccttgatgtcaaaagttaagagagggtggagaccagaccgaactattgttttctgttcttggggaggaacagcttttggcaatattggctcatatgaatggggagaggatttcaagaaggttcttcagaaaaatgttgtggcttatattagcctccacagtcccataagggggaactctagtctgtatcctgtagcatcaccatctcttcagcaactggtagtagagaaaaataatttcaactgtaccagaagagcccagtgcccagaaaccaatatcagttctatacagatacaaggtgatgctgattatttcatcaaccatcttggagttcccatcgtgcagtttgcttacgaggacatcaaaacattagagggtccaagttttctctccgaggcccgtttttctacacgagcaacaaaaattgaagaaatggatccctctttcaaccttcatgaaaccattactaagctctcaggagaagtgattttgcaaattgccaacgaacctgttctgccctttaatgcacttgatatagctttagaagttcaaaacaaccttaaaggtgatcaacccaacactcatcaactgttagccatggcgttacgcctgcgggagagtgctgaactttttcagtctgatgagatgcgacctgctaatgatcccaaggagagagcacccatccgcatccggatgctgaatgacattctccaagacatggagaaaagctttctggtaaagcaggcaccaccaggtttttatagaaacatcctctaccaccttgatgaaaagacaagccggttttcaatacttatagaggcttgggaacactgcaaaccccttgcatcaaatgagacccttcaagaagccctgtcagaggtgttgaacagcattaattcagctcaggtttacttcaaagcaggacttgatgtgttcaagagtgtcttggatgggaagaattgagaaaactctgagcatttttaaaagtttgtttacaattccacaagcaaaagctctaatttaaccagattttctgacattgaaggcttattttccccaatggctttttgacaagtataaagctattattacattgtattttttaaatgtaaatatagaaagaacattttgcacatttaatatttttcttatatctacatttctgaatatgtaaagcaagttattgaaataggacttaagaattacctattaaaaagaaatctgatatataaaaatatgtactattttaaggaaaaatttccaagaagttctggactatctttgttcctatggggagggcatataggaacacagtttattctctctgatagagctattaatgacttagtttctgtaaaagaaatggagagttgatatggttcagattaacttcactattaagtgttcaatatgaagaattcaagtattctgactgagtgattggttgacctaaaccactttgaatgtttctattttatgaaatgaagtttctcttcttaacacaactagatgtagtaatacactggttatgaaattgtatttttttaagtattaatgaaaaaagagccataagcattccaggagaaaatctcaagggagctacatagagcaatttaaatgcaaatttttttcctaacaacttacaaggtgactagctttgaaacccctaatttgcctcagttgattttctaagaatttcaggagtgatgtatgtcttaagagggagaaaaaaatatttcttattactttttctcttgtttctgttggaaacactgaagcagggactctaaaatgaaagcatctcacattggttttctttcttgtatcttttctgaaactccttgctgtaaggcagctttctcagagtactatatattttcaacagtaaagtagcagagtttctctttgaaacccaaaatgtcttctaaagaatcaaatttctatttctgcctctgacaaaaagaacttactatgaaagaaatagttgttttatcaataaaagccccttaatattatgaagaaacttttcatattttttcttctttatccttaattgtgactaagatggaaatctagaaaatattcatgcttctaagtttctgcagtgttactgtaagagagtgtctcgtctacacttcagttcttctctcatgtggaaaactaagctttttatattgacattgccattgaatagctctagcaactattattattcccccaaaccctaaaattctacctattaggtgtcaggttaaagttctaatttatctttagaaatttatgtgaaaaatggttttcctatactggataaagcaattccccttaggaaacatagcctcagagtatttcatataaattttctctatctaattcaaacatatctccccatgatacaccgccagagtgacattgcagacagtctgtgtatgtttaaattttcactttttatggatgagcataaacctagtcttagtttaaaggcaaactaaagttgaggggaaataattaatcaatactgattaattgatttataaggttcaacactgtctaccctaaataatttttatatgctcaaggcaaagcagggaatagaggcaattagctagataattcaagcagaaatccattttcatcgaaattgcctgtgtgcacatatttttagatgaaaaatgaaactaccttacaatattatttttttaaccaatgtatttgtttgcaaacatttgccatgttgaagagtgtgtataggaaaggtctagaaataaataggcttgtgcatacctaggcattcatgctctttcttcctcttcagagatcatcagaaaagaggtgggaatacacaagcaggtgcatgtaagcccaaaagctagaaagccttatatttaaccaaaggttgatgtgttcattccagttattcacttacagatgaaactaaaacaaataaaggcaagctattatcagtttggtagttcattattttagaacaaatttctaaattaatttattcccataacctacaatagcactgagaacagaaaacatgtttcttcttcattttgtttaaagattgcgtacctaggtaagtcacactgtatagataaaaaccttcttctgtattcctcacctctaaattatatgttatttgctatttgaaaactgtagttaactatggttttttattagtctattaaaagatacgtggagatattaaattatacctaaagcagacgtccaacaaattctgtacatgctgctttacatctttgcaacaaacctcttaactagcagcattatttctatagtgtgattacctgagggtgcctccaaatgtatatcatttcactcccctcccctccccacccccaatagattcaaataaataaaatcctgagcaaattaa

SEQ ID NO: 3462 - protein, 795 aa, Homo sapiens; identical to SEQ ID NO: 386

SEQ ID NO: 3463 - DNA, 408 bp, Homo sapiens
cctatgacagacaaggcaagctctactctcagaagcaaaaattatatatctaggagtcagagtatgaatcaagaagaatggacttctgcttcttatctacctaatgccagataatgatgacagcaatgcattttctacattcatatcctcaatcatatgtttttgaatgcttactggaaaaccggtttaaaagaaaggtgactagttattggtcttgctctgacagccgtggaaaccatttgctgatgaaagcacaagcaacaacaacaaaaaagatgaataaactggatttcaacaaaaacacatttgtgcttcagagaacataatcaagaaagtgaaaaggcaacccaccaatgggagaacacagtttcaaaacatatatctaataaaatatttgagtccagatta

SEQ ID NO: 3464 - protein, 70 aa, Homo sapiens
MMTAMHFLHSYPQSYVFECLLENRFKRKVTSYWSCSDSRGNHLLMKAQATTTKKMNKLDFNKNTFVLQRT

SEQ ID NO: 3465 - DNA, 1574 bp, Homo sapiens
actttttacctcagggtcattagaaagccaccacagatctaggcatctaagcaggaataggagaggaaaggcaactgtagccacattaatcacttttatcaggaagataaatgcttttcccgaatctttcaacaggctttcattttacattgggcatatttttgtcatatagccttccctagctgcaagggaggcttttcaaacttctttatggaattcagcaagaaagtaaagaggataaaatgaagcacactggatgaatggtgtggcttgatgaaattaagaaatttggtacaactatataaaaatgaagatgacatggaaatttcaaagaagattaagactcagtggacctctttgggcctagaagatgtacagtttgtaaattactctgtgctgcttgatctgccaggcccttctcccagcactgtgactctgagcagcagtggtcaatgctttcatcctaatggccagccttgcagtgaagaagccagaaaagatagcagccaagacctgctctattcatatgcagcctattctgccaaaggaactctcaaggctgaagtcatcgatgtgagttatggaatggcagatgatttaaaaaggattaggaaaataaaaaacgtaacaaatcagatcgcactcctgaaattaggaaaattgccactgctttataagctttcctcattggaaaaggctggatttggaggtgttcttctgtatatcgatccttgtgatttgccaaagactgtgaatcctagccatgataccttcatggtgtcactgaatccaggaggagacccttctacgcctggttacccaagtgtcgaaataagagtcgtcagcatgcaagttcagacagtcacaaaattgaaaacagttactaatgttgttggatttgtaatgggcttgacatctccagaccggtatatcatagttggcagccatcatcacactgcacacagttataatggacaagaatgggccagtagtactgcaataatcacagcgtttatccgtgccttgatgtcaaaagttaagagagggtggagaccagaccgaactattgttttctgttcttggggaggaacagcttttggcaatattggctcatatgaatggggagaggatttcaagaaggttcttcagaaaaatgttgtggcttatattagcctccacagtcccataagggggaactctagtctgtatcctgtagcatcaccatctcttcagcaactggtagtagagaaaaataatttcaactgtaccagaagagcccagtgcccagaaaccaatatcagttctatacagatacaaggtgatgctgattatttcatcaaccatcttggagttcccatcgtgcagtttgcttacgaggacatcaaaacattagagggtccaagttttctctccgaggcccgtttttctacacgagcaacaaaaattgaagaaatggatccctctttcaaccttcatgaaaccattactaagtgaagaacacacatgctttcatagtcttggaatgtgtggtatgtactctatgattgctgaaataaagtgcttttgaaaatcct

SEQ ID NO: 3466 - protein, 406 aa, Homo sapiens
MKLRNLVQLYKNEDDMEISKKIKTQWTSLGLEDVQFVNYSVLLDLPGPSPSTVTLSSSGQCFHPNGQPCSEEARKDSSQDLLYSYAAYSAKGTLKAEVIDVSYGMADDLKRIRKIKNVTNQIALLKLGKLPLLYKLSSLEKAGFGGVLLYIDPCDLPKTVNPSHDTFMVSLNPGGDPSTPGYPSVEIRVVSMQVQTVTKLKTVTNVVGFVMGLTSPDRYIIVGSHHHTAHSYNGQEWASSTAIITAFIRALMSKVKRGWRPDRTIVFCSWGGTAFGNIGSYEWGEDFKKVLQKNVVAYISLHSPIRGNSSLYPVASPSLQQLVVEKNNFNCTRRAQCPETNISSIQIQGDADYFINHLGVPIVQFAYEDIKTLEGPSFLSEARFSTRATKIEEMDPSFNLHETITK

SEQ ID NO: 3467 - DNA, 882 bp, Homo sapiens
gctgaagtcatcgatgtgagttatggaatggcagatgatttaaaaaggattaggaaaataaaaaacgtaacaaatcagatcgcactcctgaaattaggaaaattgccactgctttataagatgaaagttttagacaaagccgatcaaacctcacctctctattagtgcagcccatctctgcacccctcgttgcaaaactgatctcttcgccaaaagctagaaccaaaaatgaagcgtgtagctctctagagcttccaaataggattgcttttgttattgctatgaagagtaatattgccttaccaacggattgttcaaattagcaatgccaacagcagcagaaataagagtcgtcagcatgcaagttcagacagtcacaaaattgaaaacagttactaatgttgttggatttgtaatgggcttgacatctccagaccggtatatcatagttggcagccatcatcacactgcacacagttataatggacaagaatgggccagtagtactgcaataatcacagcgtttatccgtgccttgatgtcaaaagttaagagagggtggagaccagaccgaactattgttttctgttcttggggaggaacagcttttggcaatattggctcatatgaatggggagaggatttcaagaaggttcttcagaaaaatgttgtggcttatattagcctccacagtcccataagggggaactctagtctgtatcctgtagcatcaccatctcttcagcaactggtagtagaggaaccttagttccaggtttgatgattagtcctcagtatatccacagagctcttatatgaagagaattcttcctcttctaacacacataataacctatgaagatattaaatattttgcccctt

SEQ ID NO: 3468 - protein, 147 aa, Homo sapiens
MPTAAEIRVVSMQVQTVTKLKTVTNVVGFVMGLTSPDRYIIVGSHHHTAHSYNGQEWASSTAIITAFIRALMSKVKRGWRPDRTIVFCSWGGTAFGNIGSYEWGEDFKKVLQKNVVAYISLHSPIRGNSSLYPVASPSLQQLVVEEP

SEQ ID NO: 3469 - DNA, 748 bp, Homo sapiens
agttttatttttgtatgcctaacttgcctaaagttagcgtcaggaggtatagtatgcatattgacatattgttcacatccataactttgaagatctctctggatgcttcagcagagggaatttgaatgagttcttcaacctccactgccactcacccaattttccttcaaattgacactcttaacccttctttctcgttttctgtgttaatatatcccatatctggttctccatagctacagtaactcagcttatggaaaagaccagatagttttctctactgattgtcctaacatgatgagacagcttgctttaacaatacaaactaacacatcttagttgtgaatttcaaactccagaatgactatatttctcattcaccttgtaaagttctcaaacccaattatttataaataatccactgcaacctgtacgttttctttgggttagctctgtgtcacatctattcttaggaagcagcttgactgaaaacaaaaatgccaactcacagaaggctgggaagtgggggaaataagaggaggtcaggtgaaagaaaaaatattagagacagaaagaaagagaaagggagggaaggagggagccaaagactgatacagaaatagaggaagaaggatgacgagataatgaacaaaaatgaagcaaaggaaagccaaaagcaattagattgaagtctaaaggtctcaggcatgaaaagagtctcacgaaagaaaagtaggatgtttcccac

SEQ ID NO: 3470 - protein, 36 aa, Homo sapiens [sequence omitted]

SEQ ID NO: 3471 - DNA, 4226 bp, Homo sapiens
ggagaggaggaacggagctgggacgggctgcaggagggaatggccgcaggccggcaggaggaggggcgcgaccacccggccgccggccgatggcggatgaggctatgggggctgagacgcagtagcggccctgcacttctggaggatgctcgaggcccggccccccaggacgcagggcagtgacgctgccggtgccgctgcggggcgggggctgcgggcgctgcttctctccctgaccgcagccgctgggatttggggctccatgggggagagatctgcttaccagcgcctggctgggggcgaggagggaccgcagaggctgggaggcggcagaatgcagccagaggagggcacaggctggctgctggagctgctgtccgaggtgcagctgcaacagtacttcctgcggctccgagatgacctcaacgtcacccgcctgtcccactttgagtacgtcaagaatgaggacctggagaagatcggcatgggtcggcctggccagcggcggctgtgggaggctgtgaagaggaggaaggccttgtgcaaacgcaagtcgtggatgagtaaggtgttcagtggaaagcgactggaggctgagttcccacctcatcactctcagagcaccttccggaagacctcgcccgcccctgggggcccagcaggggaggggcccctgcagagcctcacctgcctcattggggagaaggacctgcgcctcctggagaagctgggtgatggttcctttggcgtggtgcgcaggggcgagtgggacgcgccctcagggaagacggtgagtgtggctgtgaagtgcctgaagcccgatgtcctgagccagccagaagccatggacgacttcatccgggaggtcaatgccatgcactcgctcgaccaccgaaacctcatccgcctctacggggtggtgctcacgccgcccatgaagatggtgacagagctggcacctctgggatcgttgttggaccggctacgtaagcaccagggccacttcctcctggggactctgagccgctacgctgtgcaggtggctgagggcatgggctacctggagtccaagcgctttattcaccgtgacctggctgcccgcaatctgctgttggctacccgcgacctggtcaagatcggggactttgggctgatgcgagcactacctcagaatgacgaccattacgtcatgcaggaacatcgcaaggtgcccttcgcctggtgtgcccccgagagcctgaagacacgcaccttctcccatgccagcgacacctggatgttcggggtgacactgtgggaaatgttcacctacggccaggagccctggatcggcctcaacggcagtcagatcctgcataagatcgacaaggagggggagcggctgccccggcccgaggactgtccccaggacatctacaacgtcatggtccagtgctgggctcacaagccagaggacagacccacgtttgtggccctgcgggacttcctgctggaggcccagcccacagacatgcgggcccttcaggactttgaggaaccggacaagctgcacatccagatgaatgatgtcatcaccgtcatcgagggaagggccgagaactactggtggcgtggccagaacacacggacgctgtgtgtggggcccttccctcgcaacgtggtgacctccgtggccggcctgtcggcccaggacatcagccagcccctgcagaacagcttcatccacacagggcatggcgacagtgacccccgccactgctggggcttcccggacaggattgacgaactgtatctgggaaaccccatggacccccccgacctcctgagcgtggaactgagcacctcccggcccccccagcatctaggaggggtgaaaagggagcctccacctcgcccacctcagcctgccttcttcactcagaaaccaacctatgaccctgtgagcgaggaccaagaccccttgtccagcgacttcaagaggctgggcctgcggaagccaggcctgccccgagggctgtggctggcgaagccctcggcgcgggtgccgggcaccaaggccagccgaggcagcggggctgaggtcacgctcatcgacttcggtgaggagcccgtggtcccggccctacggccctgcgcgccctccctggcgcagctggccatggacgcctgctccctgctggacgagaccccgcctcagagccccacgcgggcactgccccggcccctgcaccccacgcctgtggtggactgggacgcacgcccgctgccccccccgcccgcctatgacgacgtggcccaggatgaggatgactttgagatctgctccatcaacagcaccctcgtgggcgcgggggtccctgccgggcccagccagggccagaccaactacgcctttgtgcctgagcaggcgcggccgccccctcccctggaggacaacctgttcctcccgccccagggtgggggcaagccgcccagctccgcacagaccgcagagatcttccaggcgctacagcaggagtgcatgaggcaactgcaggctccggccggctccccggccccctctcccagcccggggggtgacgacaagccccaggtgcctcctcgggtacccatcccccctcggcccacgcgcccacacgtccagctgtctccagcccccccgggcgaggaggagaccagccagtggcctggacctgcttcccctccccgggtgcctccgcgggagcccctgtcccctcaaggctcgaggacacccagccccctggtaccacctggcagctccccgctgccaccccggctctcaagctcacctgggaagaccatgcccaccacccagagctttgcctcagaccccaagtacgccaccccccaggtgatccaggcccctggcccgcgggctggtccctgcatcctgcccatcgtccgggatggcaagaaggtcagcagcacccactattacttgctgcccgagcgaccatcctacctggagcgctaccagcgcttcctgcgtgaggcccagagccccgaggagcctacccccctgcctgtgcctctgctgctgcccccacccagcaccccagcccccgccgcccccacggccaccgtgcggccgatgccccaggctgccttggaccccaaggccaacttctccaccaacaacagcaacccaggggcccggccaccacccccgagggccactgctcggctgccacagaggggctgccctggcgatgggccagaggcgggccggccagcagacaagatccagatggtggagcagctcttcgggctgggtctgcggcccagaggggagtgccacaaagtgctggagatgttcgactggaacctggagcaggccggctgccaccttctgggctcctggggccctgcccaccacaagcgctgagatgcgtctggagagccagagggcctgcctgaaggaatcacctgagcctgtccgtccaccaggagtggggagatgcccccatccagtcctggaggacccgctgctcctgctgctcccggggatggagcaaggccaaggctgcgggaggctgggagccctgccctgcccatccctcctgcaccagcgctgtccctgcacactttggttcagtcccggtgcccctgccaagatgtggaaggggccgggtgaagacaggcttgagggctgccccagcaggctctgggtatgacctgcctctggccctggtcctgggcggggcctgtgggtggagtagtacccccaggccctgccctgggtgacagactgggaggaaaccaggctggacctgggcaggcgggatgtgttggccacagggagaggcggaccggcacccggtgggacctcctaggactgggccttcttccagggggcccctggcagcagctggggtgtcgggcagaatgtgacttgtggccttaccatggacttgaatgggacttggctggcctcaggatcttgtgcctggaaatagcctgaggtggctcaggaagcggagaaagggtgccagaccattctctggcggggaccagggcccaaggccccagggctggaaggagaccaaggggcagccgccctggagggacatcagtgcttcctcttccacccaattcccccacgcggttccatgttttcccaccagcctgttggcgaagttgctgctccggcattcagtacctgcttcttccagagaaataaagttagtttctattttatgttactt

SEQ ID NO: 3472 - protein, 1086 aa, Homo sapiens; identical to SEQ ID NO: 391

SEQ ID NO: 3473 - DNA, 4561 bp, Homo sapiens
gggagcccgcggaggctgctgcagcagcccgaaccggcgtccgagtccggggaaggcccccgcgagcgcagggaggggccggaaagttccggcgaactgggggagcggcagtgggagagcgtcgggcgggaggcggtggtcctgggagcggccccggcgccccgaagccgccccgagctggtggggagggcccggccggtggggccccgggggcctgcgggggaggggcgcctgggggtgcaagaggcgaattggctgcccggggtgcaggagggacaggtggtgcgggctgtccaggaaacctacctgaacgggaaggagccccaggagggagagggacccggcgaggggctcaggacccggaggcgccggcggaggaggaggtggtgactggcaggcccgggccccacggtacctccggggctgaaggggacgcaggatgtaggggcatggggagtcgggcgcagaagagtgcggggaaccgctgagctctgggagccactgcctgagggcaggccgcggccggcgggaacctcttctgccgtctcagcctgggcgtcgctgaagctgtgtctgcggggaggcagcggaaggcggcagaggctgggaggcggcagaatgcagccagaggagggcacaggctggctgctggagctgctgtccgaggtgcagctgcaacagtacttcctgcggctccgagatgacctcaacgtcacccgcctgtcccactttgagtacgtcaagaatgaggacctggagaagatcggcatgggtcggcctggccagcggcggctgtgggaggctgtgaagaggaggaaggccttgtgcaaacgcaagtcgtggatgagtaaggtgttcagtggaaagcgactggaggctgagttcccacctcatcactctcagagcaccttccggaagacctcgcccgcccctgggggcccagcaggggaggggcccctgcagagcctcacctgcctcattggggagaaggacctgcgcctcctggagaagctgggtgatggttcctttggcgtggtgcgcaggggcgagtgggacgcgccctcagggaagacggtgagtgtggctgtgaagtgcctgaagcccgatgtcctgagccagccagaagccatggacgacttcatccgggaggtcaatgccatgcactcgctcgaccaccgaaacctcatccgcctctacggggtggtgctcacgccgcccatgaagatggtgacagagctggcacctctgggatcgttgttggaccggctacgtaagcaccagggccacttcctcctggggactctgagccgctacgctgtgcaggtggctgagggcatgggctacctggagtccaagcgctttattcaccgtgacctggctgcccgcaatctgctgttggctacccgcgacctggtcaagatcggggactttgggctgatgcgagcactacctcagaatgacgaccattacgtcatgcaggaacatcgcaaggtgcccttcgcctggtgtgcccccgagagcctgaagacacgcaccttctcccatgccagcgacacctggatgttcggggtgacactgtgggaaatgttcacctacggccaggagccctggatcggcctcaacggcagtcagatcctgcataagatcgacaaggagggggagcggctgccccggcccgaggactgtccccaggacatctacaacgtcatggtccagtgctgggctcacaagccagaggacagacccacgtttgtggccctgcgggacttcctgctggaggcccagcccacagacatgcgggcccttcaggactttgaggaaccggacaagctgcacatccagatgaatgatgtcatcaccgtcatcgagggaagggccgagaactactggtggcgtggccagaacacacggacgctgtgtgtggggcccttccctcgcaacgtggtgacctccgtggccggcctgtcggcccaggacatcagccagcccctgcagaacagcttcatccacacagggcatggcgacagtgacccccgccactgctggggcttcccggacaggattgacgaactgtatctgggaaaccccatggacccccccgacctcctgagcgtggaactgagcacctcccggcccccccagcatctaggaggggtgaaaaaaccaacctatgaccctgtgagcgaggaccaagaccccttgtccagcgacttcaagaggctgggcctgcggaagccaggcctgccccgagggctgtggctggcgaagccctcggcgcgggtgccgggcaccaaggccagccgaggcagcggggctgaggtcacgctcatcgacttcggtgaggagcccgtggtcccggccctacggccctgcgcgccctccctggcgcagctggccatggacgcctgctccctgctggacgagaccccgcctcagagccccacgcgggcactgccccggcccctgcaccccacgcctgtggtggactgggacgcacgcccgctgccccccccgcccgcctatgacgacgtggcccaggatgaggatgactttgagatctgctccatcaacagcaccctcgtgggcgcgggggtccctgccgggcccagccagggccagaccaactacgcctttgtgcctgagcaggcgcggccgccccctcccctggaggacaacctgttcctcccgccccagggtgggggcaagccgcccagctccgcacagaccgcagagatcttccaggcgctacagcaggagtgcatgaggcaactgcaggctccggccggctccccggccccctctcccagcccggggggtgacgacaagccccaggtgcctcctcgggtacccatcccccctcggcccacgcgcccacacgtccagctgtctccagcccccccgggcgaggaggagaccagccagtggcctggacctgcttcccctccccgggtgcctccgcgggagcccctgtcccctcaaggctcgaggacacccagccccctggtaccacctggcagctccccgctgccaccccggctctcaagctcacctgggaagaccatgcccaccacccagagctttgcctcagaccccaagtacgccaccccccaggtgatccaggcccctggcccgcgggctggtccctgcatcctgcccatcgtccgggatggcaagaaggtcagcagcacccactattacttgctgcccgagcgaccatcctacctggagcgctaccagcgcttcctgcgtgaggcccagagccccgaggagcctacccccctgcctgtgcctctgctgctgcccccacccagcaccccagcccccgccgcccccacggccaccgtgcggccgatgccccaggctgccttggaccccaaggccaacttctccaccaacaacagcaacccaggggcccggccaccacccccgagggccactgctcggctgccacagaggggctgccctggcgatgggccagaggcgggccggccagcagacaagatccagatgctgcaggccatggtgcatggggtgaccacagaggagtgccaggcggccctgcagtgccacggctggagcgtgcagagggctgcccagtatctgaaggtggagcagctcttcgggctgggtctgcggcccagaggggagtgccacaaagtgctggagatgttcgactggaacctggagcaggccggctgccaccttctgggctcctggggccctgcccaccacaagcgctgagatgcgtctggagagccagagggcctgcctgaaggaatcacctgagcctgtccgtccaccaggagtggggagatgcccccatccagtcctggaggacccgctgctcctgctgctcccggggatggagcaaggccaaggctgcgggaggctgggagccctgccctgcccatccctcctgcaccagcgctgtccctgcacactttggttcagtcccggtgcccctgccaagatgtggaaggggccgggtgaagacaggcttgagggctgccccagcaggctctgggtatgacctgcctctggccctggtcctgggcggggcctgtgggtggagtagtacccccaggccctgccctgggtgacagactgggaggaaaccaggctggacctgggcaggcgggatgtgttggccacagggagaggcggaccggcacccggtgggacctcctaggactgggccttcttccagggggcccctggcagcagctggggtgtcgggcagaatgtgacttgtggccttaccatggacttgaatgggacttggctggcctcaggatcttgtgcctggaaatagcctgaggtggctcaggaagcggagaaagggtgccagaccattctctggcggggaccagggcccaaggccccagggctggaaggagaccaaggggcagccgccctggagggacatcagtgcttcctcttccacccaattcccccacgcggttccatgttttcccaccagcctgttggcgaagttgctgctccggcattcagtacctgcttcttccagagaaataaagttagtttctattttatgttactt

SEQ ID NO: 3474 - protein, 1040 aa, Homo sapiens
MQPEEGTGWLLELLSEVQLQQYFLRLRDDLNVTRLSHFEYVKNEDLEKIGMGRPGQRRLWEAVKRRKALCKRKSWMSKVFSGKRLEAEFPPHHSQSTFRKTSPAPGGPAGEGPLQSLTCLIGEKDLRLLEKLGDGSFGVVRRGEWDAPSGKTVSVAVKCLKPDVLSQPEAMDDFIREVNAMHSLDHRNLIRLYGVVLTPPMKMVTELAPLGSLLDRLRKHQGHFLLGTLSRYAVQVAEGMGYLESKRFIHRDLAARNLLLATRDLVKIGDFGLMRALPQNDDHYVMQEHRKVPFAWCAPESLKTRTFSHASDTWMFGVTLWEMFTYGQEPWIGLNGSQILHKIDKEGERLPRPEDCPQDIYNVMVQCWAHKPEDRPTFVALRDFLLEAQPTDMRALQDFEEPDKLHIQMNDVITVIEGRAENYWWRGQNTRTLCVGPFPRNVVTSVAGLSAQDISQPLQNSFIHTGHGDSDPRHCWGFPDRIDELYLGNPMDPPDLLSVELSTSRPPQHLGGVKKPTYDPVSEDQDPLSSDFKRLGLRKPGLPRGLWLAKPSARVPGTKASRGSGAEVTLIDFGEEPVVPALRPCAPSLAQLAMDACSLLDETPPQSPTRALPRPLHPTPVVDWDARPLPPPPAYDDVAQDEDDFEICSINSTLVGAGVPAGPSQGQTNYAFVPEQARPPPPLEDNLFLPPQGGGKPPSSAQTAEIFQALQQECMRQLQAPAGSPAPSPSPGGDDKPQVPPRVPIPPRPTRPHVQLSPAPPGEEETSQWPGPASPPRVPPREPLSPQGSRTPSPLVPPGSSPLPPRLSSSPGKTMPTTQSFASDPKYATPQVIQAPGPRAGPCILPIVRDGKKVSSTHYYLLPERPSYLERYQRFLREAQSPEEPTPLPVPLLLPPPSTPAPAAPTATVRPMPQAALDPKANFSTNNSNPGARPPPPRATARLPQRGCPGDGPEAGRPADKIQMLQAMVHGVTTEECQAALQCHGWSVQRAAQYLKVEQLFGLGLRPRGECHKVLEMFDWNLEQAGCHLLGSWGPAHHKR

SEQ ID NO: 3475 - DNA, 1444 bp, Homo sapiens
gttgggtggggaagccggggagtagggctggactgtgaccactgccctggagagaagacagaaacaggacagaggatcccggctgcagccagcgtgaggaaagctctgctccctgccagaccggccagctgtggaaacccagcggggcttgcagcagagcggaggggcccaccccgttcttcctcatttcccacccctggtgtgggatttggggggctcctgggcagagtgcgaagctccggagccgaggccactggatccccagtgactgctcgggggggtcccgctgcgtggagatgccggcagcacgtcggttccctggcctggagctctccttccctctcctggccagactgcggcgacgcctgtacacaaggctgggaggcggcagaatgcagccagaggagggcacaggctggctgctggagctgctgtccgaggtgcagctgcaacagtacttcctgcggctccgagatgacctcaacgtcacccgcctgtcccactttgagtacgtcaagaatgaggacctggagaagatcggcatgggtcggcctggccagcggcggctgtgggaggctgtgaagaggaggaaggccttgtgcaaacgcaagtcgtggatgagtaaggtgttcagtggaaagcgactggaggctgagttcccacctcatcactctcagagcaccttccggaagacctcgcccgcccctgggggcccagcaggggaggggcccctgcagagcctcacctgcctcattggggagaaggacctgcgcctcctggagaagctgggtgatggttcctttggcgtggtgcgcaggggcgagtgggacgcgccctcagggaagacggtgagtgtggctgtgaagtgcctgaagcccgatgtcctgagccagccagaagccatggacgacttcatccgggaggtcaatgccatgcactcgctcgaccaccgaaacctcatccgcctctacggggtggtgctcacgccgcccatgaagatggtgacagagctggcacctctgggatcgttgttggaccggctacgtaagcaccagggccacttcctcctggggactctgagccgctacgctgtgcaggtggctgagggcatgggctacctggagtccaagcgctttattcaccgtgacctggctgcccgcaatctgctgttggctacccgcgacctggtcaagatcggggactttgggctgatgcgagcactacctcagaatgacgaccattacgtcatgcaggaacatcgcaaggtgcccttcgcctggtgagaccaaggggcagccgccctggagggacatcagtgcttcctcttccacccaattcccccacgcggttccatgttttcccaccagcctgttggcgaagttgctgctccggcattcagtacctgcttcttccagagaaataaagttagtttctattttatgtt

SEQ ID NO: 3476 - protein, 328 aa, Homo sapiens
MPAARRFPGLELSFPLLARLRRRLYTRLGGGRMQPEEGTGWLLELLSEVQLQQYFLRLRDDLNVTRLSHFEYVKNEDLEKIGMGRPGQRRLWEAVKRRKALCKRKSWMSKVFSGKRLEAEFPPHHSQSTFRKTSPAPGGPAGEGPLQSLTCLIGEKDLRLLEKLGDGSFGVVRRGEWDAPSGKTVSVAVKCLKPDVLSQPEAMDDFIREVNAMHSLDHRNLIRLYGVVLTPPMKMVTELAPLGSLLDRLRKHQGHFLLGTLSRYAVQVAEGMGYLESKRFIHRDLAARNLLLATRDLVKIGDFGLMRALPQNDDHYVMQEHRKVPFAW

SEQ ID NO: 3477 - DNA, 1593 bp, Homo sapiens
tcaaacaggtgttcagtggaaagcgactggaggctgagttcccacctcatcactctcagagcaccttccggaagacctcgcccgcccctgggggcccagcaggggaggggcccctgcagagcctcacctgcctcattggggagaaggacctgcgcctcctggagaagctgggtgatggttcctttggcgtggtgcgcaggggcgagtgggacgcgccctcagggaagacggtgagctccacctcagcctgccttcttcactcagaaaccaacctatgaccctgtgagcgaggaccaagaccccttgtccagcgacttcaagaggctgggcctgcggaagccaggcctgccccgagggctgtggctggcgaagccctcggcgcgggtgccgggcaccaaggccagccgaggcagcggggctgaggtcacgctcatcgacttcggtgaggagcccgtggtcccggccctacggccctgcgcgccctccctggcgcagctggccatggacgcctgctccctgctggacgagaccccgcctcagagccccacgcgggcactgccccggcccctgcaccccacgcctgtggtggactgggacgcacgcccgctgccccccccgcccgcctatgacgacgtggcccaggatgaggatgactttgagatctgctccatcaacagcaccctcgtgggcgcgggggtccctgccgggcccagccagggccagaccaactacgcctttgtgcctgagcaggcgcggccgccccctcccctggaggacaacctgttcctcccgccccagggtgggggcaagccgcccagctccgcacagaccgcagagatcttccaggcgctacagcaggagtgcatgaggcaactgcaggctccggccggctccccggccccctctcccagcccggggggtgacgacaagccccaggtgcctcctcgggtacccatcccccctcggcccacgcgcccacacgtccagctgtctccagcccccccgggcgaggaggagaccagccagtggcctggacctgcttcccctccccgggtgcctccgcgggagcccctgtcccctcaaggctcgaggacacccagccccctggtaccacctggcagctccccgctgccaccccggctctcaagctcacctgggaagaccatgcccaccacccagagctttgcctcagaccccaagtacgccaccccccaggtgatccaggcccctggcccgcgggctggtccctgcatcctgcccatcgtccgggatggcaagaaggtcagcagcacccactattacttgctgcccgagcgaccatcctacctggagcgctaccagcgcttcctgcgtgaggcccagagccccgaggagcctacccccctgcctgtgcctctgctgctgcccccacccagcaccccagcccccgccgcccccacggccaccgtgcggccgatgccccaggctgccttggaccccaaggccaacttctccaccaacaacagcaacccaggggcccggccaccacccccgagggccactgctcggctgccacagaggggctgccctggcgatgggccagaggcgggccgg

SEQ ID NO: 3478 - protein, 363 aa, Homo sapiens
MDACSLLDETPPQSPTRALPRPLHPTPVVDWDARPLPPPPAYDDVAQDEDDFEICSINSTLVGAGVPAGPSQGQTNYAFVPEQARPPPPLEDNLFLPPQGGGKPPSSAQTAEIFQALQQECMRQLQAPAGSPAPSPSPGGDDKPQVPPRVPIPPRPTRPHVQLSPAPPGEEETSQWPGPASPPRVPPREPLSPQGSRTPSPLVPPGSSPLPPRLSSSPGKTMPTTQSFASDPKYATPQVIQAPGPRAGPCILPIVRDGKKVSSTHYYLLPERPSYLERYQRFLREAQSPEEPTPLPVPLLLPPPSTPAPAAPTATVRPMPQAALDPKANFSTNNSNPGARPPPPRATARLPQRGCPGDGPEAG

SEQ ID NO: 3479 - DNA, 6060 bp, Homo sapiens
gggatcctttggcttttcctggaaacactgtcctggtcctttgcccgggttttagggaaggatgagtagtgtcgggatggtggaggcaggagaagagagcagcgtggtttgctgagatttaggggtcttggatctgccactggctcctgataggtccctgggcggtcagtggcctccagatttttgttgtgtcttcagtgaaatgataccggtccccactgcccagctcacctcccggggctgcaggaggcaccggagataatggctgtagagggtcttgtaacctgaacattgcttgcaaacataaggaattctagttactgggaggaagcacagggcagaggccagaagaggccctcagtggaggccgagtcagaccgacgtggccagctttgaccctcatggcctcctttcttctgtcccttgaccttcggctcctccctgtccaccctggcctccgagtctcctccacttttccttccgtctcagccctcagctctaggcgcccctccagagacccagctgtcttcccaggccccttcccagcaaggactagcttcatctgaaccacacacacactcacggttcaacctcagactaaaattatcctctcccctgggcaggatgaagggcagccgactccctggtgagggtggagacagacagcaccaaatggtcaggccagagaaggggccagggctaaaaatggacaaggaggtgtctgtggagggcccctgcggctccatcgatgcgggttagggctggagtctgcggggtggcgggtgcaggaagggagggtggggcaggactgggaggagactccgaccttggctgggcggtgccctccctctccacacagctgggtgtggggccgctcagccacaggctgcatgcctgtcggtctctttctggcaccctccttgaggccagcatcaggctttgggttcatgtttgggggtgtgccctggacggagtgtgggcctccagccaggctgccccactgacagtttggcaaaaccaggacctatctggaagccgaagccggggatcaccaggtggacccagcggggtgggactgagtgactgaccctggggtgttggattccatctggcccccggctgccttcaaacaggtgttcagtggaaagcgactggaggctgagttcccacctcatcactctcagagcaccttccggaagacctcgcccgcccctgggggcccagcaggggaggggcccctgcagagcctcacctgcctcattggggagaaggacctgcgcctcctggagaagctgggtgatggttcctttggcgtggtgcgcaggggcgagtgggacgcgccctcagggaagacggtgagctctctgtgtcctgccagcgcagcagaggcatgggacccggggctggtagtggctcttctgcccccaaccagggtgtggatgggactggggatgcgtcacagtgtggctcatcccagagtccgtgctcaggatttttggggcatgctcaggtttaactaagcacatgagcctcttcctcccactttaggtattttgttggatttagttaagatacaaattctggatacagcttttaaaatcttgttctttcttctcggcgttgcatttaacattttcccctcagggataacgtgtcaccacagcatacagttctggtgtgactgtttcctgtgcagcagccgtgtccttactgctcagatcacgtgcggtgcattcccagcacctcagagggctcctcattctccgtccactcagtgcgtccttctcccggggaagccgctgtcactcagtgcatccttctcccggggaagccgctgtgcagacttccagctccacagctttgtttttggcattacatttacagcattttccttctacagcaaaacaccttttaatattccattttatttccattttataacatttgaatattctctcatcatactggttatctcttactttttggttggtatttaagcccggcattcccccaggaaggggaggtgtggccgacgatggctcctgagggccagccgtctgcccttctccagccaggcctcacgcagagcacgtaagcccaggcactggtgacatgcttacccacccagatgaggagctcacaggcagggatcgttgagccgagttggagggtggagcaggttggctccgcgtgtctgggacctggcaagtcctgagtccttgcaaatcccgctctgggcaggtgagtgtggctgtgaagtgcctgaagcccgatgtcctgagccagccagaagccatggacgacttcatccgggaggtcaatgccatgcactcgctcgaccaccgaaacctcatccgcctctacggggtggtgctcacgccgcccatgaagatggtgacagagctggcacctctgggatcgttgttggaccggctacgtaagcaccagggccacttcctcctggggactctgagccgctacgctgtgcaggtggctgagggcatgggctacctggagtccaagcgctttattcaccgtgacctggctgcccgcaatctgctgttggctacccgcgacctggtcaagatcggggactttgggctgatgcgagcactacctcagaatgacgaccattacgtcatgcaggaacatcgcaaggtgcccttcgcctggtgtgcccccgagagcctgaagacacgcaccttctcccatgccagcgacacctggatgttcggggtgacactgtgggaaatgttcacctacggccaggagccctggatcggcctcaacggcagtcagatcctgcataagatcgacaaggagggggagcggctgccccggcccgaggactgtccccaggacatctacaacgtcatggtccagtgctgggctcacaagccagaggacagacccacgtttgtggccctgcgggacttcctgctggaggcccagcccacagacatgcgggcccttcaggactttgaggaaccggacaagctgcacatccagatgaatgatgtcatcaccgtcatcgagggaagggccgagaactactggtggcgtggccagaacacacggacgctgtgtgtggggcccttccctcgcaacgtggtgacctccgtggccggcctgtcggcccaggacatcagccagcccctgcagaacagcttcatccacacagggcatggcgacagtgacccccgccactgctggggcttcccggacaggattgacgaactgtatctgggaaaccccatggacccccccgacctcctgagcgtggaactgagcacctcccggcccccccagcatctaggaggggtgaaaagtaagagcccctctgctccctggtgtccctaactcatcggctactcaggaaggggcactgtcttcacaggccaccctaaggctgctgttctgtttttggggacagtggggtcagggcagcaggcgggacagctgtgtccctggctccggctgggcgtggggtggaagacaggcagctgtatccgccgaggtgggcctcctcgggctgggtctgcagcaggcccgtccgccccggcgtccctcctccctccttccacggccgagctcagatcctggctttcctcacttccccctaatcctgctctcctgtcccaagccaaaaccaccccacggctccggctctgcctggggcctcctccatctcccggtcctctgcctatcatactggaccgccgtgttcctcatcctgccgcctgcggcctcccgtttgctgggggcttgtacattcactcgcccccattcacttctctcccttcgtctctctacactctgccctctcgtccggccgtctccctcctttgtcctctgtcctgctccgtctctctccccctgtccgcatggcctttcttgcaggggagcctccacctcgcccacctcagcctgccttcttcactcagagtaagtggggctgcttccgatgccttggcccccgcccccgccccctctctctcactcctctcctggaaggtacagagcctgggcggctgggccggaggggaggtgggtgggtgtgtgctgtgagcttccgcggctgccctggcctagcatgcctgccccccctcgagcccgccccccggagcctgggcttctgctcacgagtgtggccctggcttccgcctcggcctcactccctcccagacctgtctgagcttctggagcacgagtgtggccctggcttctgccttggcctcgctgcctcccagacctgcaggcgctgtctgggctttgtggccgttggtcaggagtactgtcctctccaaggatagtccttatagcccctgatggcaggaggcggctccgtgcctgcactaatggtgtgccgtgacaggggcggggatgagggctcactaactcgccagggcgcaggagcagggccgccggggtcttgtgctggtggaggcagcgtcaggcaggagccagtgttgcttgctgcagcttagacggagcgaggcggggctcaccggcccacatggggctgccgggcagagcaggttccgccctcctgatggagtggtcggaggtgcgctgagaacctggccgccggtggctgacctcagacctcggggggagttgggagtggagggttgctgggggacacttggctttctctcccacgtgccacctcccctcgtgtcccagaccctgcctgactgccttcctgttgggctctccctttccatcacagaaccaacctatgaccctgtgagcgaggaccaagaccccttgtccagcgacttcaagaggctgggcctgcggaagccaggcctgccccgagggctgtggctggcgaagccctcggcgcgggtgccgggcaccaaggccagccgaggcagcggggctgaggtcacgctcatcgacttcggtgaggagcccgtggtcccggccctacggccctgcgcgccctccctggcgcagctggccatggacgcctgctccctgctggacgagaccccgcctcagagccccacgcgggcactgccccggcccctgcaccccacgcctgtggtggactgggacgcacgcccgctgccccccccgcccgcctatgacgacgtggcccaggatgaggatgactttgagatctgctccatcaacagcaccctcgtgggcgcgggggtccctgccgggcccagccagggccagaccaactacgcctttgtgcctgagcaggcgcggccgccccctcccctggaggacaacctgttcctcccgccccagggtgggggcaagccgcccagctccgcacagaccgcagagatcttccaggcgctacagcaggagtgcatgaggcaactgcaggctccggccggctccccggccccctctcccagcccggggggtgacgacaagccccaggtgcctcctcgggtacccatcccccctcggcccacgcgcccacacgtccagctgtctccagcccccccgggcgaggaggagaccagccagtggcctggacctgcttcccctccccgggtgcctccgcgggagcccctgtcccctcaaggctcgaggacacccagccccctggtaccacctggcagctccccgctgccaccccggctctcaagctcacctgggaagaccatgcccaccacccagagctttgcctcagaccccaagtacgccaccccccaggtgatccaggcccctggcccgcgggctggtccctgcatcctgcccatcgtccgggatggcaagaaggtcagcagcacccactattacttgctgcccgagcgaccatcctacctggagcgctaccagcgcttcctgcgtgaggcccagagccccgaggagcctacccccctgcctgtgcctctgctgctgcccccacccagcaccccagcccccgccgcccccacggccaccgtgcggccgatgccccaggctgccttggaccccaaggccaacttctccaccaacaacagcaacccaggggcccggccaccacccccgagggccactgctcggctgccacagaggggctgccctggcgatgggccagaggcgggccgg

SEQ ID NO: 3480 - protein, 354 aa, Homo sapiens
MDDFIREVNAMHSLDHRNLIRLYGVVLTPPMKMVTELAPLGSLLDRLRKHQGHFLLGTLSRYAVQVAEGMGYLESKRFIHRDLAARNLLLATRDLVKIGDFGLMRALPQNDDHYVMQEHRKVPFAWCAPESLKTRTFSHASDTWMFGVTLWEMFTYGQEPWIGLNGSQILHKIDKEGERLPRPEDCPQDIYNVMVQCWAHKPEDRPTFVALRDFLLEAQPTDMRALQDFEEPDKLHIQMNDVITVIEGRAENYWWRGQNTRTLCVGPFPRNVVTSVAGLSAQDISQPLQNSFIHTGHGDSDPRHCWGFPDRIDELYLGNPMDPPDLLSVELSTSRPPQHLGGVKSKSPSAPWCP

SEQ ID NO: 3481 - DNA, 4389 bp, Homo sapiens
gttgggtggggaagccggggagtagggctggactgtgaccactgccctggagagaagacagaaacaggacagaggatcccggctgcagccagcgtgaggaaagctctgctccctgccagaccggccagctgtggaaacccagcggggcttgcagcagagcggaggggcccaccccgttcttcctcatttcccacccctggtgtgggatttggggggctcctgggcagagtgcgaagctccggagccgaggccactggatccccagtgactgctcgggggggtcccgctgcgtggagatgccggcagcacgtcggttccctggcctggagctctccttccctctcctggccagactgcggcgacgcctgtacacaaggctgggaggcggcagaatgcagccagaggagggcacaggctggctgctggagctgctgtccgaggtgcagctgcaacagtacttcctgcggctccgagatgacctcaacgtcacccgcctgtcccactttgagtacgtcaagaatgaggacctggagaagatcggcatgggtcggcctggccagcggcggctgtgggaggctgtgaagaggaggaaggccttgtgcaaacgcaagtcgtggatgagtaaggtgttcagtggaaagcgactggaggctgagttcccacctcatcactctcagagcaccttccggaagacctcgcccgcccctgggggcccagcaggggaggggcccctgcagagcctcacctgcctcattggggagaaggacctgcgcctcctggagaagctgggtgatggttcctttggcgtggtgcgcaggggcgagtgggacgcgccctcagggaagacggtgagtgtggctgtgaagtgcctgaagcccgatgtcctgagccagccagaagccatggacgacttcatccgggaggtcaatgccatgcactcgctcgaccaccgaaacctcatccgcctctacggggtggtgctcacgccgcccatgaagatggtgtgcccccgagagcctgaagacacgcaccttctcccatgccagcgacacctggatgttcggggtgacactgtgggaaatgttcacctacggccaggagccctggatcggcctcaacggcagtcagatcctgcataagatcgacaaggagggggagcggctgccccggcccgaggactgtccccaggacatctacaacgtcatggtccagtgctgggctcacaagccagaggacagacccacgtttgtggccctgcgggacttcctgctggaggcccagcccacagacatgcgggcccttcaggactttgaggaaccggacaagctgcacatccagatgaatgatgtcatcaccgtcatcgagggaagggccgagaactactggtggcgtggccagaacacacggacgctgtgtgtggggcccttccctcgcaacgtggtgacctccgtggccggcctgtcggcccaggacatcagccagcccctgcagaacagcttcatccacacagggcatggcgacagtgacccccgccactgctggggcttcccggacaggattgacgaactgtatctgggaaaccccatggacccccccgacctcctgagcgtggaactgagcacctcccggcccccccagcatctaggaggggtgaaaagtaagagcccctctgctccctggtgtccctaactcatcggctactcaggaaggggcactgtcttcacaggccaccctaaggctgctgttctgtttttggggacagtggggtcagggcagcaggcgggacagctgtgtccctggctccggctgggcgtggggtggaagacaggcagctgtatccgccgaggtgggcctcctcgggctgggtctgcagcaggcccgtccgccccggcgtccctcctccctccttccacggccgagctcagatcctggctttcctcacttccccctaatcctgctctcctgtcccaagccaaaaccaccccacggctccggctctgcctggggcctcctccatctcccggtcctctgcctatcatactggaccgccgtgttcctcatcctgccgcctgcggcctcccgtttgctgggggcttgtacattcactcgcccccattcacttctctcccttcgtctctctacactctgccctctcgtccggccgtctccctcctttgtcctctgtcctgctccgtctctctccccctgtccgcatggcctttcttgcaggggagcctccacctcgcccacctcagcctgccttcttcactcagagtaagtggggctgcttccgatgccttggcccccgcccccgccccctctctctcactcctctcctggaaggtacagagcctgggcggctgggccggaggggaggtgggtgggtgtgtgctgtgagcttccgcggctgccctggcctagcatgcctgccccccctcgagcccgccccccggagcctgggcttctgctcacgagtgtggccctggcttccgcctcggcctcactccctcccagacctgtctgagcttctggagcacgagtgtggccctggcttctgccttggcctcgctgcctcccagacctgcaggcgctgtctgggctttgtggccgttggtcaggagtactgtcctctccaaggatagtccttatagcccctgatggcaggaggcggctccgtgcctgcactaatggtgtgccgtgacaggggcggggatgagggctcactaactcgccagggcgcaggagcagggccgccggggtcttgtgctggtggaggcagcgtcaggcaggagccagtgttgcttgctgcagcttagacggagcgaggcggggctcaccggcccacatggggctgccgggcagagcaggttccgccctcctgatggagtggtcggaggtgcgctgagaacctggccgccggtggctgacctcagacctcggggggagttgggagtggagggttgctgggggacacttggctttctctcccacgtgccacctcccctcgtgtcccagaccctgcctgactgccttcctgttgggctctccctttccatcacagaaccaacctatgaccctgtgagcgaggaccaagaccccttgtccagcgacttcaagaggctgggcctgcggaagccaggcctgccccgagggctgtggctggcgaagccctcggcgcgggtgccgggcaccaaggccagccgaggcagcggggctgaggtcacgctcatcgacttcggtgaggagcccgtggtcccggccctacggccctgcgcgccctccctggcgcagctggccatggacgcctgctccctgctggacgagaccccgcctcagagccccacgcgggcactgccccggcccctgcaccccacgcctgtggtggactgggacgcacgcccgctgccccccccgcccgcctatgacgacgtggcccaggatgaggatgactttgagatctgctccatcaacagcaccctcgtgggcgcgggggtccctgccgggcccagccagggccagaccaactacgcctttgtgcctgagcaggcgcggccgccccctcccctggaggacaacctgttcctcccgccccagggtgggggcaagccgcccagctccgcacagaccgcagagatcttccaggcgctacagcaggagtgcatgaggcaactgcaggctccggccggctccccggccccctctcccagcccggggggtgacgacaagccccaggtgcctcctcgggtacccatcccccctcggcccacgcgcccacacgtccagctgtctccagcccccccgggcgaggaggagaccagccagtggcctggacctgcttcccctccccgggtgcctccgcgggagcccctgtcccctcaaggctcgaggacacccagccccctggtaccacctggcagctccccgctgccaccccggctctcaagctcacctgggaagaccatgcccaccacccagagctttgcctcagaccccaagtacgccaccccccaggtgatccaggcccctggcccgcgggctggtccctgcatcctgcccatcgtccgggatggcaagaaggtcagcagcacccactattacttgctgcccgagcgaccatcctacctggagcgctaccagcgcttcctgcgtgaggcccagagccccgaggagcctacccccctgcctgtgcctctgctgctgcccccacccagcaccccagcccccgccgcccccacggccaccgtgcggccgatgccccaggctgccttggaccccaaggccaacttctccaccaacaacagcaacccaggggcccggccaccacccccgagggccactgctcggctgccacagaggggctgccctggcgatgggccagaggcgggccgg

SEQ ID NO: 3482 - protein, 280 aa, Homo sapiens
MPAARRFPGLELSFPLLARLRRRLYTRLGGGRMQPEEGTGWLLELLSEVQLQQYFLRLRDDLNVTRLSHFEYVKNEDLEKIGMGRPGQRRLWEAVKRRKALCKRKSWMSKVFSGKRLEAEFPPHHSQSTFRKTSPAPGGPAGEGPLQSLTCLIGEKDLRLLEKLGDGSFGVVRRGEWDAPSGKTVSVAVKCLKPDVLSQPEAMDDFIREVNAMHSLDHRNLIRLYGVVLTPPMKMVCPREPEDTHLLPCQRHLDVRGDTVGNVHLRPGALDRPQRQSDPA

SEQ ID NO: 3483 - DNA, 3146 bp, Homo sapiens
cgcggagccggctgagcgcagggccgagctgcggggcagaggctgggaggcggcagaatgcagccagaggagggcacaggctggctgctggagctgctgtccgaggtgcagctgcaacagtacttcctgcggctccgagatgacctcaacgtcacccgcctgtcccactttgagtacgtcaagaatgaggacctggagaagatcggcatgggtcggcctggccagcggcggctgtgggaggctgtgaagaggaggaaggccttgtgcaaacgcaagtcgtggatgagtaaggtgttcagtggaaagcgactggaggctgagttcccacctcatcactctcagagcaccttccggaagacctcgcccgcccctgggggcccagcaggggaggggcccctgcagagcctcacctgcctcattggggagaaggacctgcgcctcctggagaagctgggtgatggttcctttggcgtggtgcgcaggggcgagtgggacgcgccctcagggaagacggtgagtgtggctgtgaagtgcctgaagcccgatgtcctgagccagccagaagccatggacgacttcatccgggaggtcaatgccatgcactcgctcgaccaccgaaacctcatccgcctctacggggtggtgctcacgccgcccatgaagatggtgacagagctggcacctctgggatcgttgttggaccggctacgtaagcaccagggccacttcctcctggggactctgagccgctacgctgtgcaggtggctgagggcatgggctacctggagtccaagcgctttattcaccgtgacctggctgcccgcaatctgctgttggctacccgcgacctggtcaagatcggggactttgggctgatgcgagcactacctcagaatgacgaccattacgtcatgcaggaacatcgcaaggtgcccttcgcctggtgtgcccccgagagcctgaagacacgcaccttctcccatgccagcgacacctggatgttcggggtgacactgtgggaaatgttcacctacggccaggagccctggatcggcctcaacggcagtcagatcctgcataagatcgacaaggagggggagcggctgccccggcccgaggactgtccccaggacatctacaacgtcatggtccagtgctgggctcacaagccagaggacagacccacgtttgtggccctgcgggacttcctgctggaggcccagcccacagacatgcgggcccttcaggactttgaggaaccggacaagctgcacatccagatgaatgatgtcatcaccgtcatcgagggaagggccgagaactactggtggcgtggccagaacacacggacgctgtgtgtggggcccttccctcgcaacgtggtgacctccgtggccggcctgtcggcccaggacatcagccagcccctgcagaacagcttcatccacacagggcatggcgacagtgacccccgccactgctggggcttcccggacaggattgacgagacaccccccagctgagacgtgcggtcaggttctgtggactgggaggcgggaggcctgtgcttcagacccaagactacacccggtttcctccaggacgaaggggctctgatgagattctgccacccctccacacgcttcccctgctctcttgacccagctctctcccccacagactgtatctgggaaaccccatggacccccccgacctcctgagcgtggaactgagcacctcccggcccccccagcatctaggaggggtgaaaagggagcctccacctcgcccacctcagcctgccttcttcactcagaaaccaacctatgaccctgtgagcgaggaccaagaccccttgtccagcgacttcaagaggctgggcctgcggaagccaggcctgccccgagggctgtggctggcgaagccctcggcgcgggtgccgggcaccaaggccagccgaggcagcggggctgaggtcacgctcatcgacttcggtgaggagcccgtggtcccggccctacggccctgcgcgccctccctggcgcagctggccatggacgcctgctccctgctggacgagaccccgcctcagagccccacgcgggcactgccccggcccctgcaccccacgcctgtggtggactgggacgcacgcccgctgccccccccgcccgcctatgacgacgtggcccaggatgaggatgactttgagatctgctccatcaacagcaccctcgtgggcgcgggggtccctgccgggcccagccagggccagaccaactacgcctttgtgcctgagcaggcgcggccgccccctcccctggaggacaacctgttcctcccgccccagggtgggggcaagccgcccagctccgcacagaccgcagagatcttccaggcgctacagcaggagtgcatgaggcaactgcaggctccggccggctccccggccccctctcccagcccggggggtgacgacaagccccaggtgcctcctcgggtacccatcccccctcggcccacgcgcccacacgtccagctgtctccagcccccccgggcgaggaggagaccagccagtggcctggacctgcttcccctccccgggtgcctccgcgggagcccctgtcccctcaaggctcgaggacacccagccccctggtaccacctggcagctccccgctgccaccccggctctcaagctcacctgggaagaccatgcccaccacccagagctttgcctcagaccccaagtacgccaccccccaggtgatccaggcccctggcccgcgggctggtccctgcatcctgcccatcgtccgggatggcaagaaggtcagcagcacccactattacttgctgcccgagcgaccatcctacctggagcgctaccagcgcttcctgcgtgaggcccagagccccgaggagcctacccccctgcctgtgcctctgctgctgcccccacccagcaccccagcccccgccgcccccacggccaccgtgcggccgatgccccaggctgccttggaccccaaggccaacttctccaccaacaacagcaacccaggggcccggccaccacccccgagggccactgctcggctgccacagaggggctgccctggcgatgggccagaggcgggccgg

SEQ ID NO: 3484 - protein, 488 aa, Homo sapiens [sequence omitted]

SEQ ID NO: 3485 - DNA, 416 bp, Homo sapiens
cccttggagaggacacaggatctatccctgaaacacgacccccaacaatgccccttggagaggacacagcatctatccccgtatcaccccacccagcaaagccccttggagagtcccacagcatgtatccctgtgatttccagcacccagaccctggcacgtgggcccccagaagctttgaggcctgggtctgcagggactctgtgagctggcagcacctgcccctcaccaggcgaagggcaccttgcgatgttcctgcatgacgtaatggtcgtcattctgaggtagtgctcgcatcagcccaaagtccccgatcttgaccaggtcgcgggtagccaacagcagattgcgggcagccaggtcacggtgaataaagcgcttggactccaggtagcccatgccctcagccacctgca

SEQ ID NO: 3486 - protein, 71 aa, Homo sapiens
MPLGEDTASIPVSPHPAKPLGESHSMYPCDFQHPDPGTWAPRSFEAWVCRDSVSWQHLPLTRRRAPCDVPA

SEQ ID NO: 3487 - DNA, 2268 bp, Homo sapiens
cgcccactaatcatccttggctctgggccctcagggtaaatcagctgtgacaggacggcgtggcagaagcgggccaggctcgtgccgtacccaagccactagctgtcacactcatctcagctcacgtgaccaacagggttacaagataaggttctgttaatcccacgctgccctcttcccttctgtgggacgtgttttgaggacttgtgtgttgactgcaccatgcagagcatatagcatggaggcacccctactgccatcggggggcaggtggaggggggaccgtcctgcagctcctccctggggctacccctctcttccctctgcacagacctggcagccacccagacgtcccgcctgctgcctagactctaagaagatgccctatcactccaattaccatacacagtactggcgggggagaggtcctgccttgccgctgaaaactgcactgcttcctccctccagggatgaaaggccaaaagaacgagggcagtgtggagtctacgctctcgccagggacctgcagcctctcacttccaagcacaccaactccagctaacaggactgggcttccttacctgccgccttccgctgcctccccgcagacacagcttcagcgacgcccaggctgagacggcagaagaggttcccgccggccgcggcctgccctcaggcagtggctcccagagctcagcggttccccgcactcttctgcgcccgactccccatgcccctacatcctgcgtccccttcagccccggaggtaccgtggggcccgggcctgccagtcaccacctcctcctccgccggcgcctccgggtcctgagcccctcgccgggtccctctccctcctggggctccttcccgttcagcctccggggccctaccccgctctccccgactcccccgggcccggcctgcgccttcctgcggtgccgaggagcggtggcgccctgggtgaagaagtcccgccgagtcgaggggcgcaatggaggagcgccggaacaggtctctcattccgagtagctaccgttgcactgtgcgagtgtaaaagtcacttccacccggtctcagttgttccaacctcagttgaagtgaggaggttggactggaaggtttctggggtcactccagtgaggctggggttctagtcccaatctcaccgtggcaccccaaaggcccagaaacccggaccatcacctctctttccccggggccaacggagcactcctgaaggagggagggtttgtctcaggcctgacgattcctgatgaggacttgggcagaaacagccccaggcaagcggaccttcattcctgcacttgagccgtctcctccctgcccccaccccagaaggagaaaacccagcgctcggattcccagcggcggggcagcctgcaggccctgttcccagcccacagacccatgtcccagcccaaacggaggcagccctgggcagcgggcgcgtggagcccaagggctcagggccactcagcccttgttactgtccctcatctagaaaatggatgtaataacaaaacagttcacggtaggtggcaagatcagacacatcggaaactgtgtagggctggctctttctgcgctcacactgtccagcaatgggccccagggacttggccagagcgcagtagggcaatgagaaaggggtggcttctggaaacctacacgaggcccagtctgggtggatttgggtggcggtcccttgcctgcgaggtgggcagggcaactttctactaaattatctaacactgccagtaatggcagcccttccccagggagccaggaggctgggccaggaccacccccctgtcgcctggcttcaggaaagaaagtggggaagacaacagatttgggagaaggaaactgaggaggttttctcccagtctccctcacgctgcctcagtcatggccattgctaagactcacagagcccaactgtgcaaggccctgcacttcgcattcttctcatccaaccccatgacaacccaaggagacacataatatccccattttacacgtggcagaactgaggttctacatggccaagtgacttgttcagtgccatacagctggtagtagtgaagccaggattcaaatccagctttccgactctaaagtctaaggcacagaccgagtgtggtgactcatgcctgtaatcacagcactttggaggctgaggagggcaaatcatttgagctcccaagttcaggaccagcctgggcaacacggcaaaaccctgtctct

SEQ ID NO: 3488 - protein, 110 aa, Homo sapiens
MSQPKRRQPWAAGAWSPRAQGHSALVTVPHLENGCNNKTVHGRWQDQTHRKLCRAGSFCAHTVQQWAPGTWPERSRAMRKGWLLETYTRPSLGGFGWRSLACEVGRATFY

SEQ ID NO: 3489 - DNA, 498 bp, Homo sapiens
agcagaatgactcggcaaggagaagggcttgtcgggtctagctgggagtggaggtgggccaggctgccagagggaggctttgggtggtgcccttaagagtctccttcatgagctgttttgcactgtgaggtcacagtcaaaacacggagagccatggctacaacttgagcaagtcaaacacgctgtgattcaggccagggagatgagcgtgggtaaagaacactgtacgaactagctcagggcttctggaactgtgtgcggctgaatcaccggggcatcttggtgaactgtaaattctgattcagcaaactgggaggagggcgctgagatccagcatttccatcaagcttcccatggaccacactctgactatcagggccttcgatgcagacagtctcgatacagctgcacacaagaatcacacagaaagttttaaaaatgccaatgccaggccaggcacagtggctcacgcttgtaatcccagcacttcgggaggcc

SEQ ID NO: 3490 - protein, 47 aa, Homo sapiens
MDHTLTIRAFDADSLDTAAHKNHTESFKNANARPGTVAHACNPSTSG

SEQ ID NO: 3491 - DNA, 204 bp, Homo sapiens
ctgggagtggaggtgggccaggctgccagagggaggctttgggtggtgcccttaagagtctccttcatgagctgttttgcactgtgaggtaatacacccagcacccagatcaagaaatggaacataaccagcaccccagaaccctaccctaaaaatgtaatttaaaaaaaaagattttaataaatatcttttagcgtgcccttt

SEQ ID NO: 3492 - DNA, 2297 bp, Homo sapiens
gcgcatgcgctgagctggcgggcccgagtgttgtcggctgggaaatggcggccgcgggcttggtcgctgtggcagcggctgccgagtactctggcacggtagcgtcgggaggtaacctccctggtgttcactgcggcccaagctccggggcaggccctggttttggcccgggctcgtggagccgctctctcgatcgagccctggaggaggcggcggtcactggggtgctgagcctgagcggccggaaactgagggagtttccccggggagcggccaaccacgacctgacggacaccacccgggcggacctgtcgcgaaatcgcctttcagaaattcctatagaagcatgtcactttgtttctctggaaaatctcaacttgtaccaaaattgtattcgttatattccagaggcaattttaaacctacaagctctaacattcttaaatattagtcggaaccaactgtcaacattgccggtacacttgtgtaatttgccattgaaagtcttaattgctagtaataacaaattggtgtcacttccagaagaaattggacaccttagacatttgatggaacttgatgtgagctgcaatgaaattcaaactataccttcccaaattggtaacctggaggccttgagagaccttaatgtaagaagaaatcacctagtacatttgcctgaagagctggcggagttgcctttgatacggttagacttctcatgcaataaaattaccacaatccctgtttgttatcggaacctcaggcacctacagacgatcaccctagataacaatccactacaatcacctcctgcacagatatgtataaaaggcaaagtccacatatttaaatacctgaacatacaagcttgtaagattgctccagatctgccggattatgataggagaccgttgggttttggctcctgccatgaagaactgtactcaagtcgcccttatggagcccttgattcaggcttcaatagtgtggacagtggtgataagagatggtcagggaatgaacctacagatgaattttcagatctgcctcttcgagtagcagagattactaaagaacaaagactacgaagagaaagccagtaccaagagaaccgcggcagtttggtagtaacaaacggcggagtggaacatgatctggatcagattgactacatagacagctgcaccgcagaggaagaggaggccgaggtgagacagcccaagggaccagacccagacagccttagttcacagtttatggcgtatattgaacagcggcgaatctctcatgagggttcaccagtaaagccagtagccattagggagtttcaaaaaacagaagatatgagaagatatttacatcaaaacagggttccagctgagccatcttccctcctgtcactatcagcaagtcacaatcagctgtcacacacagacctggaacttcatcagagaagggagcagttagtagagcgcactcggagagaggctcagcttgctgccctgcagtatgaggaggagaaaataaggaccaagcagatccagagagatgctgtcctggactttgtcaaacaaaaagcatcacaaagtccacaaaaacagcacccgctcctagatggcgtagatggtgagtgccccttcccatccagaaggtctcagcacactgatgatagtgccttgtgcatgtcgctgtcagggttgaatcaagtgggctgtgctgctaccctgcctcattcttctgccttcacgcctcttaagagtgatgacagacctaatgctctattaagttcacctgcaacagaaacagttcatcattcccctgcatattcttttcctgctgctatccagagaaatcagcctcagcgccctgaaagcttccttttccgagcaggtgtcagggcagaaaccaacaaaggtcatgcttcaccccttcctccatctgctgcacctaccactgattctacagattccataacaggacagaattcaagacagagagaagaagagctggaattaatagaccaactgcgtaaacatattgagtaccggttgaaagtgtctctaccttgtgatctcggagcagctctaactgacggtgttgttctttgccatttggccaatcatgtgcgacctcgatctgtcccaagcattcatgttccctcaccagctgtagtaagttgataatcctaaaaagccttggctattcatcagacatttgttaagcacagtggacagacatttcttaagcattgtgctagatattaaggatacagatataaagagtccagtctctac

SEQ ID NO: 3493 - protein, 712 aa, Homo sapiens; identical to SEQ ID NO: 397

SEQ ID NO: 3494 - DNA, 7344 bp, Homo sapiens
aatgttttagacttccagaaatgttgaaaaaatagcctagagttccttttgtatacttcagtcaatttcttctaatgttaactaacgtctaatacaaacataggacagtaattcaaactaagtaacatgagaacaatacgattaactgaattacaggctttatttggatttcatcagtttttccatgaagctctggttctttggagtctggcatgcaacaggccatttctaagctgttgtcctgctatgaggatttattgcctccagctcagttataactttattgccctttaatattacaaatagttaaatttatttatagatgcgattaagggaaatgaacttgatacagtcttatccaataacccctttaaaaagcaattatattaaaccaactaagtattatactattaaggaatattatgtggtataaagacaaatttaaagaaataaatgacttggtgccatgtgatactttttcattaaccacgaccattacaagtcttgttaacatattttgtctatagcctgcaaggaggaaaacatgattcttctctatcaccttctaattaggtatcagtaactcaggggtggccctggggctcatcaacagctccaccattgctctcagagtttggttcctgttcctgtagcttccatgacagtgattctctttacccaactcaccgcacccatggcagtgattctctttacccaactcaccgcacccatgacagtgattctctttacccaactcaccgcacccatggcagtgattctctttacccaactcaccgcacccatggcagtgattctctttacccaactcaccgcacccatggcagtgattctctttacccaactcaccgcacccatggcagtgattctctttacccaactcaccgcacccatggcagtgattctctttacccaactcaccgcacccatggcagtgattctctttacccaactcaccgcacccatggcagtgattctctttacccaactcaccgcacccatggcagtgattctctttacccagttcaccgcacccatggcagtgattctctttacccaactcaccgcacccatggcagtgattctctttacccaactcaccgcacccatggcagtgattctctttacccagttcaccgcacccatggcagtgattctctttacccaactcaccgcacccatggcagtgattctctttacccaactcaccgcacccatggcagtgattctctttacccagttcaccgcacccatggcagtgattctctttacccaactcaccgcacccatggcagtgattctctttacccaactcaccgcacccatggcagtgattctctttacccaactcaccgcacccatggcagtgattctctttacccaactcaccgcacccatgacagtgattctctttacccagttcaccgcacctctttctaactagccaggagttgactaggccacagcatcacatgttacaaagtgaaagagagagcgcccagctccacagatcatctgtgtcagccagcaggattcccaggattgtttttctcttatgaaagtagatcatcattctattatttattttttacttttttcttttgctgttttttttttaactgaattatacaagaatggaaatttacataaagtggtagttagcaaacacctttttgattcctatggacaaattgaaagcaaaattttcgtttttatattatgttgttttataaagggtcatcttttagaacagacctttttaaatattttgagagcactgaatatggtttctgaagaaataacatacattcttttaaacaagtttattctaatagtgcacattagcctccagttcttcccttctgcttcctaaagaggttcttgctacacaaacatccagtgtctgctctagttccctgccacagtgtctttaaacaaagagagtatggcatgggttggtgcagagaatgggaaatgcaaaatagacaggagagtgctgaaaatggccccactcaagcaagtcatgttgacttaccagatgtcaaaacctgttgaaaggtctaagcctgtccgcggggctttcggaagcatcctctgagggtctctgagatttaaagtccgtaccttggaattatttcaggatgttcccaccatcagccaacaaagtacaaaacagtgtgccttaaaatacacatttaagttggtatttgcatgcagtggttgaccatgtttgttatgggccagcctgcccctgttcctaccagagctgtgctgttggaaggcaagtacgaagaaaaaaaaaatacagttttaaaagactgggtctttttccagagtggttaggctgaggttttgatgcatcctccctccttctccgtcaccagaaagaggaaatggacgttcccataggctgccccttccttctccccttccacctcccacccacgtccccaccacaaccactgccagttttacacggcttcctagcaagctgctacttctgctgaaaaattagtcatctgtctagaacaaagtgaaagaaaatgaataaacgcacaaactcgtaggttcaaactagccttctgaggtccctctgccagaggaagagaagaaacttctacctcctcgtcttcctttttctcctggtctccaggtcattctggcctttacttaaacatccccactttgctctgtgtgacttgaacattgggaatgtaataatgaccacttttgaaaatgtaaaacagaaaacaatattacaaatatttttgtcagattctatacccaggtaagatagataaagacaaataatttcccttctctgtgtaacttttaaagtgttgtacaagttaaagtatgagtgaaatactgaagaacaaggcagttattaaaaacctctgatgacattgggcatgtgggtatttgctttatttttatgcttctattcaatatgctacattcaaaaaaactgtaatgggtgattaaaaacttgtatctgagtccagtatcttttgtcccagagtcgttatgttatgtgttaaaggatgtctgtctccctgttgtcaagtccattcttgtatttatttaatgaattttgcaatctgtaaaatggagggtttggatgatctctgaggcccttaacagctctgccttcattttgaacacattctcgagctggacttggttaaaatagacacccccgcgcccggcctgtgtattgtattcttaatgttcagaccagtcaccaacaaacgaattttattctgctatttagtagtaagatcaggctcagcatggagaagattctttgtagtttgggttttcagcgttttatttttgttcctcaatgtaaaaatgttacaggatgtgtatatgtgaatatgactgagatgatcatatgaattctatactcaaatctgcatttctgatccactgactttgtttttctgttttcctttcctgcttacactttggacaggacaatctttgttccccttccgacatccttcagctaaacctcagcgttaaaagaactgttgaaacgctcctttctcttggggcacactcagaagaatccagttttgtctgtctctctctgcagcttctgggttttgtggcattttactgtactgtgatgttaactctctgtgtgctttattactggctcttccccgctcgctgaaagattgcactccggtgactttctgcctcattcctgtgcttggtaaaggaggtttgtttctcatccagaattatttacataagtgctttttctccctgctggccctcaaagagctaacccataaaggaggtaaatcctttctttatatttgcagatgagcaccccctcacattagtaaacatttacgattgctaacaaagagtaaaagaccagcattttttctcctggtcatccgtccattctcctggcctgtggccttgtttctcttaccataaatgctgaagcatttttactaatacaattctgaacttgtacttcgaatatgacatgtagagctttatttccaagtcacacaatacaactcccatctggccatttttccgtgcctcagcacaagtgttgaattgtggagtgactgaacctttgcagcagctgctcacgaggagaaccgtcgtgccttttctggttttggccgcacccggttacttagatttctgctttgaactgtgtcctgagatcctgaatccccgctttgtcggtaggcacaggtccatataagcatttgcggtctggacgtttcaaaggtattggccataattttaataattttagtttggtcagaatgttcagtttgaagatcacccacattccctagactgctcttctgagcccagtctatacgctgtatgtgctgcacacgagcagatgggctggagctggcctctcagggtgggcaccttccagattgtgtttgttatgtgtgactgaggttcactcccagcattctgtttaaatttggaatttatgtgatttctaacatattcaaaccttcttaatagtgaaacagtagcaggagaagtattagggcagcagtccctgttctgtgctcaaggcagtgaatattgtctagctctttcagaatgcgtagcacttagctgctagacgttaatgctggaaactataattgcggttagattctagtttcataagtggtgtttctgaatattcaggaaccttctgaactctgttaacaaaattgggataaaggatgaactcaagtgtgaagagagattgtgaggagcataatatccggtttagaattcagcctgagggaggagcataacatctgggtgtagaattcagcctgaggggctcactggtttggttttcttccatatgaaatgggacagctattttcacaggtcaaaagactgttcactattaatgctgaaacactcaacactgtgatgatgaaaacttcagttttctgtgtcagtaggtgcctttcagactttggggaattgggttggttatatttttaagatgtctcagagttgaaacacctgttaaaaaacacacacaggctctcatgtggtttaggggttgtaattgtacattctcttgagaacacacggcactccctctagtccagctgggaggtgagggtgccccagaaagcacaggcttctgagtgtgaacaccggccgcgcaggtcctagggcgctgctgagaggaagagaccagggaatcagccttggagaaagcacgtctcttccgacagcaaaacactgggcaggttcattttaagtatcatttatctagacttgcagttgcactcaaagtatttctacaaagttgctagtttttttagatcaaaagattacagttacctcattttatcaaaataagtattaaataaaaagtaagcacaagtaccaataactgcctcaaaaatacttgttatatattttattgtaactggttttataaaatttcctagtaatatcgtctcaatgaaaagcaaaacaaaaaacaaaaaacaaaaaaacccaactagttgttttaacaaacatatataatctttttttagtggcaccagaattctatattctgttctttgtaagagcaatctcttttctttttggaatatttaatcttaacagaaagctagtgataaatgctgttcttaagatttgcctttttctctcacaagaaagggttaacctaacaaattaacgatgcacacattaaggaagcgtttaacttcctcaagcaaacagtgtcaacacttctcacatgttggtaatcaacatgttcctgcctaagcttacatagtagttccctggaataattcaggctgttaaataccaggatattaaatcctttacattttcaaatactgcttttaattctgtaattcagatttttaattcagacaggcccttccatgaattattcaaattagggggaagtttctcaagagctcaggatacactgagtttcttgccctatctggtctggaaaccctggttttcacagtcaggattataatgcagatagcgtagaactcatgcaggctgagttatgttttcaaactatctttcattcttgtggtagggaacttaccctcaagtgtagtatcttttactcttgagccatctggtagcgtggaattgtttttctatttttcacctgcctattttatagacctgtattgaccttttattcatcagggataaaggatgttgctttcaccctgcggtattgttttccctctgttgtatgtatagatatatgctacttgtcaattttccaattttgaaaatgatctgtatgtacttttagttgtattaataaagtgacagtgagtgtcagacaccatctctctaactcatatttacactgaggtcagtttcccaggtactaattttcatatctaagttgatgattgtgaaggggagaagtgcttattttttcctttcagttctatgatattcatccgattttcttttttgtttgttttcatgttacgttgtccctttcaggagcaattatgtttgcctctccacattttagaagagaaaggtttgagccaggttgcagtgacggtccaggctctcctggaacttgccccacccaagcaacagcagcaccagttatctgctgtttgaggatccccaggacggtgggcactggcctggccaaaacaaggaacaggacaccgtgattgctgctgccagctgtctgcttaaacaaagctcttgtgtgttctcagaagggaccgttcccatgattcctaacaggaatattttgcttcatttctccattttaggggaggttatttccatttccattgaatttttttacgaagacaccattggttttctcagatgaaacttctcttactgaaaacccagcacctaacttggctgtgttttcctggagagcaggcgtgtttcacgtgccagaaagcacatcttctgtgttaggcacaagcatgctgtgccattgtttttacctggtctcaagacaactggtctgctggtttctaaacttggttgttcattagactctcctggagtatttgttaaaatacagattcacattcagtagagctggggtaaggcctaggaatctgcattttcaacaaccattgcacatgtttttgtttttgttggagaaggagttctgctcagtcgcccaggctagagtgcagtggcataatctcagctcactgcaacctccgcctcccgggctcaagcgattctcctgcctcagcctcccgagtagctgggacaacaggtgcccgccaccatgcctggctaattttcttgtatttttagtagagatgggattttgtcatg

SEQ ID NO: 3495 - protein, 267 aa, Homo sapiens [sequence omitted]

SEQ ID NO: 3496 - DNA, 4092 bp, Homo sapiens
tatgtttgcctctccacattttagaagagaaaggtttgagccaggttgcagtgacggtccaggctctcctggaacttgccccacccaagcaacagcagcaccagttatctgctgtttgaggatccccaggacggtgggcactggcctggccaaaacaaggaacaggacaccgtgattgctgctgccagctgtctgcttaaacaaagctcttgtgtgttctcagaagggaccgttcccatgattcctaacaggaatattttgcttcatttctccattttaggggaggttatttccatttccattgaatttttttacgaagacaccattggttttctcagatgaaacttctcttactgaaaacccagcacctaacttggctgtgttttcctggagagcaggcgtgtttcacgtgccagaaagcacatcttctgtgttaggcacaagcatgctgtgccattgtttttacctggtctcaagacaactggtctgctggtttctaaacttggttgttcattagactctcctggagtatttgttaaaatacagattcacattcagtagagctggggtaaggcctaggaatctgcattttcaacaaccattgcacatgtttttgtttttgctgaggcaggagaattgcttgaacccaggaggcggaggttgtggtgagccaagatcgtgccattgcaccccagcctgggcaacaaaagcgaaattccatctcaaaaaaagaaaacgcgccccatctcgctccaccacaagcgcctttatatactcaatgatgggtggaggaaaagggcccaagggctcacaccgcacaggagcctttactcaagtttcagctagttttccttcccctgcattttgaactccttttagttgttggtgatatcctttggtgttcactgcctttgtaaaacaagtaaataaagtaagcggaagatatctcttttgtttctgtagttgttaactgttctggattttctttacaatgcatccatttgggcataatgttatccctctttttatcaggtaaatgtagcatctaaaagtagctttggatcaaatcatgttgaatacctggtcaaagtaatgttttcttccttgttcttgcagagaaacaaattcatcagaacattaccacttgaccaggtttaaaattgtataacaggctgggcatggtggctcatgcctataatcccagcactttgggaggccgaggcaagaggatcacttgagcccaggagtttgagagcagcctgggcaacatagcaagaccctgtctcccaaaaattaaaaaaaaaaaaaaaaaaccaggtgtggtggcacctgcctgtactcccagctactcaggaggctggggtgggaggatcacttgagcctgggaggttgaggctacagtgagccatggctgcaccactgcactccagcctgggcaacagagtgagaccccatctctaaaaataaattgtacaacatctaacttcaatgcccaatcttatagaacaaaagtaaaatgtctttatgtaagaccccattatatttacagttcccaacagacccaccaactcttatatacccttatataacttgtttagaatttagccatgtgcatttttaaactgtgtttgtcaacattaagcctcagtacagtctccaaattatatgccaccagaaatgaaattcagcaaaggacaggattgtttttaacatacgcaagccagcctggccaacatggtgaaaccttgtctctactaaaaatacaaaaattagctgggcgtggtggtgggcacctgtaatcccagctacttgggtggctgaggcacaagaatcgcttcaacctggaagccgaaggttgcagtgggctgagattgtgccactgcactccagcctgggcaacagagcgagactctgtctcaaaaaaaaaaaaaaaaaaaaacccaccaaaccaaaaatatactatgcaaggaataattctagaagacattacataatgcaatacttgcaacatttgcaactaattttcccatagggataaatggaaatttcaacttatttcaaattttgcacatattatgaaaccttattaatgtatttttatcaaactaaatcagatttgtatttgaattgttaggaaaaaccatgtgcagttttggctgataattgaaggaaaaatatcaaatgctttgaattttttttctcttttttcaaaccctctgcagaggtaggaaggtatgaatttcttttttatgtcaagatgcaaaaacaaatcatgatgcttttgttgggagaatttttgtattcagtattttgtatgtacctttttttttttaaattggaaagcacaattcggtttaacatttagctttgcttgactccagtgtaagatgaagatgaccttgtcacagctcccctgacctgaagcagagcccttcccatcactgacagtgttgggggttgagagccccccagcagagcccttcccatcactgacagtgtgtcggcagctgagagctcccccagcagagcccttcccatcactgaacagtgttggcggctgagagccccccagcagagcccttcccatcactgacagtgttgggggctgagagccccccagcagagcccttcccatcactgaacagtgttggcggctgagagccccccagcagagcccttcccatcactgacagtgttgggggctgagagcccccctagcagagcccttcccatcactgacagtgtctggggctgagagccccccctagcagagcccttcccatcactgacagtgttgggggctgagagccccccagcagagcccttcccatcactgacagtgtctggggctgagagccccccagcagagcccttcccatcactgacagtgtctggggctgagagccccccctagcagagcccttcccatcactgacagtgtcgggttgagagccacccccagcagagcccttgccacgtacagagattttctgtcagcagtttcccagtatttcagactcataatctgtgtttagcactccagtgttctcttgtaatagccaggtctggaaacgacccatggaaagaggggcctttgtattctgctagaacacagagcatagtagtagatcacttttctgaagagctttttaaaatacagctaatcaaggagtttgcgatttctcttactttctacagctcagcagtgactaatgatgtgtgactatgcgaatgagtttgatgaattcgtaaaaactaagcgcttaaatggttatagaaatgaaaacatggatatttagaagcctttctatatacacagtgcagttgagatggtttacagcaaatttcgttttatttctgaaaatgttgtaaacatgtaattagtgaaagattttgtaaaacattgtcctgtatttttgtctgtaaatatattgcataagttctaagtataaatatgtcagtatcatgtatgttattttaaattgcctgtacgccactttacacattgacattcaaataaaagccaacacttcagtggcgtgtaataaaagctgattggagcgtgttcatacctgaggtgtggttcccttggcaaaggtgaatcaaggaaagagcatctcatttccagagggaatgtcagtggaaatgggggcttcgggacaaacttttgagatcaaattcattttttaaggaagtacagatatcaagactgagctttatttggagttagatagaaggcttaattcatgaaatgtatgtgacacattaggacaactttgctcttggaaacctttagcatcccaaggcattgttttgactcatcaaggcaagcatgatctggtgggtgcattttttttctaggagaagagggagagtgacagctttcctatttgccaggcacaagttagatattttcacacacctgatttcttttcatcttaacactccataaagtggggattggtggctctagtgtttcacttgtcaaaaatatctccaaactagccttccagagaacctgtgtccccatctttatagtttgtaaagttgtatatcctaacatcctatttctagcttgtatttataatttgt

SEQ ID NO: 3497 - protein, 86 aa, Homo sapiens
MFLFLLRQENCLNPGGGGCGEPRSCHCTPAWATKAKFHLKKRKRAPSRSTTSAFIYSMMGGGKGPKGSHRTGAFTQVSASFPSPAF

SEQ ID NO: 3498 - DNA, 1483 bp, Homo sapiens
ggcagtgaggcaggaggatccttgagtttgaagccagcctgggcaacttcagacttcaactagggagactcccttctcacaaaaaagaaaagaaaacaagaaagagcagcaggcagatgggaagagggaagcaggaacaaacgtccttgggccgtggaatctgtgtgtgggaggactcctcgctctgagactgacgtggctcaaggccacgtcaacactcttcctggcactccggaatccccctttttaagccccacagccttgtgcccttggagcgccgtttctgtccttcagtgggcacctctgttcagctcacgggattgtgctcgtctcgttagggacacacgcagtccacacagtgccgcgccacgtggctctgcagtgttggtgaacaggagttgcagggaactgaaagcccgggatcccagctggtaaagggagcctcagctaccgaccgagctgctgctctcatcttgagaacttctgattcccagccctgcggggaagacgtactggtatctgattgttcttacagaaactcaggatgaaaaccgaagaagaggcccggactcatacagagattgaaatgttccttagaaaggagcagcagaaacttgaggagaggctggagttctggatggagaaatacgataaggacacagaaatgaaacagaatgaactaaatgctctcaaagccacaaaggccagtgacttagcacaccttcaagacctggcaaagatgataagagagtatgaacaggtcatcattgaagatcgtatagaaaaggagaggagcaagaagaaggtaaaacaggatctcttggaattaaagagcgttataaagctccaggcctggtggcgaggcactatgatacggagagaaattggtggtttcaagatgcctaaagacaaagttgatagcaaggattcaaaaggcaaaggtaaaggcaaggataagaggagaggcaagaagaagtgaccaagttctcttttgtgttttctgctggtattctggaggtgggaaggacttggagagagttaagaaacacctggtacctcaaagatgactcatctacaggttgtttcctattgagactttcccagggaagcctgatttcactttgcctgttaatttcactctgcctgttaggtgggttttcaaaccctgatttaggattacaccattgacttagggcttcctcataccttgctgggaagaagtttctagtagtcctgtgaagattcattcttcttgctctttctcagcagaacaaaggagttcactggcttagctacagtgacgcattgaaacttgagtaattcctgtaatgtcagattttgattttacccaatttgtctgtagtgaaaaaactcttatgagcaaaagtattcagtaggaattacaatatgatgttattagctgtccagcataatatatacacagcaaagttttaataaatgttggttcctgcctgccttttag

SEQ ID NO: 3499 - protein, 144 aa, Homo sapiens [sequence omitted]

SEQ ID NO: 3500 - DNA, 1975 bp, Homo sapiens
gaatatccaatcttgttccaaaaataacttgagactagtcttcaaaaaaagtttttcttgaagtggaaccaagatctctaagacactgtccccccgaccctagaaaccacgacctgatggagatactttataaaaaattacaacatgagaaatgcctgctaacagagatatttcacaaagaactttacttttgagcagagtgtaccaggtggtaagttggggaatgacggagaagaagaatgttgtgtgaagttagcagcagggcgcgtgtggtttggtgtggctgaagaaaggggcacattttcttggagtatagagtagaagtcagagaagataatgttgaaaaatgtacacaaaggcctctttcttgttgtattgtctctttaaaaaaattctttctaattgtttattgttttaaaagaaaagcagagaaatgaatctagaaggaacgaatctagacaaacttccaatggcctcaacaatcacaaaaatacccagtccgttaataactgaggaaggacccaacttgccagaaatcagacacagaggccggttcgctgtggagtttaacaaaatgcaggatcttgtcttcaaaaaacctacaaggcagaccatcatgactacggagacactgaagaaaattcagattgataggcagtttttcagcgatgtgattgcagataccattaaggagttgcaagattcggccacttacaacagtctcctgcaagctttgagcaaagagagggaaaacaaaatgcatttctatgacatcattgccagggaggaaaaaggaagaaaacagataatatcacttcaaaaacagctaattaatgtcaaaaaggaatggcaatttgaagtccagagtcagaatgagtatattgctaacctcaaggaccaactgcaagagatgaaggcaaaatccaacttggagaatcgctacatgaaaaccaataccgagctgcagattgcccagacccagaaaaagtgtaacagaacagaggaactcttggtggaagagattgagaaactcaggatgaaaaccgaagaagaggcccggactcatacagagattgaaatgttccttagaaaggagcagcagaaacttgaggagaggctggagttctggatggagaaatacgataaggacacagaaatgaaacagaatgaactaaatgctctcaaagccacaaaggccagtgacttagcacaccttcaagacctggcaaagatgataagagagtatgaacaggtcatcattgaagatcgtatagaaaaggagaggagcaagaagaaggtaaaacaggatctcttggaattaaagagcgttataaagctccaggcctggtggcgaggcactatgatacggagagaaattggtggtttcaagatgcctaaagacaaagttgatagcaaggattcaaaaggcaaaggtaaaggcaaggataagaggagaggcaagaagaagtgaccaagttctcttttgtgttttctgctggtattctggaggtgggaaggacttggagagagttaagaaacacctggtacctcaaagatgactcatctacaggttgtttcctattgagactttcccagggaagcctgatttcactttgcctgttaatttcactctgcctgttaggtgggttttcaaaccctgatttaggattacaccattgacttagggcttcctcataccttgctgggaagaagtttctagtagtcctgtgaagattcattcttcttgctctttctcagcagaacaaaggagttcactggcttagctacagtgacgcattgaaacttgagtaattcctgtaatgtcagattttgattttacccaatttgtctgtagtgaaaaaactcttatgagcaaaagtattcagtaggaattacaatatgatgttattagctgtccagcataatatatacacagcaaagttttaataaatgttggttcctgcctgccttttag

SEQ ID NO: 3501 - protein, 345 aa, Homo sapiens
MNLEGTNLDKLPMASTITKIPSPLITEEGPNLPEIRHRGRFAVEFNKMQDLVFKKPTRQTIMTTETLKKIQIDRQFFSDVIADTIKELQDSATYNSLLQALSKERENKMHFYDIIAREEKGRKQIISLQKQLINVKKEWQFEVQSQNEYIANLKDQLQEMKAKSNLENRYMKTNTELQIAQTQKKCNRTEELLVEEIEKLRMKTEEEARTHTEIEMFLRKEQQKLEERLEFWMEKYDKDTEMKQNELNALKATKASDLAHLQDLAKMIREYEQVIIEDRIEKERSKKKVKQDLLELKSVIKLQAWWRGTMIRREIGGFKMPKDKVDSKDSKGKGKGKDKRRGKKK

SEQ ID NO: 3502 - DNA, 1982 bp, Homo sapiens
agtttacttcctgcgtccccggacgccgtaggtggaaaggcgaaccctgagtggaggatgttcccgctgcctaaagaatgattgactgtaactgcacttttgtgagattataaatataccacggagggtaacgaagctacagaagaatggaagaagacagcctggaagactcaaaccttcctccaaaagtttggcattctgagatgacggtgtcagtgacaggcgaaccacctagtaccgtagaagaagaaggaatacctaaagaaacagacatagaaatcatcccagaaatcccggaaactctagagccactgtcccttccagatgtgctgaggatctcggcagttctggaggacaccacagaccagctctctattctgaactacatcatgcccgttcagtacgaagggagacagagcatctgcgtgaaaagcagagaaatgaatctagaaggaacgaatctagacaaacttccaatggcctcaacaatcacaaaaatacccagtccgttaataactgaggaaggacccaacttgccagaaatcagacacagaggccggttcgctgtggagtttaacaaaatgcaggatcttgtcttcaaaaaacctacaaggcagaccatcatgactacggagacactgaagaaaattcagattgataggcagtttttcagcgatgtgattgcagataccattaaggagttgcaagattcggccacttacaacagtctcctgcaagctttgagcaaagagagggaaaacaaaatgcatttctatgacatcattgccagggaggaaaaaggaagaaaacagataatatcacttcaaaaacagctaattaatgtcaaaaaggaatggcaatttgaagtccagagtcagaatgagtatattgctaacctcaaggaccaactgcaagagatgaaggcaaaatccaacttggagaatcgctacatgaaaaccaataccgagctgcagattgcccagacccagaaaaagtgtaacagaacagaggaactcttggtggaagagattgagaaactcaggatgaaaaccgaagaagaggcccggactcatacagagattgaaatgttccttagaaaggagcagcagaaacttgaggagaggctggagttctggatggagaaatacgataaggacacagaaatgaaacagaatgaactaaatgctctcaaagccacaaaggccagtgacttagcacaccttcaagacctggcaaagatgataagagagtatgaacaggtcatcattgaagatcgtatagaaaaggagaggagcaagaagaaggtaaaacaggatctcttggaattaaagagcgttataaagctccaggcctggtggcgaggcactatgatacggagagaaattggtggtttcaagatgcctaaagacaaagttgatagcaaggattcaaaaggcaaaggtaaaggcaaggataagaggagaggcaagaagaagtgaccaagttctcttttgtgttttctgctggtattctggaggtgggaaggacttggagagagttaagaaacacctggtacctcaaagatgactcatctacaggttgtttcctattgagactttcccagggaagcctgatttcactttgcctgttaatttcactctgcctgttaggtgggttttcaaaccctgatttaggattacaccattgacttagggcttcctcataccttgctgggaagaagtttctagtagtcctgtgaagattcattcttcttgctctttctcagcagaacaaaggagttcactggcttagctacagtgacgcattgaaacttgagtaattcctgtaatgtcagattttgattttacccaatttgtctgtagtgaaaaaactcttatgagcaaaagtattcagtaggaattacaatatgatgttattagctgtccagcataatatatacacagcaaagttttaataaatgttggttcctgcctgccttttag

SEQ ID NO: 3503 - protein, 443 aa, Homo sapiens; identical to SEQ ID NO: 399

SEQ ID NO: 3504 - DNA, 2262 bp, Homo sapiens
tgagtggggctgtgggaggaagaaaggctagcgggcgttggccgtatgtgggtgtcttgaggcagtttttcagttctttcatttaccaaagtgacatgcacctactaggtgccaggtgtttagacgtacatacaaccctctgcaaaatctttcagtgtagtcctctgtatgaaaagtttccagccaagaattgccactgcacctgagataagggggatcctggccattaaggaaaccttgccttcgaaactgagccgtgaggaactatacaaaatgggaaattgggacaaatcccagtggctcatgacactaagaagtaaaattacgaactcactgagctggaagtcattcaacgggaattgaataggtaactgcacttttgtgagattataaatataccacggagggtaacgaagctacagaagaatggaagaagacagcctggaagactcaaaccttcctccaaaagtttggcattctgagatgacggtgtcagtgacaggcgaaccacctagtaccgtagaagaagaaggaatacctaaagaaacagacatagaaatcatcccagaaatcccggaaactctagagccactgtcccttccagatgtgctgaggatctcggcagttctggaggacaccacagaccagctctctattctgaactacatcatgcccgttcagtacgaagggagacagagcatctgcgtgaaaagcagagaaatgaatctagaaggaacgaatctagacaaacttccaatggcctcaacaatcacaaaaatacccagtccgttaataactgaggaaggacccaacttgccagaaatcagacacagaggccggttcgctgtggagtttaacaaaatgcaggatcttgtcttcaaaaaacctacaaggcagaccatcatgactacggagacactgaagaaaattcagattgataggcagtttttcagcgatgtgattgcagataccattaaggagttgcaagattcggccacttacaacagtctcctgcaagctttgagcaaagagagggaaaacaaaatgcatttctatgacatcattgccagggaggaaaaaggaagaaaacagataatatcacttcaaaaacagctaattaatgtcaaaaaggaatggcaatttgaagtccagagtcagaatgagtatattgctaacctcaaggaccaactgcaagagatgaaggcaaaatccaacttggagaatcgctacatgaaaaccaataccgagctgcagattgcccagacccagaaaaagtgtaacagaacagaggaactcttggtggaagagattgagaaactcaggatgaaaaccgaagaagaggcccggactcatacagagattgaaatgttccttagaaaggagcagcagaaacttgaggagaggctggagttctggatggagaaatacgataaggacacagaaatgaaacagaatgaactaaatgctctcaaagccacaaaggccagtgacttagcacaccttcaagacctggcaaagatgataagagagtatgaacaggtcatcattgaagatcgtatagaaaaggagaggagcaagaagaaggtaaaacaggatctcttggaattaaagagcgttataaagctccaggcctggtggcgaggcactatgatacggagagaaattggtggtttcaagatgcctaaagacaaagttgatagcaaggattcaaaaggcaaaggtaaaggcaaggataagaggagaggcaagaagaagtgaccaagttctcttttgtgttttctgctggtattctggaggtgggaaggacttggagagagttaagaaacacctggtacctcaaagatgactcatctacaggttgtttcctattgagactttcccagggaagcctgatttcactttgcctgttaatttcactctgcctgttaggtgggttttcaaaccctgatttaggattacaccattgacttagggcttcctcataccttgctgggaagaagtttctagtagtcctgtgaagattcattcttcttgctctttctcagcagaacaaaggagttcactggcttagctacagtgacgcattgaaacttgagtaattcctgtaatgtcagattttgattttacccaatttgtctgtagtgaaaaaactcttatgagcaaaagtattcagtaggaattacaatatgatgttattagctgtccagcataatatatacacagcaaagttttaataaatgttggttcctgcctgccttttag

SEQ ID NO: 3505 - protein, 443 aa, Homo sapiens; identical to SEQ ID NO: 399

SEQ ID NO: 3506 - DNA, 973 bp, Homo sapiens
gatccttgagtttgaagccagcctgggcaacttcagacttcaactagggagactcccttctcacaaaaaagaaaagaaaacaagaaagagcagcaggcagatgggaagagggaagcaggaacaaacgtccttgggccgtggaatctgtgtgtgggaggactcctcgctctgagactgacgtggctcaaggccacgtcaacactcttcctggcactccggaatccccctttttaagccccacagccttgtgcccttggagcgccgtttctgtccttcagtgggcacctctgttcagctcacgggattgtgctcgtctcgttagggacacacgcagtccacacagtgccgcgccacgtggctctgcagtgttggtgaacaggagttgcagggaactgaaagcccgggatcccagctggtaaagggagcctcagctaccgaccgagctgctgctctcatcttgagaacttctgattcccagccctgcggggaagacgtactggtatctgattgttcttacagaaactcaggatgaaaaccgaagaagaggcccggactcatacagagattgaaatgttccttagaaaggagcagcagggttatgcatctgaatagatatcttatatagctgtaatttgagagagtgcaggccctactcagaagacctgtgctatttacagagtgactgtgcactggggaaagcaaactacccaggccttctgagatgactgaagcattggctctgaattgatgttcatgcacggggacccaaagtgacagcgtggccactagtcaaaatgggagattaatggtggttaggtgacagataccttactaaaagttttttttgttgttttgttttgttttcctaatctggatgcgtactcaattagggaaaaaaaaaaaagaaaaacagtttttttgtccattgagttattttttctcctttaatatgttaataaagtagaatacattg

SEQ ID NO: 3507 - protein, 38 aa, Homo sapiens
IDILYSCNLRECRPYSEDLCYLQSDCALGKANYPGLLR

SEQ ID NO: 3508 - DNA, 556 bp, Homo sapiens
agtcccaactactctgtaggctgaggcaggaggatttcttgagcctgggaggtcaaagttacagtgagccgtgatcatgccactgcacttcagcctgagtgacagaacaagaccgtctcaaaaacaacaacaacaacaacaacaacaaagccgggcgcagtggctcatgtctgtgatcccagcactttgagagaccaaggcaggaggatcccttgaagccaagagtttgagaccagcctgggcaacagaagtcagaatgagtatattgctaacctcaaggaccaactgcaagagatgaaggcaaaatccaacttggagaatcgctacatgaaaaccaataccgagctgcagattgcccagacccagaaaaagtgtaacagaacagaggaactcttggtggaagagattgagtaagaaatacagcatcgagagcgctgaacttcgttcaaacctgagtttataggatgagaagtcacggtgaaaaatgccaggaggaagaaagaagtggtagatcttctttgaggggaatgctaaatggcacacacgcacgcacgca

SEQ ID NO: 3509 - protein, 39 aa, Homo sapiens
MKAKSNLENRYMKTNTELQIAQTQKKCNRTEELLVEEIE

SEQ ID NO: 3510 - DNA, 1229 bp, Homo sapiens
cgaaccctgagtggaggatgttcccgctgcctaaagaatgattgactgtatgaggaggactgcctgcaggaggctttatcgcccttttaggagaactcgtttagctgcctcgtgtccgcacctagtaactgcacttttgtgagattataaatataccacggagggtaacgaagctacagaagaatggaagaagacagcctggaagactcaaaccttcctccaaaagtttggcattctgagatgacggtgtcagtgacaggcgaaccacctagtaccgtagaagaagaaggaatacctaaagaaacagacatagaaatcatcccagaaatcccggaaactctagagccactgtcccttccagatgtgctgaggatctcggcagttctggaggacaccacagaccagctctctattctgaactacatcatgcccgttcagtacgaagggagacagagcatctgcgtgaaaagcagagaaatgaatctagaaggaacgaatctagacaaacttccaatggcctcaacaatcacaaaaatacccagtccgttaataactgaggaaggacccaacttgccagaaatcagacacagaggccggttcgctgtggagtttaacaaaatgcaggatcttgtcttcaaaaaacctacaaggcagaccatcatgactacggagacactgaagaaaattcagattgataggcagtttttcagcgatgtgattgcagataccattaaggagttgcaagattcggccacttacaacagtctcctgcaagctttgagcaaagagagggaaaacaaaatgcatttctatgacatcattgccagggaggaaaaaggaagaaaacagataatatcacttcaaaaacagctaattaatgtcaaaaaggaatggcaatttgaagtccagagtcagaatgagtatattgctaacctcaaggaccaactgcaagagatgaaggcaaaatccaacttggagaatcgctacatgaaaaccaataccgagctgcagattgcccagacccagaaaaagtgtaacagaacagaggaactcttggtggaagagattgaggtaatccctgggacattagccaagaacccaggagatggcaattgagctgtcactcctgatcccctctcagctaacaaaggagggagacaaagatttccctccatctctatcggcaacagcccctccacttgaggttgaaaataaaagcctaaatgagg

SEQ ID NO: 3511 - protein, 310 aa, Homo sapiens
MEEDSLEDSNLPPKVWHSEMTVSVTGEPPSTVEEEGIPKETDIEIIPEIPETLEPLSLPDVLRISAVLEDTTDQLSILNYIMPVQYEGRQSICVKSREMNLEGTNLDKLPMASTITKIPSPLITEEGPNLPEIRHRGRFAVEFNKMQDLVFKKPTRQTIMTTETLKKIQIDRQFFSDVIADTIKELQDSATYNSLLQALSKERENKMHFYDIIAREEKGRKQIISLQKQLINVKKEWQFEVQSQNEYIANLKDQLQEMKAKSNLENRYMKTNTELQIAQTQKKCNRTEELLVEEIEVIPGTLAKNPGDGN

SEQ ID NO: 3512 - DNA, 681 bp, Homo sapiens
cttgttcccaagtagtacattttgcagcctaccaagatgaaaggacttaggaaaataattgtaagagtgctattgaatgtggcttatttcagtgcgaagccgatttccgaggattgtttttctggcgtttggagaagatgcctaaattgagggcggagtcgaaagatgtttaatcccacaaggccacgcggcggggcctcgtccttctcttaccgccatcttggctcctgtggaggcctgctgggaacgggacttctaaaaggaactatgtctggaaggctgtggtccaaggccatttttgctggctataagcggggtctccggaaccaaagggagcacacagctcttcttaaaattgaaggtgtttacgcccgagatgaaacagaattctatttgggcaagagatgcgcttatgtatataaagcaaagaacaacacagtcactcctggcggcaaaccaaacaaaaccagagtcatctggggaaaagtaactcgggcccatggaaacagtggcatggttcgtgccaaattccgaagcaatcttcctgctaaggccattggacacagaatccgagtgatgctgtacccctcaaggatttaaactaacgaaaaatcaataaataaatgtggatttgtgctcttgtatttttaagtggattaaaaaacttactaccttaaattg

SEQ ID NO: 3513 - protein, 144 aa, Homo sapiens
MFNPTRPRGGASSFSYRHLGSCGGLLGTGLLKGTMSGRLWSKAIFAGYKRGLRNQREHTALLKIEGVYARDETEFYLGKRCAYVYKAKNNTVTPGGKPNKTRVIWGKVTRAHGNSGMVRAKFRSNLPAKAIGHRIRVMLYPSRI

SEQ ID NO: 3514 - DNA, 1437 bp, Homo sapiens
cttgttcccaagtagtacattttgcagcctaccaagatgaaaggacttaggaaaataattgtaagagtgctattgaatgtggcttatttcagtgcgaagccgatttccgaggattgtttttctggcgtttggagaagatgcctaaattgagggcggagtcgaaagatgtttaatcccacaaggccacgcggcggggcctcgtccttctcttaccgccatcttggctcctgtggaggcctgctgggaacgggacttctaaaaggaactatgtctggaaggctgtggtccaaggccatttttgctggctataagcggggtctccggaaccaaagggagcacacagctcttcttaaaattgaaggtgtttacgcccgagatgaaacagaattctatttgggcaagagatgcgcttatgtatataaagcaaagaacaacacagtcactcctggcggcaaaccaaacaaaaccagagtcatctggggaaaagtaactcgggcccatggaaacagtggcatggttcgtgccaaattccgaagcaatcttcctgctaaggccattggacacagaatccgagtgatgctgtacccctcaaggatttaaactaacgaaaaatcaataaataaatgtggatttgtgctcttgtatttttaagtggattaaaaaacttactaccttaaattgatttgctacatgcttaaaatgatagaggttgctcagcatttttggagtacaagggggtcagagagacatgtgatgaaaattacagggcgagtacagagatttagaagggaacgggttttaatgcgagtatctttgacagagtcttgctctgttgcccatgctggagtgtagtggtgctcgctgcagcctcacattcaaaggctcaagcaatcctcccttggcctttgaagtagctgggaccacaggctcatgccaccatccctgggtcatttttaaattttttgtagagagggtctgactcttgcctatgctggcttcaaactcctgggctcaagcaatcctccttccttggcctctcctgaagtgctgggatacagttatgagccaccacacctgccaagtgctttgtgatactatgcatttgttcaatgcagattgggaaacttaaaatttgaatggagattatgttgatgggctttggcagttcatttggatagactgggatgagaagctcttgggacttgtgactggacaaagcattccagtatattaaaataaaattaagccatattactccactcataaaaagcaatcctatggtaggtacatggaggttgggaatagtgcacggaaaggtggcagctttctttggcttcatgttttaatctggtaaagttcaagattgcactttaagcaggcctcctaaatattttagatttcttggggatatgctaaaataaaacaactaaggcatca

SEQ ID NO: 3515 - protein, 144 aa, Homo sapiens; identical to SEQ ID NO: 3513

SEQ ID NO: 3516 - DNA, 467 bp, Homo sapiens
gccacgcggcggggcctcgtccttctcttaccgccatcttggctcctgtggaggcctgctgggaacgggacttctaaaaggaactatgtctggaaggctgtggtccaaggccatttttgctggctataagcggggtctccggaaccaaagggagcacacagctcttcttaaaattgaaggtgtttacgcccgagatgaaacagaattctatttgggcaagagatgcgcttatgtatataaagcaaagaacaacacagtcactcctggcggcaaaccaaacaaaaccagagtcatctggggaaaagtaactcgggcccatggaaacagtggcatggttcgtgccaaattccgaagcaatcttcctgctaaggccattggacacagaatccgagtgatgctgtacccctcaaggatttaaactaacgaaaaatcaataaataaatgtggatttgtgctcttgtattttt

SEQ ID NO: 3517 - protein, 110 aa, Homo sapiens [sequence omitted]

SEQ ID NO: 3518 - DNA, 1303 bp, Homo sapiens
cttctcttaccgccatcttggctcctgtggaggcctgctgggaacgggacttctaaaaggaactatgtctggaaggctgtggtccaaggccatttttgctggctataagcggggtctccggaaccaaagggagcacacagctcttcttaaaattgaaggtgtttacgcccgagatgaaacagaattctatttgggcaagagatgcgcttatgtatataaagcaaagaacaacacagtcactcctggcggcaaaccaaacaaaaccagagtcatctggggaaaagtaactcgggcccatggaaacagtggcatggttcgtgccaaattccgaagcaatcttcctgctaaggccattggacacagaatccgagtggtgagtatggtttttagcaaaatggacgtctgatgaatcagactaggttcaaggtgttgtgctttgacttctgaggacttctgtggttgtgaaattgacaccagtaaattatgctgcaaaatttgtgtattgcagaacactggagagatagtaattgaaagaattaggtgtttggttgtttgttttttgttttttttttggggggagacagggtctcactttgtcacccaggctggggtgcagtggcataatcacagcttattgcagcctcgacctcctgggttcaagcaatccttccacctcagccccccaagtagctgggaccataggcgtgtgccaccacacccagctaatttttggggtttttgttgtgtttttttgagacaaggtctcactttgtcacgcaggctggagtgcagtggcatgatctcagcttgctgctacctttgcctccaaagttcatgtgattcttgtgcctcagcctcccgagtagctggaattacaggcgtatataccaccatgcccagataattttttgtatttttgtattttgtttctccatgttgcccaggctggtcttgaactcctgagcccaagtgatctgcccaccttggcctcccagagtgctgggattatatgcttgagccaccacagccagccttgaataaatagttttctggtgaagatatttattgggcactgaagtaattgttagaaagcaacaattcaacagttacgcctggcataattgttaatattttgccatttccatcatgtcagtcttgttagaacaggtgttagtagctttattttgtacatgaagaaaacagactctcatgttcctaggtctcaggtctttggtgccagccttggactctaaatttttctcaattttctcctgtaatttttctcaaatagttcgtacttttt

SEQ ID NO: 3519 - protein, 113 aa, Homo sapiens
MSGRLWSKAIFAGYKRGLRNQREHTALLKIEGVYARDETEFYLGKRCAYVYKAKNNTVTPGGKPNKTRVIWGKVTRAHGNSGMVRAKFRSNLPAKAIGHRIRVVSMVFSKMDV

SEQ ID NO: 3520 - DNA, 524 bp, Homo sapiens
cttctcttaccgccatcttggctcctgtggaggtgagtgaagggtctgctgctgaaatttgggggcaaataaccggagtaggtttgttcctgtgccttggcgagtcgccggcctgctgggaacgggacttctaaaaggaactatgtctggaaggctgtggtccaaggccatttttgctggctataagcggggtctccggaaccaaagggagcacacagctcttcttaaaattgaaggtgtttacgcccgagatgaaacagaattctatttgggcaagagatgcgcttatgtatataaagcaaagaacaacacagtcactcctggcggcaaaccaaacaaaaccagagtcatctggggaaaagtaactcgggcccatggaaacagtggcatggttcgtgccaaattccgaagcaatcttcctgctaaggccattggacacagaatccgagtgatgctgtacccctcaaggatttaaactaacgaaaaatcaataaataaatgtggatttgtgctcttgtattttt

SEQ ID NO: 3521 - protein, 110 aa, Homo sapiens [sequence omitted]

SEQ ID NO: 3522 - DNA, 556 bp, Homo sapiens
cttctcttaccgccatcttggctcctgtggaggtgagtgaagggtctgctgctgaaatttgggggcaaataaccggagtaggtttgttcctgtgccttggcgagtcgccggcctgctgggaacgggacttctaaaaggaactatgtctggaaggctgtggtccaaggccatttttgctggctataagcggggtctccggaaccaaagggagcacacagctcttcttaaaattgaaggtgtttacgcccgagatgaaacagaattctatttgggcaagagatgcgcttatgtatataaagcaaagaacaacacagtcactcctggcggcaaaccaaacaaaaccagagtcatctggggaaaagtaactcgggcccatggaaacagtggcatggttcgtgccaaattccgaagcaatcttcctgctaaggccattggacacagaatccgagtgatgctgtacccctcaaggatttaaactaacgaaaaatcaataaataaatgtggatttgtgctcttgtatttttaagtggattaaaaaacttactaccttaaattg

SEQ ID NO: 3523 - protein, 110 aa, Homo sapiens [sequence omitted]

SEQ ID NO: 3524 - DNA, 1312 bp, Homo sapiens
cttctcttaccgccatcttggctcctgtggaggtgagtgaagggtctgctgctgaaatttgggggcaaataaccggagtaggtttgttcctgtgccttggcgagtcgccggcctgctgggaacgggacttctaaaaggaactatgtctggaaggctgtggtccaaggccatttttgctggctataagcggggtctccggaaccaaagggagcacacagctcttcttaaaattgaaggtgtttacgcccgagatgaaacagaattctatttgggcaagagatgcgcttatgtatataaagcaaagaacaacacagtcactcctggcggcaaaccaaacaaaaccagagtcatctggggaaaagtaactcgggcccatggaaacagtggcatggttcgtgccaaattccgaagcaatcttcctgctaaggccattggacacagaatccgagtgatgctgtacccctcaaggatttaaactaacgaaaaatcaataaataaatgtggatttgtgctcttgtatttttaagtggattaaaaaacttactaccttaaattgatttgctacatgcttaaaatgatagaggttgctcagcatttttggagtacaagggggtcagagagacatgtgatgaaaattacagggcgagtacagagatttagaagggaacgggttttaatgcgagtatctttgacagagtcttgctctgttgcccatgctggagtgtagtggtgctcgctgcagcctcacattcaaaggctcaagcaatcctcccttggcctttgaagtagctgggaccacaggctcatgccaccatccctgggtcatttttaaattttttgtagagagggtctgactcttgcctatgctggcttcaaactcctgggctcaagcaatcctccttccttggcctctcctgaagtgctgggatacagttatgagccaccacacctgccaagtgctttgtgatactatgcatttgttcaatgcagattgggaaacttaaaatttgaatggagattatgttgatgggctttggcagttcatttggatagactgggatgagaagctcttgggacttgtgactggacaaagcattccagtatattaaaataaaattaagccatattactccactcataaaaagcaatcctatggtaggtacatggaggttgggaatagtgcacggaaaggtggcagctttctttggcttcatgttttaatctggtaaagttcaagattgcactttaagcaggcctcctaaatattttagatttcttggggatatgctaaaataaaacaactaaggcatca

SEQ ID NO: 3525 - protein, 110 aa, Homo sapiens [sequence omitted]

SEQ ID NO: 3526 - DNA, 579 bp, Homo sapiens
ctcttaccgccatcttggctcctgtggaggcctgctgggaacgggacttctaaaaggaactatgtctggaaggctgtggtccaaggccatttttgctggctataagcggggtctccggaaccaaagggagcacacagctcttcttaaaattgaaggtgtttacgcccgagatgaaacagaattctatttgggcaagagatgcgcttatgtatataaagcaaagaagtaagtttatgacactggtaggttttgggtttttgagatctgcctcattttcttttttatataacggagtcttgctctgttgccgaggctggaatgcagtgacttggtctccctcaccgaaacctccgcctcccgggttcaagcaagtgtcctgtctcagcctcccgagtagctgggattacaggcgccggccaccacgcccggctagtttttgtattattagtagagacagggtattgccatgttggccaggctggtcccaaactcctgaccttaggtgatccgcccacctcggcctcccaaagtgctgagattacaggcttgagccaccgcgcctggcctcattatcctatt

SEQ ID NO: 3527 - protein, 55 aa, Homo sapiens
MSGRLWSKAIFAGYKRGLRNQREHTALLKIEGVYARDETEFYLGKRCAYVYKAKK

SEQ ID NO: 3528 - DNA, 290 bp, Homo sapiens
ctcttaccgccatcttggctcctgtggaggcctgctgggaacgggacttctaaaaggaactatgtctggaagcaacacagtcactcctggcggcaaaccaaacaaaaccagagtcatctggggaaaagtaactcgggcccatggaaacagtggcatggttcgtgccaaattccgaagcaatcttcctgctaaggccattggacacagaatccgagtgatgctgtacccctcaaggatttaaactaacgaaaaatcaataaataaatgtggatttgtgctcttgtattttt

SEQ ID NO: 3529 - protein, 59 aa, Homo sapiens
MSGSNTVTPGGKPNKTRVIWGKVTRAHGNSGMVRAKFRSNLPAKAIGHRIRVMLYPSRI

SEQ ID NO: 3530 - DNA, 319 bp, Homo sapiens
ctcttaccgccatcttggctcctgtggaggcctgctgggaacgggacttctaaaaggaactatgtctggaagcaacacagtcactcctggcggcaaaccaaacaaaaccagagtcatctggggaaaagtaactcgggcccatggaaacagtggcatggttcgtgccaaattccgaagcaatcttcctgctaaggccattggacacagaatccgagtgatgctgtacccctcaaggatttaaactaacgaaaaatcaataaataaatgtggatttgtgctcttgtatttttaagtggattaaaaaacttactaccttaaa

SEQ ID NO: 3531 - protein, 59 aa, Homo sapiens; identical to SEQ ID NO: 3529

SEQ ID NO: 3532 - DNA, 1078 bp, Homo sapiens
ctcttaccgccatcttggctcctgtggaggcctgctgggaacgggacttctaaaaggaactatgtctggaagcaacacagtcactcctggcggcaaaccaaacaaaaccagagtcatctggggaaaagtaactcgggcccatggaaacagtggcatggttcgtgccaaattccgaagcaatcttcctgctaaggccattggacacagaatccgagtgatgctgtacccctcaaggatttaaactaacgaaaaatcaataaataaatgtggatttgtgctcttgtatttttaagtggattaaaaaacttactaccttaaattgatttgctacatgcttaaaatgatagaggttgctcagcatttttggagtacaagggggtcagagagacatgtgatgaaaattacagggcgagtacagagatttagaagggaacgggttttaatgcgagtatctttgacagagtcttgctctgttgcccatgctggagtgtagtggtgctcgctgcagcctcacattcaaaggctcaagcaatcctcccttggcctttgaagtagctgggaccacaggctcatgccaccatccctgggtcatttttaaattttttgtagagagggtctgactcttgcctatgctggcttcaaactcctgggctcaagcaatcctccttccttggcctctcctgaagtgctgggatacagttatgagccaccacacctgccaagtgctttgtgatactatgcatttgttcaatgcagattgggaaacttaaaatttgaatggagattatgttgatgggctttggcagttcatttggatagactgggatgagaagctcttgggacttgtgactggacaaagcattccagtatattaaaataaaattaagccatattactccactcataaaaagcaatcctatggtaggtacatggaggttgggaatagtgcacggaaaggtggcagctttctttggcttcatgttttaatctggtaaagttcaagattgcactttaagcaggcctcctaaatattttagatttcttggggatatgctaaaataaaacaactaaggcatca

SEQ ID NO: 3533 - protein, 59 aa, Homo sapiens; identical to SEQ ID NO: 3529

SEQ ID NO: 3534 - DNA, 409 bp, Homo sapiens
tgtgtcttaggctgtggtccaaggccatttttgctggctataagcggggtctccggaaccaaagggagcacacagctcttcttaaaattgaaggtgtttacgcccgagatgaaacagaattctatttgggcaagagatgcgtattgaaataataaacaaaagatttagagtcactcctggcggcaaaccaaacaaaaccagagtcatctggggaaaagtaactcgggcccatggaaacagtggcatggttcgtgccaaattccgaagcaatcttcctgctaaggccattggacacagaatccgagtgatgctgtacccctcaaggatttaaactaacgaaaaatcaataaataaatgtggatttgtgctcttgtatttttaagtggattaaaaaacttactaccttaaa

SEQ ID NO: 3535 - protein, 64 aa, Homo sapiens
MRIEIINKRFRVTPGGKPNKTRVIWGKVTRAHGNSGMVRAKFRSNLPAKAIGHRIRVMLYPSRI

SEQ ID NO: 3536 - DNA, 1168 bp, Homo sapiens
tgtgtcttaggctgtggtccaaggccatttttgctggctataagcggggtctccggaaccaaagggagcacacagctcttcttaaaattgaaggtgtttacgcccgagatgaaacagaattctatttgggcaagagatgcgtattgaaataataaacaaaagatttagagtcactcctggcggcaaaccaaacaaaaccagagtcatctggggaaaagtaactcgggcccatggaaacagtggcatggttcgtgccaaattccgaagcaatcttcctgctaaggccattggacacagaatccgagtgatgctgtacccctcaaggatttaaactaacgaaaaatcaataaataaatgtggatttgtgctcttgtatttttaagtggattaaaaaacttactaccttaaattgatttgctacatgcttaaaatgatagaggttgctcagcatttttggagtacaagggggtcagagagacatgtgatgaaaattacagggcgagtacagagatttagaagggaacgggttttaatgcgagtatctttgacagagtcttgctctgttgcccatgctggagtgtagtggtgctcgctgcagcctcacattcaaaggctcaagcaatcctcccttggcctttgaagtagctgggaccacaggctcatgccaccatccctgggtcatttttaaattttttgtagagagggtctgactcttgcctatgctggcttcaaactcctgggctcaagcaatcctccttccttggcctctcctgaagtgctgggatacagttatgagccaccacacctgccaagtgctttgtgatactatgcatttgttcaatgcagattgggaaacttaaaatttgaatggagattatgttgatgggctttggcagttcatttggatagactgggatgagaagctcttgggacttgtgactggacaaagcattccagtatattaaaataaaattaagccatattactccactcataaaaagcaatcctatggtaggtacatggaggttgggaatagtgcacggaaaggtggcagctttctttggcttcatgttttaatctggtaaagttcaagattgcactttaagcaggcctcctaaatattttagatttcttggggatatgctaaaataaaacaactaaggcatca

SEQ ID NO: 3537 - protein, 64 aa, Homo sapiens; identical to SEQ ID NO: 3535

SEQ ID NO: 3538 - DNA, 1291 bp, Homo sapiens
cacccggctaacttttgtatttttagtagagacagggtttcaccatgttggccaggctggtctcgaactcctgacctcgtgatccacccgccccagcctcccaaagtgctgggattacaggcgtgagccatcgtgccattgcaccttagcctggacaacaagagcaaatcctattgtcttcacccactccaagccaattaaaatctctgggaaagtgttttaatcattgccccaccttttcttctacagccaatgtgttcctttaaaattttaagtcaggtgcagtggctcacacttgtagccccagcatttgagagccctaggtgggaggattgcttgatgccaggagatagaggctgcagtgagctatgattgggccactgtactgcagcctgggtgacaagacaaccccgtggtctttaaaggaaatatatataaagtcatatcctttgtacattgctcgaaccacagtagtttctctcattcagtaaaagcccgtcattaagagctccataattctctttatctcagctgggattaaccccttggtgtcttcagtctttcttccggccaggacacacactccttggccccagtgcctgcgctagtcatcccgtgatcacttcatggcatttcccctccctttccagtctttgttccatggtcacctcagtgagaccttccttggctatttaaaatggcaggtaattcctcctttctgtacacacaaatatcctcacacttgtccttttttgctattttttcaatattgcctctgttatcatctgacctatgtattttccttaaacttacttggttatcatgtgaaagatttttgttttatagctgctgtattttacagaagggcctggcatacaatagttactcgataagtatctgttgaatgaatggtgttctaggcatttaaagtttctcaggtgatgaagtgggtaaccagggttgagagccactcgtgtagaggtcaccttgaatttgtatccaactatatcagcttgtattcctcttctttccctttttaaaatcagcaacacagtcactcctggcggcaaaccaaacaaaaccagagtcatctggggaaaagtaactcgggcccatggaaacagtggcatggttcgtgccaaattccgaagcaatcttcctgctaaggccattggacacagaatccgagtgatgctgtacccctcaaggatttaaactaacgaaaaatcaataaataaatgtggatttgtgctcttgtatttttaagtggattaaaaaacttactacctta

SEQ ID NO: 3539 - protein, 88 aa, Homo sapiens
MAFPLPFQSLFHGHLSETFLGYLKWQVIPPFCTHKYPHTCPFLLFFQYCLCYHLTYVFSLNLLGYHVKDFCFIAAVFYRRAWHTIVTR

SEQ ID NO: 3540 - DNA, 2052 bp, Homo sapiens
cacccggctaacttttgtatttttagtagagacagggtttcaccatgttggccaggctggtctcgaactcctgacctcgtgatccacccgccccagcctcccaaagtgctgggattacaggcgtgagccatcgtgccattgcaccttagcctggacaacaagagcaaatcctattgtcttcacccactccaagccaattaaaatctctgggaaagtgttttaatcattgccccaccttttcttctacagccaatgtgttcctttaaaattttaagtcaggtgcagtggctcacacttgtagccccagcatttgagagccctaggtgggaggattgcttgatgccaggagatagaggctgcagtgagctatgattgggccactgtactgcagcctgggtgacaagacaaccccgtggtctttaaaggaaatatatataaagtcatatcctttgtacattgctcgaaccacagtagtttctctcattcagtaaaagcccgtcattaagagctccataattctctttatctcagctgggattaaccccttggtgtcttcagtctttcttccggccaggacacacactccttggccccagtgcctgcgctagtcatcccgtgatcacttcatggcatttcccctccctttccagtctttgttccatggtcacctcagtgagaccttccttggctatttaaaatggcaggtaattcctcctttctgtacacacaaatatcctcacacttgtccttttttgctattttttcaatattgcctctgttatcatctgacctatgtattttccttaaacttacttggttatcatgtgaaagatttttgttttatagctgctgtattttacagaagggcctggcatacaatagttactcgataagtatctgttgaatgaatggtgttctaggcatttaaagtttctcaggtgatgaagtgggtaaccagggttgagagccactcgtgtagaggtcaccttgaatttgtatccaactatatcagcttgtattcctcttctttccctttttaaaatcagcaacacagtcactcctggcggcaaaccaaacaaaaccagagtcatctggggaaaagtaactcgggcccatggaaacagtggcatggttcgtgccaaattccgaagcaatcttcctgctaaggccattggacacagaatccgagtgatgctgtacccctcaaggatttaaactaacgaaaaatcaataaataaatgtggatttgtgctcttgtatttttaagtggattaaaaaacttactaccttaaattgatttgctacatgcttaaaatgatagaggttgctcagcatttttggagtacaagggggtcagagagacatgtgatgaaaattacagggcgagtacagagatttagaagggaacgggttttaatgcgagtatctttgacagagtcttgctctgttgcccatgctggagtgtagtggtgctcgctgcagcctcacattcaaaggctcaagcaatcctcccttggcctttgaagtagctgggaccacaggctcatgccaccatccctgggtcatttttaaattttttgtagagagggtctgactcttgcctatgctggcttcaaactcctgggctcaagcaatcctccttccttggcctctcctgaagtgctgggatacagttatgagccaccacacctgccaagtgctttgtgatactatgcatttgttcaatgcagattgggaaacttaaaatttgaatggagattatgttgatgggctttggcagttcatttggatagactgggatgagaagctcttgggacttgtgactggacaaagcattccagtatattaaaataaaattaagccatattactccactcataaaaagcaatcctatggtaggtacatggaggttgggaatagtgcacggaaaggtggcagctttctttggcttcatgttttaatctggtaaagttcaagattgcactttaagcaggcctcctaaatattttagatttcttggggatatgctaaaataaaacaactaaggcatca

SEQ ID NO: 3541 - protein, 88 aa, Homo sapiens; identical to SEQ ID NO: 3539

SEQ ID NO: 3542 - DNA, 205 bp, Homo sapiens
agtcactcctggcggcaaaccaaacaaaaccagagtcatctggggaaaagtaactcgggcccatggaaacagtggcatggttcgtgccaaattccgaagcaatcttcctgctaaggccattggacacagaatccgagtgatgctgtacccctcaaggatttaaactaacgaaaaatcaataaataaatgtggatttgtgctcttg

SEQ ID NO: 3543 - protein, 37 aa, Homo sapiens
SHSWRQTKQNQSHLGKSNSGPWKQWHGSCQIPKQSSC

SEQ ID NO: 3544 - DNA, 3282 bp, Homo sapiens
ggggctgtgggaggaagaaaggctagcgggcgttggccgtatgtgggtgtcttgaggcagtttttcagttctttcatttaccaaagtgacatgcacctactaggtgccaggtgtttagacgtacatacaaccctctgcaaaatctttcagtgtagtcctctgtatgaaaagtttccagccaagaattgccactgcacctgagataagggggatcctggccattaaggaaaccttgccttcgaaactgagccgtgaggaactatacaaaatgggaaattgggacaaatcccagtggctcatgacactaagaagtaaaattacgaactcactgagctggaagtcattcaacgggaattgaataggtaagctactatactgggaaatgaaggagtaggaaagaaggaaaacctcaagttacaaactatgggtggagattcagctacgaggatggggtggtgttttaagtattaccattttacaagtaaatactcactaaatgtgtgtatcatcccacaactagtggaaggtgggattccaaaccacatttgtaacttaggaaacgtgccctttccactacaataccacaaataaattgctattgtgaataaagaatggaaccagtcatcctaagctcctggctgtaacaatagtgttatgctgaggaaaggctgtttcttttttttttgagacggagtttcactcgtcgcccaggctggagtgcagtgacacaatctcggctcaatgcaacctctgcctcccgggatcaagctattcccctgcctcagcctcccgagtagccgggattacaggcacccgccaccacgcccggccaatttttatgtttttagtagagacgtagtttcaccacgttggccaggctggtctcaacctcatgacctcaggtgatccgcccgcctccgcctcccaaagtgttgggattacaggcgtgagccaccgcgcccagccaggaggcaaagctgtttcaatggtgtagtggacaagttaccagccacgcaagccctttcctgtaaaccacaggactcctcctttggcaacggtgacttgagtacttttgacttaatttccatatgggaggagaaaaacataaaaacatacatttattatttacaaatgctgcatcatctcagtaaggaagagcatgtatttgcttttgagtctcatttgccattgcacatgtaagttactcgagttaaagtctcaaccgtttgttttcccccgctttgctcagatgcctaccacttaccgtgtgtctgttccactcagaataccatccacttctccatatgcctaacccagacctgaaatacccatctgtcttcatggatatgtccacaggttaacatcttacagcttcctcaaattcaactttagctcctcccacaaaaccatctcctgattccccaactttgtaaatgcaccattatccatccagcccccaaagccagaaacatgttagaattctccatttgagactgaaaagcccacctaattttcccttgtttatgctgggatgccattgggatttgaaataatctgagctggtggctcatatctgtaatcccagtactttaggagaacaaggcagggggatcacttgaggccaggaatcgagaccagcctgggaccccgaaaaaacattttaattggctggacgtgcctggcatgcaccagattctctggaggttgtgggcaggggattgtctgagcctagaagttcaaaggtgcagtgagctatgatcacaccactgcactacaggctgggcaacagaaaccctgtctcaaatgagtaaattttaaaatttcctgtgaatcaagttcttcagtgacgttgtattacactcaagaacaatcttaagcctaagatcctcagttcagtacaggagacctctcatgtggcattttagttttctggactttccagtcagccacttgtgttcctaaaatcttcctgccatttcctctttgagatgccgccctatttcttcctctacactttacggttttatgttacgcagccagtatacctacatgcctctatccctgaataccccgagtactactgatcacatctacttaactggcacaatgaacacagtaggtacttttagcttatgttggccttttggagtgggtgtccaagatcagcacttcctcgcgctgactgcgtaattcccaagttcaatttcattagcattctaatatacaacttccaacttccggccttgaagtactgctcacttctggtgaatacagcatcagtgcactttgtttgccttaaaaccacaatcctgggaggctgagacagaatggcgtgaacccgggaggcggagcgtgcagtgagccaagattgcgccactgcactccagcctagacgacagagcaagactgtctcaaaaaaaaaaaaaaaaaaaccaccacaatcctaataaatgagcctggcagagtactaacacaagcccatgtccacgaagcacgggactccaacaatggcagctttggcttgcataccaccattggactgaccaaacctttcttagaactgccagtgtgacagagggacctctgggggagggcgtcttgctttctcttgggtcagtatatctcactaccctctttgtaggttagcagatttgtaacaggatgttactggaggaaggggaagtgggaaagctggacagtattcccactcttttcccttactacaaaaactttccttctcagtcctgtctccaggagatggaagaccaaataacacaacagccagtgtgcttttcctacccaatcctttctttcaccctcttatcctaatacatttccagcatgttaattcttttgcagcatagacaagagaacccatacacgctgcaaaactgcaaaagggcttaggtggcaaactcccagtttcttgttgacattttcagtgcaatttaaagatgttaatttaaaaaactacctgtgctgtagagatcagtaaccctcagggggcagacaaaaagactgttactgcatcagttagaaatgtagtactacctgggcaacatagtgaggcccatctccacaaataactaaaaagttaactggttgtggctgcacatgcctgtggccccagctatttaggaggctgaggcaggaggtttgcctgagccgaggaggttgaggttgaggttgcagtaagctgtaatcacgccactgcactccagcccaagcaacaaaacaagaccttgtcttcaaaaaaaaaaaaaaaaccatacagcaaaactg

SEQ ID NO: 3545 - protein, 64 aa, Homo sapiens
MKSFQPRIATAPEIRGILAIKETLPSKLSREELYKMGNWDKSQWLMTLRSKITNSLSWKSFNGN

SEQ ID NO: 3546 - DNA, 4037 bp, Homo sapiens
gcgcagaggcgtcacgcactccatggtaacgacgctcggcccgaagatggcggccgaatggggcggaggagtgggttactcgggctcaggcccgggccggagccggtggcgctggagcgggtcataaataaagttcatcttaaggcaaatcatgtggtcaagagagatgttgatgagcatttaagaatcaagactgtctatgataaaagtgttgaagagttgctccctgagaaaaagaatcttgtaaagaacaagcttttcccacaagcgatttcttatttagagaagacttttcaggtccgtcgacctgcgggcactatcttacttagcagacaatgtgcaacaaaccaatacctccggaaggaaaacgatcctcacaggtactgcaccggggagtgtgccgcacacacaaagtgcggccccgttattgttcctgaggaacatctccagcaatgccgggtctaccgtgggggtaagtggcctcatggagcagtgggtgtgccagaccaagaaggcatctcagatgcagactttgttctttacgttggtgctctggccaccgagagatgcagccatgaaaacatcatctcttatgcagcctattgtcagcaggaagcaaacatggacaggccaatagcaggatatgctaacctgtgtccaaatatgatctctacccagcctcaggagtttgttgggatgctgtccacagtgaaacatgaggttattcatgccctgggtttctctgctgggctgtttgcattctaccatgataaagatggaaatcctctcacttcaagatttgcagatggcctcccaccttttaattatagtctgggattatatcaatggagtgataaagtagttcgaaaagtggagagattatgggatgttcgagataataagatagttcgtcacactgtgtatctcctggtaacgcctcgtgttgttgaggaagcacgaaaacattttgattgtccagttctagagggaatggaacttgaaaatcaaggtggtgtgggcactgagctcaaccattgggaaaaaaggttattagagaatgaagcgatgactggttctcacactcagaatcgagtactctctcgaatcactctggcattaatggaggacactggctggtataaagcaaattacagcatggctgagaagttagactggggccgaggaatgggctgtgactttgtcaggaagagctgtaaattctggattgatcagcagagacaaaagagacagatgctgagcccttactgtgacacgctcagaagtaacccactgcagctaacttgcagacaggaccagagagcagttgccgtgtgtaatttgcagaagttccctaagcctttaccacaggaataccagtactttgatgaactcagtggaatacctgcagaagatttgccttattatggtggctccgtggaaattgctgactactgccctttcagtcaggaattcagttggcatttaagtggtgaatatcagcgcagctcagattgtagaatattggaaaatcaaccagaaatttttaagaactatggcgctgaaaagtatggacctcattccgtttgtctaattcagaaatcagcattcgttatggagaagtgtgagaggaagctgagttacccagactggggaagcggatgctatcaggtttcttgttctcctcaaggtctgaaagtttgggtccaagatacttcatatttgtgtagtcgggctgggcaggtcctccctgtcagtatccagatgaatggctggattcacgatggaaacctgctctgcccatcatgttgggacttctgtgagctctgtcctccagaaacagatcctccagccactaacctgacccgagctctgccacttgatctttgttcctgttcctcgagcctggtggtcaccctctggcttctgctaggcaatctgtttcctctgctggctggatttcttctgtgtatatggcactaggaatggaaaagtggatcttcaagatattcttttatgttatgttcttgtgaacaaagcacaaagtttgagtgagtgccaacctatgcagatggtagaagtggcattcctggctttggcttggaagaattgacgaccatcagaccttgaagcagaacttcacagcagcctgtcctcatcagcaacccaaccaccttcatcagcaacccaaccaccttcatcagcaacccaaccacctcgtcagcaacccaaccacctcgtcagcaacccaaccacctcgtcagcaacccagccaccttcatcagcaacccaaccacctcatcagcaacccagccaccttcatcagcaacccaaccacctcatcagcaaaccaaccactttcatctgcaacccaaccactttcatcagcaactcaacaccttcatctgcaacccaaccaccttcatcagcaaaccaaccaccttcttcagcaacccaaccacctcatcttggagaaggagaaggaactgcaagccaccaagtcttcatttttcagggtttgtaatcttcccaaagttttcctttgaaaataggataatgggtggaattttcagagtgattacatacctcaacatttttattaacatacaacaatgggaaagttcatcatccatatactgcagtcacttaaacaacagccaattattgcaagattagaattggagatcttgtcctcaaaagtataaattgtcctttgagttatagaaaataatggaattgggatttctacatatcattattatacctattttaaatttaatggcagccaggcatggttccagctacttgggaggctgaggcaggaggatcgcttgagcccaggagttcaaggctgcagtgagctatgattgcaccactgtattccagcctgcacgatagagttagaccctgtatcttaaaaaaaaaaaaattaatggctggtatatagtaaacttaattcactgttcccattgttctaaagaatttttttaaataatgtttcattaaatcttatgatttaaccgtgcttgccctttttgccagctatgtggcagtttacggcagaactgctgtcagtgtgctggtagccctctattcatccctcctcagagcccagcttccagaactgctatcactgtgctggtagccctctgtattcatccctcttcagagctcagcttctggttgtattctccatgagtttaataatgacatgaaaaaatgtggaagccgagagagtaaaatactctgccctgtaaaaacatggaagacatgcaaacagaaaaaaaataattgtattgttttagataatacttaagacaactgtgaaacaacaaaaacacaactattcctttgtgaccgatgaagataaaaagaaattctggtaaagacgggtatgcagttttttaaaatgggttaagaaattgttgcagaagaatttctaacatctgaaaatggttttatgtttaagaaggatggtctgaattgtgtactaatagcaaggtataagtttggtgtagagcctatccagtagcgtccactgtaccacttttaagtaagactcagtccacagaagctggaagattgccttcgctttaaatatcctttaccttctgcatttgacactcctcctgttactacatagattccggtccccagaagcaattttacactggtactagagcttaccagccccatttagtaatttttaatggctagatgaggtttaacaagaatatgaaaagaaaaaagaaaaaatatattcatgaatgataggcgatgcccattctttctctcaagctaatgaagtcctatggcattctaaccacaaccctcggacagactcctcctattcctccatggcattgtaaccacaaccctcggacagactcctcctattcctccatggcattgtaaccacaaccctcggacagactcctcctactcctccatggcattgtaaccacaaccctcggacagactcctcctactcctccatggcattgtaaccacaaccctcggacagactcctcctactcctc

SEQ ID NO: 3547 - protein, 640 aa, Homo sapiens
MGRRSGLLGLRPGPEPVALERVINKVHLKANHVVKRDVDEHLRIKTVYDKSVEELLPEKKNLVKNKLFPQAISYLEKTFQVRRPAGTILLSRQCATNQYLRKENDPHRYCTGECAAHTKCGPVIVPEEHLQQCRVYRGGKWPHGAVGVPDQEGISDADFVLYVGALATERCSHENIISYAAYCQQEANMDRPIAGYANLCPNMISTQPQEFVGMLSTVKHEVIHALGFSAGLFAFYHDKDGNPLTSRFADGLPPFNYSLGLYQWSDKVVRKVERLWDVRDNKIVRHTVYLLVTPRVVEEARKHFDCPVLEGMELENQGGVGTELNHWEKRLLENEAMTGSHTQNRVLSRITLALMEDTGWYKANYSMAEKLDWGRGMGCDFVRKSCKFWIDQQRQKRQMLSPYCDTLRSNPLQLTCRQDQRAVAVCNLQKFPKPLPQEYQYFDELSGIPAEDLPYYGGSVEIADYCPFSQEFSWHLSGEYQRSSDCRILENQPEIFKNYGAEKYGPHSVCLIQKSAFVMEKCERKLSYPDWGSGCYQVSCSPQGLKVWVQDTSYLCSRAGQVLPVSIQMNGWIHDGNLLCPSCWDFCELCPPETDPPATNLTRALPLDLCSCSSSLVVTLWLLLGNLFPLLAGFLLCIWH

SEQ ID NO: 3548 - DNA, 4047 bp, Homo sapiens
gcgcagaggcgtcacgcactccatggtaacgacgctcggcccgaagatggcggccgaatggggcggaggagtgggttactcgggctcaggcccgggccggagccggtggcgctggagcgggtctgtgtgggtccgaagcgttttactcctgttgggcgggctccgggccagcgccacatctactcccgtctccttgggcagttcccctccctgccggcaccacgtcccctctgacactgaggtcataaataaagttcatcttaaggcaaatcatgtggtcaagagagatgttgatgagcatttaagaatcaagactgtctatgataaaagtgttgaagagttgctccctgagaaaaagaatcttgtaaagaacaagcttttcccacaagcgatttcttatttagagaagacttttcaggtccgtcgacctgcgggcactatcttacttagcagacaatgtgcaacaaaccaatacctccggaaggaaaacgatcctcacaggtactgcaccggggagtgtgccgcacacacaaagtgcggccccgttattgttcctgaggaacatctccagcaatgccgggtctaccgtgggggtaagtggcctcatggagcagtgggtgtgccagaccaagaaggcatctcagatgcagactttgttctttacgttggtgctctggccaccgagagatgcagccatgaaaacatcatctcttatgcagcctattgtcagcaggaagcaaacatggacaggccaatagcaggatatgctaacctgtgtccaaatatgatctctacccagcctcaggagtttgttgggatgctgtccacagtgaaacatgaggttattcatgccctgggtttctctgctgggctgtttgcattctaccatgataaagatggaaatcctctcacttcaagatttgcagatggcctcccaccttttaattatagtctgggattatatcaatggagtgataaagtagttcgaaaagtggagagattatgggatgttcgagataataagatagttcgtcacactgtgtatctcctggtaacgcctcgtgttgttgaggaagcacgaaaacattttgattgtccagttctagagggaatggaacttgaaaatcaaggtggtgtgggcactgagctcaaccattgggaaaaaaggttattagagaatgaagcgatgactggttctcacactcagaatcgagtactctctcgaatcactctggcattaatggaggacactgggagacagatgctgagcccttactgtgacacgctcagaagtaacccactgcagctaacttgcagacaggaccagagagcagttgccgtgtgtaatttgcagaagttccctaagcctttaccacaggaataccagtactttgatgaactcagtggaatacctgcagaagatttgccttattatggtggctccgtggaaattgctgactactgccctttcagtcaggaattcagttggcatttaagtggtgaatatcagcgcagctcagattgtagaatattggaaaatcaaccagaaatttttaagaactatggcgctgaaaagtatggacctcattccgtttgtctaattcagaaatcagcattcgttatggagaagtgtgagaggaagctgagttacccagactggggaagcggatgctatcaggtttcttgttctcctcaaggtctgaaagtttgggtccaagatacttcatatttgtgtagtcgggctgggcaggtcctccctgtcagtatccagatgaatggctggattcacgatggaaacctgctctgcccatcatgttgggacttctgtgagctctgtcctccagaaacagatcctccagccactaacctgacccgagctctgccacttgatctttgttcctgttcctcgagcctggtggtcaccctctggcttctgctaggcaatctgtttcctctgctggctggatttcttctgtgtatatggcactaggaatggaaaagtggatcttcaagatattcttttatgttatgttcttgtgaacaaagcacaaagtttgagtgagtgccaacctatgcagatggtagaagtggcattcctggctttggcttggaagaattgacgaccatcagaccttgaagcagaacttcacagcagcctgtcctcatcagcaacccaaccaccttcatcagcaacccaaccaccttcatcagcaacccaaccacctcgtcagcaacccaaccacctcgtcagcaacccaaccacctcgtcagcaacccagccaccttcatcagcaacccaaccacctcatcagcaacccagccaccttcatcagcaacccaaccacctcatcagcaaaccaaccactttcatctgcaacccaaccactttcatcagcaactcaacaccttcatctgcaacccaaccaccttcatcagcaaaccaaccaccttcttcagcaacccaaccacctcatcttggagaaggagaaggaactgcaagccaccaagtcttcatttttcagggtttgtaatcttcccaaagttttcctttgaaaataggataatgggtggaattttcagagtgattacatacctcaacatttttattaacatacaacaatgggaaagttcatcatccatatactgcagtcacttaaacaacagccaattattgcaagattagaattggagatcttgtcctcaaaagtataaattgtcctttgagttatagaaaataatggaattgggatttctacatatcattattatacctattttaaatttaatggcagccaggcatggttccagctacttgggaggctgaggcaggaggatcgcttgagcccaggagttcaaggctgcagtgagctatgattgcaccactgtattccagcctgcacgatagagttagaccctgtatcttaaaaaaaaaaaaattaatggctggtatatagtaaacttaattcactgttcccattgttctaaagaatttttttaaataatgtttcattaaatcttatgatttaaccgtgcttgccctttttgccagctatgtggcagtttacggcagaactgctgtcagtgtgctggtagccctctattcatccctcctcagagcccagcttccagaactgctatcactgtgctggtagccctctgtattcatccctcttcagagctcagcttctggttgtattctccatgagtttaataatgacatgaaaaaatgtggaagccgagagagtaaaatactctgccctgtaaaaacatggaagacatgcaaacagaaaaaaaataattgtattgttttagataatacttaagacaactgtgaaacaacaaaaacacaactattcctttgtgaccgatgaagataaaaagaaattctggtaaagacgggtatgcagttttttaaaatgggttaagaaattgttgcagaagaatttctaacatctgaaaatggttttatgtttaagaaggatggtctgaattgtgtactaatagcaaggtataagtttggtgtagagcctatccagtagcgtccactgtaccacttttaagtaagactcagtccacagaagctggaagattgccttcgctttaaatatcctttaccttctgcatttgacactcctcctgttactacatagattccggtccccagaagcaattttacactggtactagagcttaccagccccatttagtaatttttaatggctagatgaggtttaacaagaatatgaaaagaaaaaagaaaaaatatattcatgaatgataggcgatgcccattctttctctcaagctaatgaagtcctatggcattctaaccacaaccctcggacagactcctcctattcctccatggcattgtaaccacaaccctcggacagactcctcctattcctccatggcattgtaaccacaaccctcggacagactcctcctactcctccatggcattgtaaccacaaccctcggacagactcctcctactcctccatggcattgtaaccacaaccctcggacagactcctcctactcctc

SEQ ID NO: 3549 - protein, 655 aa, Homo sapiens; identical to SEQ ID NO: 403

SEQ ID NO: 3550 - DNA, 5376 bp, Homo sapiens
gcactccatggtaacgacgctcggcccgaagatggcggccgaatggggcggaggagtgggttactcgggctcaggcccgggccggagccggtggcgctggagcgggtctgtgtgggtccgaagcgttttactcctgttgggcgggctccgggccagcgccacatctactcccgtctccttgggcagttcccctccctgccggcaccacgtcccctctgacactgaggtcataaataaagttcatcttaaggcaaatcatgtggtcaagagagatgttgatgagcatttaagaatcaagactgtctatgataaaagtgttgaagagttgctccctgagaaaaagaatcttgtaaagaacaagcttttcccacaagcgatttcttatttagagaagacttttcaggtccgtcgacctgcgggcactatcttacttagcaggtatgtcacatgaaacacagatcattttcttcagccgtttagtactctgcctttctcgttctatgaacatggcaaggtatgaaacttatactagaattttattatgcttgttcttagggacctaactgcaaggtatttaaaaagaataaaaaagcacctgctggataatcattctttccctgacctttcattgtgagatggtctactgaattttttctgggtgtagttgtcccctgttctccagatcacctttttccctctttcatgtggatacagtgttggctttatgaagtatttgggtgtttaaaaacccaaatcaagaggatttcctatagaacccaaattctttcttagctactttcctgactaaaatagtaacattattaatgaagtaatatagcagctaccagttggtttccatgtttttaactgctataaaatattctcttttttgtatttaaactttgatgtacaaatggactgaagacaatgtgcaacaaaccaatacctccggaaggaaaacgatcctcacaggtactgcaccggggagtgtgccgcacacacaaagtgcggccccgttattgttcctgaggaacatctccagcaatgccgggtctaccgtgggggtaagtggcctcatggagcagtgggtgtgccagaccaagaaggcatctcagatgcagactttgttctttacgttggtgctctggccaccgagagatgcagccatgaaaacatcatctcttatgcagcctattgtcagcaggaagcaaacatggacaggccaatagcaggatatgctaacctgtgtccaaatatgatctctacccagcctcaggagtttgttgggatgctgtccacagtgaaacatgaggttattcatgccctgggtttctctgctgggctgtttgcattctaccatgataaagatggaaatcctctcacttcaagatttgcagatggcctcccaccttttaattatagtctgggattatatcaatggagtgataaagtagttcgaaaagtggagagattatgggatgttcgagataataagatagttcgtcacactgtgtatctcctggtaacgcctcgtgttgttgaggaagcacgaaaacattttgattgtccagttctagagggaatggaacttgaaaatcaaggtggtgtgggcactgagctcaaccattgggaaaaaaggttattagagaatgaagcgatgactggttctcacactcagaatcgagtactctctcgaatcactctggcattaatggaggacactggctggtataaagcaaattacagcatggctgagaagttagactggggccgaggaatgggctgtgactttgtcaggaagagctgtaaattctggattgatcagcagagacaaaagagacagatgctgagcccttactgtgacacgctcagaagtaacccactgcagctaacttgcagacaggaccagagagcagttgccgtgtgtaatttgcagaagttccctaagcctttaccacaggaataccagtactttgatgaactcagtggaatacctgcagaagatttgccttattatggtggctccgtggaaattgctgactactgccctttcagtcaggaattcagttggcatttaagtggtgaatatcagcgcagctcagattgtagaatattggaaaatcaaccagaaatttttaagaactatggcgctgaaaagtatggacctcattccgtttgtctaattcagaaatcagcattcgttatggagaagtgtgagaggaagctgagttacccagactggggaagcggatgctatcaggtttcttgttctcctcaaggtctgaaagtttgggtccaagatacttcatatttgtgtagtcgggctgggcaggtcctccctgtcagtatccagatgaatggctggattcacgatggaaacctgctctgcccatcatgttgggacttctgtgagctctgtcctccagaaacagatcctccagccactaacctgacccgagctctgccacttgatctttgttcctgttcctcgagcctggtggtcaccctctggcttctgctaggcaatctgtttcctctgctggctggatttcttctgtgtatatggcactaggaatggaaaagtggatcttcaagatattcttttatgttatgttcttgtgaacaaagcacaaagtttgagtgagtgccaacctatgcagatggtagaagtggcattcctggctttggcttggaagaattgacgaccatcagaccttgaagcagaacttcacagcagcctgtcctcatcagcaacccaaccaccttcatcagcaacccaaccaccttcatctttcatctgcaacccaaccactttcatcagcaactcaacaccttcatctgcaacccaaccaccttcatcagcaaaccaaccaccttcttcagcaacccaaccacctcatcttggagaaggagaaggaactgcaagccaccaagtcttcatttttcagggtttgtaatcttcccaaagttttcctttgaaaataggataatgggtggaattttcagagtgattacatacctcaacatttttattaacatacaacaatgggaaagttcatcatccatatactgcagtcacttaaacaacagccaattattgcaagattagaattggagatcttgtcctcaaaagtataaattgtcctttgagttatagaaaataatggaattgggatttctacatatcattattatacctattttaaatttaatggcagccaggcatgttaatggctggtatatagtaaacttaattcactgttcccattgttctaaagaatttttttaaataatgtttcattaaatcttatgatttaaccgtgcttgccctttttgccagctatgtggcagtttacggcagaactgctgtcagtgtgctggtagccctctattcatccctcctcagagcccagcttccagaactgctatcactgtgctggtagccctctgtattcatccctcttcagagctcagcttctggttgtattctccatgagtttaataatgacatgaaaaaatgtggaagccgagagagtaaaatactctgccctgtaaaaacatggaagacatgcaaacagaaaaaaaataattgtattgttttagataatacttaagacaactgtgaaacaacaaaaacacaactattcctttgtgaccgatgaagataaaaagaaattctggtaaagacgggtatgcagttttttaaaatgggttaagaaattgttgcagaagaatttctaacatctgaaaatggttttatgtttaagaaggatggtctgaattgtgtactaatagcaaggtataagtttggtgtagagcctatccagtagcgtccactgtaccacttttaagtaagactcagtccacagaagctggaagattgccttcgctttaaatatcctttaccttctgcatttgacactcctcctgttactacatagattccggtccccagaagcaattttacactggtactagagcttaccagccccatttagtaatttttaatggctagatgaggtttaacaagaatatgaaaagaaaaaagaaaaaatatattcatgaatgataggcgatgcccattctttctctcaagctaatgaagtcctatggcattctaaccacaaccctcggacagactcctcctattcctccatggcattgtaaccacaaccctcggacagactcctcctattcctccatggcattgtaaccacaaccctcggacagactcctcctactcctccatggcattgtaaccacaaccctcggacagactcctcctactcctccatggcattgtaaccacaaccctcggacagactcctcctactcctccatggcattgtaaccacaaccctcggacagactcctcctattcctccatggcattgtaaccacaaccctcggacagactcctcctattcctccatggcattgtaaccacaaccctcggacagactcctcctattcctccatggcattgtaaccacaaccctcggacagactcctattcctccatggcattgtaaccacaaccctcggacagactcctcctattcctccatggcattgtaaccacaaccctcggacagactccttctgttcctcctttcctcgtccttccctgcttttcgtccattcagcatatagctattcagtactccattgaagaaattatgctaagtgagcaaagcaacataattactaagaattaattctgattatttggcactagagccaacagcaaccccagcacagaggaaagtcgcttttttttcaaatgcataaatttaaagtatgtatttgcatgcagttttaaatgggaggtatttgtcattgtgaaaagctgggaatctcaaacatagtcaacttaactaaaaagaagctaatacgtaatggtctgcgggccagtgctcattttctgcctatgttgtacatactttaaattgtgtaaattaaaagtcaaagcaaagagtctatttttaaagaaacttacaataatctaaacatatacttcttatgattatgaatcatcctgcaaagctgaatgaagaattttaccaaaaatacaatgaattaatcatatatttgagagtcacagtgataggttcgactatattttgactgttgtgtagtggcaccgtttaggtagtattgtttctgagcatggtgctttttatacttgaaatatatttttgctttattttttattgatataattatatttgcactaatggctttctgaagaaaatattatagatgacattttttgtatatatatttattaagcttgggaacctggtcgcccagtgttttctctggacaaatgtgaaactggataaagtatggataaagtcttgagttcctcagggt

SEQ ID NO: 3551 - protein, 452 aa, Homo sapiens
MDRPIAGYANLCPNMISTQPQEFVGMLSTVKHEVIHALGFSAGLFAFYHDKDGNPLTSRFADGLPPFNYSLGLYQWSDKVVRKVERLWDVRDNKIVRHTVYLLVTPRVVEEARKHFDCPVLEGMELENQGGVGTELNHWEKRLLENEAMTGSHTQNRVLSRITLALMEDTGWYKANYSMAEKLDWGRGMGCDFVRKSCKFWIDQQRQKRQMLSPYCDTLRSNPLQLTCRQDQRAVAVCNLQKFPKPLPQEYQYFDELSGIPAEDLPYYGGSVEIADYCPFSQEFSWHLSGEYQRSSDCRILENQPEIFKNYGAEKYGPHSVCLIQKSAFVMEKCERKLSYPDWGSGCYQVSCSPQGLKVWVQDTSYLCSRAGQVLPVSIQMNGWIHDGNLLCPSCWDFCELCPPETDPPATNLTRALPLDLCSCSSSLVVTLWLLLGNLFPLLAGFLLCIWH

SEQ ID NO: 3552 - DNA, 550 bp, Homo sapiens
atggactgaagacaatgtgcaacaaaccaatacctccggaaggaaaacgatcctcacaggtactgcaccggggagtgtgccgcacacacaaagtgcggccccgttattgttcctgaggaacatctccagcaatgccgggtctaccgtgggggtaagtggcctcatggagcagtgggtgtgccagaccaagaaggcatctcagatgcagactttgttctttacgttggtgctctggccaccgagagatgcagccatgaaaacatcatctcttatgcagcctattgtcagcaggaagcaaacatggacaggtaatctttcctccgggacttagtttccaagatctaatgtgggaactcttaaagcaaactgtatttttagtgttaagattacaggaatcttgcatttgccagattgcctctggtagacaggaatagcatgctgcctgggtttggagtggggttaggagaccgtgattagactgttattaatgtgataacccaagtttttagtcaaagtgaaagagagaaaagtgaagcacttcgtttgactt

SEQ ID NO: 3553 - protein, 55 aa, Homo sapiens
MEQWVCQTKKASQMQTLFFTLVLWPPRDAAMKTSSLMQPIVSRKQTWTGNLSSGT

SEQ ID NO: 3554 - DNA, 724 bp, Homo sapiens
caattccagcgtaggagaagttcctacagaagcactggcgtggtgcttctacgttcccgttagtatcagtgctctcttttgatcgcaggcctgtaatcagccttgatgtttttcacttgaagacattttgaactttttcttacagggtttctctgctgggctgtttgcattctaccatgataaagatggaaatcctctcacttcaagatttgcagatggcctcccaccttttaattatagtctgggattatatcaatggagtgataaagtagttcgaaaagtggagagattatgggatgttcgagataataagatagttcgtcacactgtgtatctcctggtaacgcctcgtgttgttgaggaagcacgaaaacattttgattgtccagttctagagggaatggaacttgaaaatcaaggtggtgtgggcactgagctcaaccattgggaaaaaaggttattagaggtcagtttgtttttaaattttcctagactttatttaatgaaaataattcataattatggtaaaacttattcaagcaggttataaactgaaaaatgtttacgtccctttaccccttcagctctccagatgcactttccagatacagtcactccttactttttttgtatatactttcataaatgttatatatgtatgtgtgtgcaaacacacgctgaattgtctattttttcatgggttcacatatttatgcaacttttt

SEQ ID NO: 3555 - protein, 31 aa, Homo sapiens
MIKMEILSLQDLQMASHLLIIVWDYINGVIK

SEQ ID NO: 3556 - DNA, 685 bp, Homo sapiens
tcacgcctgtaatcccagcacttcaggaggccaaggcgcacggatcacctgaggtcaccagtgccccctctgttgtgatacctcaggatccgtggtactatttctataatgactgatcatttggtgtctgtattagtcaaggttctccggagaaacagaaccaataggatgtgtgtatacatctatatatatgtacacacagagaaagaatatgagatgaggggaggaagaaatttccttttttctttttttttttttttttgagacagggtctcaccctgaccaacatggtgaaacccccgtcttacaaaaaaataaacaaaattagctgggcgtggtggtgcgtgcctgtagtctcagccactcgggaggcagaagtaggaggatcactttggcgcaggagacagaggttgcagtgagccgaaaacactacactccagcctgggtgacagagtgagaccctgtatcaaaaaaaaaaaaaaagaaagaaagaaaataaaagaaaaaaagaaatctcttcctcccctcctctctcgtattctttctttgtgtatacagatgtatagatatatacacacatcctattggttctgtttctctggagaaccttgactaatacagacaccaaagaaaatgatcagtcattatagaaatagtaccagtggtcctaagaggcatcacaaca

SEQ ID NO: 3557 - protein, 43 aa, Homo sapiens
MVKPPSYKKINKISWAWWCVPVVSATREAEVGGSLWRRRQRLQ

SEQ ID NO: 3558 - DNA, 519 bp, Homo sapiens
tgaggaccctgagggcagaggtgaggtcccgccttcccacgctgtcagcaggcgtcacatcacggtggaaactagctgaagaccctgagggcagagatgaagtcccgccttcccacgctgtcagcaggcgtcacagtggaacagtgatgctttcagacatgtgtcaaagcccacagaatgtagaacacccagagtgaaccctaatgtgaacatggacttcggatgatgatgtcggttcatcgaaacacccagagtgaaccctaatgtgaacatggacttcggatgatgatgtcggttcattgaaaacacccagagtgaaccctaatgtgaacatggactttggatgatgatgtgggttcatcgattgtaccaaaaatgcctctgtggtacaggatgctgacggtgcggaaggccacgagtgtgtggagcaggggtatatgggaactctctgtaccttccacttaaatttgttgtgaacctaaaattgctctaaaaaataaagtctattaataataataa

SEQ ID NO: 3559 - protein, 30 aa, Homo sapiens
RCGRPRVCGAGVYGNSLYLPLKFVVNLKLL

SEQ ID NO: 3560 - DNA, 530 bp, Homo sapiens
gccattaaatttaaaataggaaaactttgggaagattacaaaccctgaaaaatgaagacttggtggcttgcagttccttctccttctccaagatgaggtggttgggttgctgatgaggacaggctgctgtgaagttctgcttcaaggtctgatggtcgtcaattcttccaagccaaagccaggaatgccacttctaccatctgcatagtgccatatacacagaagaaatccagccagcagaggaaacagattgcctagcagaagccagagggtgaccaccaggctcgaggaacaggaacaaagatctagagttgaaaacaaaaaactgactttctataaacaattttgggataaatcataccaattaaatattgacagatgaagagcagtgattattaaaaagtaaacaaggaccaccttgagagctaaatcaagagcaaaacccaggtataaaaaagtttttgtttcttttttaatggaggaaaaatatatatggaggaagaaatgatgtatccactatgtcaaggtta

SEQ ID NO: 3561 - protein, 31 aa, Homo sapiens
MRTGCCEVLLQGLMVVNSSKPKPGMPLLPSA

SEQ ID NO: 3562 - DNA, 525 bp, Homo sapiens
gatctttgttcctgttcctcgagcctggtggtcaccctctggcttctgctaggcaatctgtttcctctgctggctggatttcttctgtgtatatggcactaggaatggaaaagtggatcttcaagatattcttttatgttatgttcttggacgctgactggacagagaggagcctgtctctcagggcacatgagtcgtcgtggcaggaggagacgggcctcagtcacagtgtcacagacccttgtcacagtggacactagtcattcctgccatgtccttgcagcccaggaggactaaaaagattttaatgaagtctgtgttactcattctgaagaaaagaacttacctgagaggagtaatatttttttaatatatattgggtcagggacagggatggagtggttgttttatgtttacatttttaataagtaaaatagaagatttaagaactaatatttatggtattgaactttaagtgtgatatattccttagaaaaacacaactttaataaaaatggaaactaa

SEQ ID NO: 3563 - protein, 55 aa, Homo sapiens
MALGMEKWIFKIFFYVMFLDADWTERSLSLRAHESSWQEETGLSHSVTDPCHSGH

SEQ ID NO: 3564 - DNA, 5014 bp, Homo sapiens
agacatctgagaaacaaaacaagcaaattaattttccacttttgcacctgcaaaaaaatgtctcaagaaccagaactgagtaagaattgtgataaagagtgtttatctgtatattcagggcttcctttaaaattaattacaagaaagttcaactgaaaattggtgaaagttttgaaaaatccaaaattactgtttgtcctgaggaagagctcttacatagttactctaaagagggacaaaattaaaggaagtgccctctaacccaatgaatcatgtccctgactgcaaggaagcagatgcatcttggagtgtcgaactctgtagtatcccaggcattgcctgaacaggaggagaacatcacaaacctgtcttttcattgtatttatactctgggtccctcaaacacacctgccagtcatcttctaagctttattcaaatgaaaataaatcagactgtaaaacttgtaactatccagacatgtagcctgtttctcagagatgaagagaattgttgtaatgatacagaaatagaaaaattagggaacccagtagttatggttgaaatgaaagaggaccaagagtttgatatgcaaatgacaaaaaaatataaaccaaaataccgttaattggaaattagacattagacattggcctcagtctagagatccaaaaagtctgtttgatttgtggtttgtttactctaaagaaatgaagcatgtgatacagatagaaagccacagtatttctgctgttacagacacttacaaaaacaaaaatccagtaagcacttgttccacaagccatatggaacttagaagctcttctaaagcttagaagatgactggcaagtatgtttcagggagccacataagacagttccactgctaatagctataaaagcatgaaacctgcatgagaaaatgtgagttattctccaccccatagtgacagaacatcaaaagcatatctagaagaagacttacagcaagatatgcaaaggcttaagaatgaggtgggcatgttacaagtagagttcctggctttgaagaaagaaagcttaactataaaaagaaagaggttcacttgctgcttctctttttataaattatctgattcattctggttttctactcaagaaaatctcatgtgtctagttacagtgtggttatctaaatgcataattatgtgtctaagtagatcagtgctgctatctaaatgacagttctggaaaacactctcataatctttgttcattagtcaacctgagtctcactatcagtcttccaagtggcacatgggctgggaaaataatttagccatatgccatgtgaccttctgaatcagctaaacataaagaaaattgctaaagaaataagctctagattcttcttactgtattcatttaaagatgacttacatttatttaaatgataaaatggtaacacgatgggagggaaacaatgactgagaagagacatgaaaatgtatctagcctggagacttgtaacaaatattatcagccaaaggcgtctgtttaatgtgctttcatgcatgcaagtttatttgtctgactcaagctgtttaaacttataattccataatggccattttaaatatttttggaaacaaatacatatacttttgcatatttaaaaaaaatcaccactctccaatgtttctgttgaatcacacttttacattatgttgtttaataaaatatggtaagttttgacatgtatgattttatcatgtaagtagcataacttctcagccaaatatttatcatttgactctatagtggaaagctgagttctgtacattgtgttctaaagatagacaaaaatctagagattttcttaaaagcagatgaggcctcctgccatcctctgaggcattaaattgctttgccaaagtcacgcttttaatttatttgactaatttgatatatttatctggtaatttatgtaatgcagcaatatgtaattgtatcttcccttttggtgccatgaagtgctaggtaatgccaccttaggagctttgggtgaattatttaatatttattggttttacttctattatcaagtagataatggggctagagtagacaactattctgtatatcttccagctataaacttttgtggtgattgaatgtaaacttggggaacatctcattttctaggattctgcactagcaactcagcagtgtcactctgctccttgagttgtggtaaactttggttcctctatttcagtgagcaccttcacttttttgatatcccaggatccaagtgaaaaaataaggataaaagacagtggggaaaataacagcttagtgcagaacagggaaagcttcttttctgtttctgaagccccacaaggtcacctcctctcaatctggctatttcatggagaatccaggtgacaaagacagaagacacattttatgtctgtgtctttttgtttctctgtttttgtgttgatatatttacaccacagaagtaactgtgatctggtggagaactagaagtagagtcagaagccctgggaacatcctgcagcttgcttatatttttaacctctctttttaagaattgtgataagaaattcatcaatgtatgtacgtagaagtgcttagtacaatgtctagatttatgatttagtaaatgaaattcttataactgactaaaaatgttgagtcaaatcacaatagaatattatcagggaaacagaacttctaaaactttgagaaattttatcggtccaaatacacgtggaggtaaagctcttactacagggtggtatctgggttagatatcagagtataaatgcaatttcctttttccaatattttaatttagtcaaatttgttaatattttactttatgctttgagtttgttgtaattcagagaaaggcttttccaattctgatattcttaacagttctctagtgtgtatgtgtgtgtttttagttttatggattcattgacttcaaataaagttttgaactttttgaaatttatgctctttaaggttcaaggttttgcttcaactttttctccagttggatatccacttacagcaacttttaattgcatgaatgtacaggttgttctttcacttcagagataaacatgatatgttattttattgagtgctagctgaaaatttcttttgttttatttaagattttcaaagttatagaaaaaagaaggatgtgatatatacaaattgcatattgaagggagatattgccacactcaaacaggaataatacacaataaaaaatgacagtgtcaaaaaggaaaaggaatatattcaggaaattaagagtattagagaaataaatgctaactttgaaaaaagtgcaagactcaatgaggaaatgacaacaaaaacgatgtcccagtattgtcaacagcttaatggcctcaaagctgagaatacaaggctgaattcaaaattggagaaggaagaacaccacacagatggactggaagctgaagttgaattcttccattctaggctggctgctgctataaatgagcacaatgaaagtttagaaacgaaagacctagaacttgttttacagagagcacataatttttccgtacataaaaaaataagttctactgtttctcaactaaaagataaaaatgagttgcttactgaacaattttctaaagctcagatgaagttcaataccttaaaaggtaagctccatgagataagagatgctctcagggaaaagacattggctttagaaagtgtacagatggaccaaaggcaagcacagcatcgaataaaggaaatggagcagattcatccaaatgaggaaactaaaggagtcgatccaccggaaagcacaactgtgtagaggagagactatgtcaactagaatgtgacagtctcttgcttcaacgacaactagagggtgctcataaggaaggcaatgataaagagatagtaattaatatccaaggaggctgtcttgagagtggaaagatcttctagaagagaaaaataagaaactaatgaatgaatataattctataaaagaaaaactgtttcagtatgtaaaagaagaaggagaagtaagtatgaagaaagataaatatatttaaccttccagaaagaaaatttaaacatttcattgtggctatatgttgaatctagttcaatataataataaatagatgaaaatgtatttaccatactgtataattccattaacatgaaacatccagaaaagacatgtatagggacagaaagaagatgaatgtttctgtagggctggggctggaaatgggtcgtgactgctgatgggcatgagggatcatcctggagtgatgaaaatgttctaaagctggattgtaaagatgactgcacgactggtaaatttactaaaaatctttgaactgtatgttaaaacagataaattctgtagtatgtaaatcatattttagcaaagctgttttaataaaaaaacaaaaaaaatatgtttactgtatcagcttggaaacataccttgtttccaggaaataaaaggtagagctgacagatgctttcctttgagtaaacacattatgtcacctatgaaattttagtagctacagagtaatgttcatacagtatgtagtcttatactgctgaaataataaatttaatgtctttatgttgtcacattttaagaccataatgaagcagataaattgatatcttgtacctgaaataagtattttgaaattaagattcaattaagtgagccactttgacacttaattctagatttcccagatgaactgaagtgtgttgctctgtcttgtggtgcttttccttcagtggctcttttatgtattttagttggcataactttattttgattcatatcaatgtgacttaagtctgaaaatatgtcagtctcacattatgtatttttctgaccacttaatattttaaagacatctacttgttataaaatcacaatttggaataaatgtggtaaattttagc

SEQ ID NO: 3565 - protein, 163 aa, Homo sapiens
MTTKTMSQYCQQLNGLKAENTRLNSKLEKEEHHTDGLEAEVEFFHSRLAAAINEHNESLETKDLELVLQRAHNFSVHKKISSTVSQLKDKNELLTEQFSKAQMKFNTLKGKLHEIRDALREKTLALESVQMDQRQAQHRIKEMEQIHPNEETKGVDPPESTTV

SEQ ID NO: 3566 - DNA, 2940 bp, Homo sapiens
cgggcgctgagctgcaggcgcgcgcctaacggcttcgcgggctgagaggtcagaggctgcgagtgtcgctgctgaaggctgtggtggacccggccgggtcgcggattctgagctacatctcgggtttggggttagggttagtggaaaggccacgaggagccgcgggggctcaggagccggtggtgggcgtctgaggagaagtcgccccatgaggaagctcttcagcttcgggagacgcccgggccgggcggtcctgggctccatcgaccacgagtacccgggtcccgcgtaccacaccagggacgcggaactgcggaagatccacagggcggccctcaagggcgacgccgcggaggtggagcgccgcctggcgcgcaggtgccgggacgtggatgcccaggacaggactgttctacatttggcctgtgcccacggccgtgtgcaagtggtcactctcttgctgagcagaaaatgtcagatcgacatctgtgacagactaaacaggacgcctttaatgaaggctgtatattgccaggaagagacgtgttccattattctgctggaacatggcaccagtccaaacattaaggacgtctacagcaacactgctcttcatgatggtaaacattgaggatgtctacggcaacactgctcttcatgatgctgtctatgataaggggacttcactggcaggaagcctgctttcccaccatgcaaatactgaagcactaaacaaggagggaaatacaccacttttgcttgctgtaatttgtaagagacagtaaatggtggcatttttagtgaagaaccagcattcaacaacaaattttggaacctaaaaataagtactttaaaatcatcttcaaaatgacaattaagcctaccattgactggaagccttgctgataacacaagcagtccatgaacgcatatttgaagcagcagccatgaagaacgaaagttttagaaaaggaggagcaatttcaaaataaacaacagctatgaagcctgcaaatttgtaaaaaggagaagaaggtgcaaaagaacacgacttaaaagtggcttcagaggaaaagcaagaaacgcttgaaagaagtgaaaataaacagccagagattttcaaagttatagaaaaaagaaggatgtgatatatacaaattgcatattgaagggagatattgccacactcaaacaggaataatacacaataaaaaatgacagtgtcaaaaaggaaaaggaatatattcaggaaattaagagtattagagaaataaatgctaactttgaaaaaagtgcaagactcaatgaggaaatgacaacaaaaacgatgtcccagtattgtcaacagcttaatggcctcaaagctgagaatacaaggctgaattcaaaattggagaaggaagaacaccacacagatggactggaagctgaagttgaattcttccattctaggctggctgctgctataaatgagcacaatgaaagtttagaaacgaaagacctagaacttgttttacagagagcacataatttttccgtacataaaaaaataagttctactgtttctcaactaaaagataaaaatgagttgcttactgaacaattttctaaagctcagatgaagttcaataccttaaaaggtaagctccatgagataagagatgctctcagggaaaagacattggctttagaaagtgtacagatggaccaaaggcaagcacagcatcgaataaaggaaatggagcagattcatccaaatgaggaaactaaaggagtcgatccaccggaaagcacaactgtgtagaggagagactatgtcaactagaatgtgacagtctcttgcttcaacgacaactagagggtgctcataaggaaggcaatgataaagagatagtaattaatatccaaggaggctgtcttgagagtggaaagatcttctagaagagaaaaataagaaactaatgaatgaatataattctataaaagaaaaactgtttcagtatgtaaaagaagaaggagaagtaagtatgaagaaagataaatatatttaaccttccagaaagaaaatttaaacatttcattgtggctatatgttgaatctagttcaatataataataaatagatgaaaatgtatttaccatactgtataattccattaacatgaaacatccagaaaagacatgtatagggacagaaagaagatgaatgtttctgtagggctggggctggaaatgggtcgtgactgctgatgggcatgagggatcatcctggagtgatgaaaatgttctaaagctggattgtaaagatgactgcacgactggtaaatttactaaaaatctttgaactgtatgttaaaacagataaattctgtagtatgtaaatcatattttagcaaagctgttttaataaaaaaacaaaaaaaatatgtttactgtatcagcttggaaacataccttgtttccaggaaataaaaggtagagctgacagatgctttcctttgagtaaacacattatgtcacctatgaaattttagtagctacagagtaatgttcatacagtatgtagtcttatactgctgaaataataaatttaatgtctttatgttgtcacattttaagaccataatgaagcagataaattgatatcttgtacctgaaataagtattttgaaattaagattcaattaagtgagccactttgacacttaattctagatttcccagatgaactgaagtgtgttgctctgtcttgtggtgcttttccttcagtggctcttttatgtattttagttggcataactttattttgattcatatcaatgtgacttaagtctgaaaatatgtcagtctcacattatgtatttttctgaccacttaatattttaaagacatctacttgttataaaatcacaatttggaataaatgtggtaaattttagc

SEQ ID NO: 3567 - protein, 140 aa, Homo sapiens
MRKLFSFGRRPGRAVLGSIDHEYPGPAYHTRDAELRKIHRAALKGDAAEVERRLARRCRDVDAQDRTVLHLACAHGRVQVVTLLLSRKCQIDICDRLNRTPLMKAVYCQEETCSIILLEHGTSPNIKDVYSNTALHDGKH

SEQ ID NO: 3568 - DNA, 2155 bp, Homo sapiens
cgggcgctgagctgcaggcgcgcgcctaacggcttcgcgggctgagaggtcagaggctgcgagtgtcgctgctgaaggctgtggtggacccggccgggtcgcggattctgagctacatctcgggtttggggttagggttagtggaaaggccacgaggagccgcgggggctcaggagccggtggtgggcgtctgaggagaagtcgccccatgaggaagctcttcagcttcgggagacgcccgggccgggcggtcctgggctccatcgaccacgagtacccgggtcccgcgtaccacaccagggacgcggaactgcggaagatccacagggcggccctcaagggcgacgccgcggaggtggagcgccgcctggcgcgcaggtgccgggacgtggatgcccaggacaggactgttctacatttggcctgtgcccacggccgtgtgcaagtggtcactctcttgctgagcagaaaatgtcagatcgacatctgtgacagactaaacaggacgcctttaatgaaggctgtatattgccaggaagagacgtgttccattattctgctggaacatggcaccagtccaaacattaaggacgtctacagcaacactgctcttcatgatggtaaacattgaggatgtctacggcaacactgctcttcatgatgctgtctatgataaggggacttcactggcaggaagcctgctttcccaccatgcaaatactgaagcactaaacaagaaacaacagctatgaagcctgcaaatttgtaaaaaggagaagaaggtgcaaaagaacacgacttaaaagtggcttcagaggaaaagcaagaaacgcttgaaagaagtgaaaataaacagccagagattttcaaagttatagaaaaaagaaggatgtgatatatacaaattgcatattgaagggagatattgccacactcaaacaggaataatacacaataaaaaatgacagtgtcaaaaaggaaaaggaatatattcaggaaattaagagtattagagaaataaatgctaactttgaaaaaagtgcaagactcaatgaggaaatgacaacaaaaacgatgtcccagtattgtcaacagcttaatggcctcaaagctgagaatacaaggctgaattcaaaattggagaaggaagaacaccacacagatggactggaagctgaagttgaattcttccattctaggctggctgctgctataaatgagcacaatgaaagtttagaaacgaaagacctagaacttgttttacagagagcacataatttttccgtacataaaaaaataagttctactgtttctcaactaaaagataaaaatgagttgcttactgaacaattttctaaagctcagatgaagttcaataccttaaaaggtaagctccatgagataagagatgctctcagggaaaagacattggctttagaaagtgtacagatggaccaaaggcaagcacagcatcgaataaaggaaatggagcagattcatccaaatgaggaaactaaaggagtcgatccaccggaaagcacaactgtgtagaggagagactatgtcaactagaatgtgacagtctcttgcttcaacgacaactagagggtgctcataaggaaggcaatgataaagagatagtaattaatatccaaggaggctgtcttgagagtggaaagatcttctagaagagaaaaataagaaactaatgaatgaatataattctataaaagaaaaactgtttcagtatgtaaaagaagaaggagaagtaagtatgaagaaagataaatatatttaaccttccagaaagaaaatttaaacatttcattgtggctatatgttgaatctagttcaatataataataaatagatgaaaatgtatttaccatactgtataattccattaacatgaaacatccagaaaagacatgtatagggacagaaagaagatgaatgtttctgtagggctggggctggaaatgggtcgtgactgctgatgggcatgagggatcatcctggagtgatgaaaatgttctaaagctggattgtaaagatgactgcacgactggtaaatttactaaaaatctttgaactgtatgttaaaacagataaattctgtagtatgtaaatcatattttagcaaagctgttttaat

SEQ ID NO: 3569 - protein, 140 aa, Homo sapiens; identical to SEQ ID NO: 3567

SEQ ID NO: 3570 - DNA, 835 bp, Homo sapiens
attttctgtagagtcagggcttcactatggtctccaggctgctcttaaactcttggcttggagcagttctccttcctgggccttccaaagtgctgagattacaggtgtgagctactgtgcccagcctacattcagagtcttaaaacacgaaaataaatttgtcagaatagtagaggaaaacatttcagatgtaaaaatcaggatatacactaataaaggtataatggtaacaaaattttgcaaattattagtaaataacaactcacttagcatgttgttgaaaagatactattatgaagtagagaataaagtattactttatatgtttttactatatttttaaattttactttgtttccagcagttttgcttatttattttgcgtggaataatttgtgggtgaccctgagacttttgcatggcttgaacctgctgatatctagtgtctccttaagtggtttgttgaggttttagataattagaagtatttctttaaaatgtaaatattccagtaaacattaagcttcatttaaactctccatttataaaataaaagtatatgttattttgtatccatttttataaagattatagtctttatctaagtgttctaagtcattcattttaactaaacatatggatttgtctgcagaacacgacttaaaagtggcttcagaggaaaagcaagaaacgcttgaaagaagtgaaaataaacagccagagattttcaaagttatagaaaaaagaaggatgtgatatatacaaattgcatattgaagggagatattgccacactcaaacaggaataatacacaataaaaaatgacagtgtcaa

SEQ ID NO: 3571 - protein, 39 aa, Homo sapiens
MDLSAEHDLKVASEEKQETLERSENKQPEIFKVIEKRRM

SEQ ID NO: 3572 - DNA, 526 bp, Homo sapiens
acgtgaatgggccacaacatctaaaggaactggggcacctgggagttttcatttccattatttcacttggagccagtggttttcagagcggggggccagtggcaccacagagctgcctttgaatgaccttggatgagcgactattcacccccattatattctccatctgtcagatggagactgtgatgtaaaccccatgtggctgggaggactaaccaaggtccacatctccagggccgctcttagctcagagtctttctgagggaaactgcctggcaccagtccgtgttgaaggtgtcagcctattggaacctgccctctcagataggtaagatccaaagatgtcagccgcaagcttccagtccctggatgagaacttagagtagggccaagagagctctctcagggataaaaatagagttgctgtgaagatgaagtaaatgaagacatgctgagaactcagaacaacgcttggcaacagtaattgtttaatacgtgctattattaacaagtaatagtctttccc

SEQ ID NO: 3573 - protein, 44 aa, Homo sapiens
REWATTSKGTGAPGSFHFHYFTWSQWFSERGASGTTELPLNDLG

SEQ ID NO: 3574 - DNA, 1935 bp, Homo sapiens
agggcccggagccggcgagtgctcccgggaactctgcctgcgcggcggcagcgaccggaggccaggcccagcacgccggagctggcctgctggggaggggcgggaggcgcgcgcgggagggtccgcccggccagggccccgggcgctcgcagaggccggccgcgctcccagcccgcccggagcccatgcccggcggctggccagtgctgcggcagaagggggggcccggctctgcatggccccggctgctgacatgacttctttgccactcggtgtcaaagtggaggactccgccttcggcaagccggcggggggaggcgcgggccaggcccccagcgccgccgcggccacggcagccgccatgggcgcggacgaggagggggccaagcccaaagtgtccccttcgctcctgcccttcagcgtggaggcgctcatggccgaccacaggaagccgggggccaaggagagcgccctggcgccctccgagggcgtgcaggcggcgggtggctcggcgcagccactgggcgtcccgccggggtcgctgggagccccggacgcgccctcttcgccgcggccgctcggccatttctcggtggggggactcctcaagctgccagaagatgcgctcgtcaaagccgagagccccgagaagcccgagaggaccccgtggatgcagagcccccgcttctccccgccgccggccaggcggctgagccccccagcctgcaccctccgcaaacacaagacgaaccgtaagccgcggacgcccttcaccaccgcgcagctgctggcgctggagcgcaagttccgccagaagcagtacctgtccatcgccgagcgcgcggagttctccagctcgctcagcctcactgagacgcaggtgaagatatggttccagaaccgccgcgccaaggcaaagagactacaagaggcagagctggagaagctgaagatggccgccaagcccatgctgccaccggctgccttcggcctctccttccctctcggcggccccgcagctgtagcggccgcggcgggtgcctcgctctacggtgcctctggccccttccagcgcgccgcgctgcctgtggcgcccgtgggactctacacggcccatgtgggctacagcatgtaccacctgacatagagggtcccaggtcgcccacctgtgggccagccgattcctccagccctggtgctgtacccccgacgtgctcccctgctcggcaccgccagccgccttccctttaaccctcacactgctccagtttcacctctttgctccctgagttcactctccgaagtctgatccctgccaaaaagtggctggaagagtcccttagtactcttctagcatttagatctacactctcgagttaaagatggggaaactgagggcagagaggttaacagatttatctaaggtccccagcagaattgacagttgaacagagctagaggccatgtctcctgcatagcttttccctgtcctgacaccaggcaagaaaagcgcagagaaatcggtgtctgacgattttggaaatgagaacaatctcaaaaaaaaaaaaaaaaaaaaaaaaaaaaaaaaaaaagaaaagagaaaaaaaagactagccagccaggaagatgaatcctagcttcttccattggaaaatttaagacaagttcaacaacaaaacatttgctctggggggcagggaaaacacagatgtgttgcaaaggtaggttgaagggacctctctcttaccagtaccagaaacacaattgtaaaattaaaaaaaaaaaaaaactctttctatttaacagtacatttgtgtggctctcaaacatccctttggaagggattgtgtgtactatgtaatatactgtatatttgaaattttattatcatttatattatagctatatttgttaaataaattaattttaagctac

SEQ ID NO: 3575 - protein, 303 aa, Homo sapiens; identical to SEQ ID NO: 407

SEQ ID NO: 3576 - DNA, 1412 bp, Homo sapiens
taagatgtggacatcgagccttcaacgtgggtatttttctcctggaatcttagtttcttcatttgcaaaaagtagacaggaacttctcccctgcggggttgcaatgggaattggagaaaatatatttcaagtgccttgcgcgatgcccggcaccgaggcacttggcggcactcaatatctgggcggctgagccccccagcctgcaccctccgcaaacacaagacgaaccgtaagccgcggacgcccttcaccaccgcgcagctgctggcgctggagcgcaagttccgccagaagcagtacctgtccatcgccgagcgcgcggagttctccagctcgctcagcctcactgagacgcaggtgaagatatggttccagaaccgccgcgccaaggcaaagagactacaagaggcagagctggagaagctgaagatggccgccaagcccatgctgccaccggctgccttcggcctctccttccctctcggcggccccgcagctgtagcggccgcggcgggtgcctcgctctacggtgcctctggccccttccagcgcgccgcgctgcctgtggcgcccgtgggactctacacggcccatgtgggctacagcatgtaccacctgacatagagggtcccaggtcgcccacctgtgggccagccgattcctccagccctggtgctgtacccccgacgtgctcccctgctcggcaccgccagccgccttccctttaaccctcacactgctccagtttcacctctttgctccctgagttcactctccgaagtctgatccctgccaaaaagtggctggaagagtcccttagtactcttctagcatttagatctacactctcgagttaaagatggggaaactgagggcagagaggttaacagatttatctaaggtccccagcagaattgacagttgaacagagctagaggccatgtctcctgcatagcttttccctgtcctgacaccaggcaagaaaagcgcagagaaatcggtgtctgacgattttggaaatgagaacaatctcaaaaaaaaaaaaaaaaaaaaaaaaaaaaaaaaaaaagaaaagagaaaaaaaagactagccagccaggaagatgaatcctagcttcttccattggaaaatttaagacaagttcaacaacaaaacatttgctctggggggcagggaaaacacagatgtgttgcaaaggtaggttgaagggacctctctcttaccagtaccagaaacacaattgtaaaattaaaaaaaaaaaaaaactctttctatttaacagtacatttgtgtggctctcaaacatccctttggaagggattgtgtgtactatgtaatatactgtatatttgaaattttattatcatttatattatagctatatttgttaaataaattaattttaagctac

SEQ ID NO: 3577 - protein, 61 aa, Homo sapiens
MWTSSLQRGYFSPGILVSSFAKSRQELLPCGVAMGIGENIFQVPCAMPGTEALGGTQYLGG

SEQ ID NO: 3578 - DNA, 671 bp, Homo sapiens
tttgctcactagattccctcagccttcaacaccttgagagcttgtttggaggccctagcaggggtgcaaagctactcatatacccttggctgaagaccagtcctcctctatcggggattgtcgtgagtgcagctttgggaaggacgcatatggagtggtgagggaggaaggggacacctgcctagccagccagatcagccgaatcaactttggcgatcaatggggtgacagatgtcacagccagatcaccctcacatccccctagccttgaacacctttccccatcttcttcacctggcactttttcttgtggcaggagatggcaggatgagattgtggtcttccatccacacagctaccccttcaccatgtgatctctgcataccagctaccttttgccttctgacatgaacggaagaagcctgcagccctcaccagaagcagatgctgatgccatgcttcttgtacagccggcagaactagctcagttgatcgtggataactgacataaggaaggcaaaagtgggtgaaggaggcctgctgaattgggaaattgttagacaacattctacaacggctgaacagtgcttgtcatttcagtgctgtacaagaatattaatgatgtggaaagctgtccattataataaagttcaaaaagaacttgcaaaata

SEQ ID NO: 3579 - protein, 59 aa, Homo sapiens
MSQPDHPHIPLALNTFPHLLHLALFLVAGDGRMRLWSSIHTATPSPCDLCIPATFCLLT

SEQ ID NO: 3580 - DNA, 525 bp, Homo sapiens
ccacagcctctgagtagatcctgacccagcattccatggcagtatcctttggaaagaaactttcaccaaacctgatgggaacctctcctcaaggactgctaagtcaggaaatggggtatgcagggtctggaagttggaagctggccgcatcccccaaatgagcaggtccaagacacttattcatacatcaggaaaaccagggtccagagatggagagaaatccaaggcttggagccacttggatggtcacccagggccatcagcatctactagccaggaggaggctgggacattcgggaggcaatggagagaaggaaatagaaggaagagggctggggctcccagcagtctaattacagggtcccaaggcccagcagtctttcagggagaaaaatcggtcggacttggacaaatcagctgcacagtgttaaccttccagagactgaactctctccccatttccaggaatctaatctttgatgtatctttgaataactttaaaaaaaataaatcctgaataatctt

SEQ ID NO: 3581 - protein, 119 aa, Homo sapiens
MSRSKTLIHTSGKPGSRDGEKSKAWSHLDGHPGPSASTSQEEAGTFGRQWREGNRRKRAGAPSSLITGSQGPAVFQGEKSVGLGQISCTVLTFQRLNSLPISRNLIFDVSLNNFKKNKS

SEQ ID NO: 3582 - DNA, 2373 bp, Homo sapiens
gtctactgcgctctaaaatatgaacgatgctttcttactgctgggttgtcggaggcggatgtgggatggtgctaacaaagcgcgtagccgaggcctggccatagtgggtgctgacaaaccgcttactgcctgcagggaccgagctcccggccgagggaggagggccgagcagggattcagattcttccgggccgatccctttctcagctccttccgccctgccgccgcccactgcgtgctgccttcgtccgtcccctcctcccccgctccttcccctccttcccctgctcccgcgccgcctcgcgtctcccgcccgctgtagccggcgaggagcgccgcacgttggccccggcgcgaggagctcccgggttcccgggcgggcactggagtaaggagctgcgagcgcagcccgaggcggggcacggcggaaggcgcggcgagagcggggtccctgcgagcgcagtcggaagggcgtccaggagaagggggacgccgtccccgcccctgcacggtgctcggccccctcgggctccgcgcgcggctacaacccggactgggcgcgcccccggcatcccgcatctctgcgcgcgtcccacatcccgcatccggcatcccagcggccgggcatgtagcagcggcagcaacggcggaatatgggcgggaaccactcccacaagccccccgtgtttgacgagaatgaggaagtcaactttgaccattttcagattctgcgggccattggtaaagggagttttggaaaggattgccaatgccgtttgttccttgagaatctaagtgaggaaagttgaaaaaaaacccataaacatcacaaaggcagctctttccagcaacatagacgtttgttgttttggtatgcatcgtgcagaagcgagacactaagaaaatgtatgcaatgaagtacatgaacaagcagaagtgcatcgagagggatgaggttcggaatgttttccgggagctgcagatcatgcaagggctggagcaccccttcctggtcaatctgtggtactccttccaggatgaggaggacatgttcatggtggtggacctgctcctgggaggcgacctgcgctaccatctgcagcagaatgtgcatttcacagaggggactgtgaaactctacatctgtgagctggcactggccctggagtatcttcagaggtaccacatcatccacagagacatcaagccagacaatatcctgctggatgaacacggacatgttcacattacagacttcaacatagcgacggtagtgaaaggagcagaaagggcttcctccatggctggcaccaagccctacatggctccagaagtattccaggtgtacatggacagaggccccggatactcgtaccctgtcgactggtggtccctgggcatcacagcctatgagctgctgcggggctggaggccgtacgaaatccactcggtcacgcccatcgatgaaatcctcaacatgttcaaggtggagcgtgtccactactcctccacgtggtgcaaggggatggtggccctgctgaggaagctcctgaccaaggatcctgagagccgcgtgtccagccttcatgacatacagagcgtgccctacttggccgacatgaactgggacgcggtgttcaagaaggcactgatgcccggctttgtgcccaataaagggaggttgaactgcgatcccacatttgagcttgaagagatgattctagaatccaagccacttcacaaaaagaagaagcgattggcaaagaacagatccagggatggcacaaaggacagctgcccgctgaatggacacctgcagcactgtttggagactgtccgggaggaattcatcatattcaacagagagaagctcaggaggcagcagggacagggcagccagctcttggacaccgacagccgagggggaggccaggcccaaagcaagctccaggacgggtgcaacaacaacctcctcacccacacctgcacccgtggctgcagcagctgagcccacacttgttgctgctcaacaggactgcactcgtctctgccctgcccacccagagcccctctttgtgccctgatggtccctgtctcacccctgaaaacatcagatgcagaaaaagccctggacttggagctgggaagcctgggttctggtcccatctccatgactgattcacgtgtgacctcagacaagtcacgccctctctgtgcctccgttttctgcatctgccaaaggggttaaacacttctgccccacttcaaattacaagattatggggagaacccaattaggtaggaaacatgaaaaacctttgatatttataaaatcatttttacgtgcaaaatataaccttaatatttgaagtg

SEQ ID NO: 3583 - protein, 367 aa, Homo sapiens
MYAMKYMNKQKCIERDEVRNVFRELQIMQGLEHPFLVNLWYSFQDEEDMFMVVDLLLGGDLRYHLQQNVHFTEGTVKLYICELALALEYLQRYHIIHRDIKPDNILLDEHGHVHITDFNIATVVKGAERASSMAGTKPYMAPEVFQVYMDRGPGYSYPVDWWSLGITAYELLRGWRPYEIHSVTPIDEILNMFKVERVHYSSTWCKGMVALLRKLLTKDPESRVSSLHDIQSVPYLADMNWDAVFKKALMPGFVPNKGRLNCDPTFELEEMILESKPLHKKKKRLAKNRSRDGTKDSCPLNGHLQHCLETVREEFIIFNREKLRRQQGQGSQLLDTDSRGGGQAQSKLQDGCNNNLLTHTCTRGCSS

SEQ ID NO: 3584 - DNA, 3816 bp, Homo sapiens
gtctactgcgctctaaaatatgaacgatgctttcttactgctgggttgtcggaggcggatgtgggatggtgctaacaaagcgcgtagccgaggcctggccatagtgggtgctgacaaaccgcttactgcctgcagggaccgagctcccggccgagggaggagggccgagcagggattcagattcttccgggccgatccctttctcagctccttccgccctgccgccgcccactgcgtgctgccttcgtccgtcccctcctcccccgctccttcccctccttcccctgctcccgcgccgcctcgcgtctcccgcccgctgtagccggcgaggagcgccgcacgttggccccggcgcgaggagctcccgggttcccgggcgggcactggagtaaggagctgcgagcgcagcccgaggcggggcacggcggaaggcgcggcgagagcggggtccctgcgagcgcagtcggaagggcgtccaggagaagggggacgccgtccccgcccctgcacggtgctcggccccctcgggctccgcgcgcggctacaacccggactgggcgcgcccccggcatcccgcatctctgcgcgcgtcccacatcccgcatccggcatcccagcggccgggcatgtagcagcggcagcaacggcggaatatgggcgggaaccactcccacaagccccccgtgtttgacgagaatgaggaagtcaactttgaccattttcagattctgcgggccattggtaaagggagttttggaaaggtatgcatcgtgcagaagcgagacactaagaaaatgtatgcaatgaagtacatgaacaagcagaagtgcatcgagagggatgaggttcggaatgttttccgggagctgcagatcatgcaagggctggagcaccccttcctggtcaatctgtggtactccttccaggatgaggaggacatgttcatggtggtggacctgctcctgggaggcgacctgcgctaccatctgcagcagaatgtgcatttcacagaggggactgtgaaactctacatctgtgagctggcactggccctggagtatcttcagaggtaccacatcatccacagagacatcaagccagacaatatcctgctggatgaacacggacatgttcacattacagacttcaacatagcgacggtagtgaaaggagcagaaagggcttcctccatggctggcaccaagccctacatggctccagaagtattccaggtgtacatggacagaggccccggatactcgtaccctgtcgactggtggtccctgggcatcacagcctatgagctgctgcggggctggaggccgtacgaaatccactcggtcacgcccatcgatgaaatcctcaacatgttcaaggtggagcgtgtccactactcctccacgtggtgcaaggggatggtggccctgctgaggaagctcctgaccaaggatcctgagagccgcgtgtccagccttcatgacatacagagcgtgccctacttggccgacatgaactgggacgcggtgttcaagaaggcactgatgcccggctttgtgcccaataaagggaggttgaactgcgatcccacatttgagcttgaagagatgattctagaatccaagccacttcacaaaaagaagaagcgattggcaaagaacagatccagggatggcacaaaggacagctgcccgctgaatggacacctgcagcactgtttggagactgtccgggaggaattcatcatattcaacagagagaagctcaggaggcagcagggacagggcagccagctcttggacaccgacagccgagggggaggccaggcccaaagcaagctccaggacgggtgcaacaacaacctcctcacccacacctgcacccgtggctgcagcagctgagcccacacttgttgctgctcaacaggactgcactcgtctctgccctgcccacccagagcccctctttgtgccctgatggtccctgtctcacccctgaaaacatcagatgcagaaaaagccctggacttggagctgggaagcctgggttctggtcccatctccatgactgattcacgtgtgacctcagacaagtcacgccctctctgtgcctccgttttctgcatctgccaaaggggttaaacacttctgccccacttcaaattacaagattatggggagaacccaattaggtaggaaacatgaaaaacctttgatatttataaaatcatttttacgtgcaaaatataaccttaatatttgaagtgacccccattccccaaagcaatcaaaccgtcatgactttgcaatttggcacatcctagcttgttagagggcacttccgaaaaacacagccctgacagcaaaataaaggtctgatatgttggccccttctatggaaacaacgctgccaaatcctggagcaaaacctgaagtgtcttcatgtgcattctctggcaggccacagtcctgagcttgtaagatggtgcagcatgcagaccagacttgtccccaaggtctcagcgctgcggtctcactcctcccctcatttaagaagactatccttaccttttagtttcagcagtcctcaccaccaccatatccccagtgctgggatggcacacaggtgtccattcagatgagagttgggtcgctgagcattggttactcctgcagagtgtaatcagcaccccatccaactggcccgaaagcccagacctgcagcagaactctccaactctctatcagctttcagggttttctctcctgggaagggtgtaaaatcagcttgtcagattcttcttacagagagtatccaatcggtattggtggagcggctccctatttatacaataggaagcatgggtgcttagaaagtttatttcaggaggaaaatgggttcacacaaaaagcaaactacattctggtctgctcagggagaagcttgcctttgaactggaagatgttgggatgagcagggaaagcttagactttggagtcaggtttgtgttcagaatccagccctgctggctactaactaactgggagaccttaggcaaagcatgcaatcgctctgaatggcagtttcctcatttttaaacagggataataaaactaatattgcaggggagttacagggttaaataagatcctgtgtgtaaccccaagcattggatgactcatagaatggccttttttgtcagcataatcgtcatcattatttagatactttcttccttcactcacccagcaggtcagttttctgtgcaaacaaacctgtttaggattcttccaaatgttcttcctggggtctttgatatttgtttgttacatcctgctgaagttcgactgtgtttttattttttcatccaacttccatttttcactttttacatgattactcaatccttggggctgtccatgtcatctcttagatttcttaaaagacattttaatgtatggttaggttttatatttttattttttaaaaaagaaatagtcagtgttttcctcctttcaaccgagactatttctggattgtgtgctcctcgtcagttgacttgttttgcacacttttctttacttcatgtccccatcaacaaccgtcctgctccccacctcccccaggaaataaggggcctgctcctctccctactgtgaccctggaggctcttaagatgatgatggttttttttattgggctgagttcacgaattaggggcaggagctggaagtcgccctaggaacaccagatttcctggttctgttcaagttggcatttcttgtttggaataaactatttcttggacattccttctca

SEQ ID NO: 3585 - protein, 414 aa, Homo sapiens; identical to SEQ ID NO: 409

SEQ ID NO: 3586 - DNA, 716 bp, Homo sapiens
gaatctggagctgacttagtcatgtttctgccttcagagagctacccagtgggggagatggacatgcaggggatgaggcaccagagagaacacaacactctctgccctcaaggagcttggagtcaagagaaaagggagacaactaagcaaaaatgcatgaggagatgaagagcatgggggaaatgaggaagcccctgtctagcctgggcaggagggagatggtaaggaagtgataatagcagaggcctattctgaggagtccactgtacctgtgaagagccttgtctggcacatgctccagaagtattccaggtgtacatggacagaggccccggatactcgtaccctgtcgactggtggtccctgggcatcacagcctatgagctgctgcggggctgggtaagacaggcacctgtgcggtacacacgaggggctgtgcagtgggggctcacgttgtacctggacgggcagagtcggcagggcccgcggtgcaggaaggagcactgggggagtcactgccccccaggtttcagtcctgatgcctgtgtgccgcctatgaacgccctgaacttctggtccaacccactcattgtacagatgggaaagaggcattcagtgggggagggtcttacacaaaggcccacagcggatcagtgacaagtcaaacatcaaagcgccttggcctcgtggtttcaaacactgtcctctttgaaccc

SEQ ID NO: 3587 - protein, 48 aa, Homo sapiens
MFLPSESYPVGEMDMQGMRHQREHNTLCPQGAWSQEKRETTKQKCMRR

SEQ ID NO: 3588 - DNA, 475 bp, Homo sapiens
tattaaataaattaattaattaattaattcagttaaaaaatacattgatgaatgaaaaaaaaagaaactgaatcagagctatatctcaatactagttgtataagttaaaaaccaaccccctaaaggatactacatatgtacatgtgtgaatgtacgcttatatgtatatatacagatttgtgtttacacacacacacacagacacacaatcttatggcatatattgtctgaccacaacggaaatgaattgaaaatcaacaaaaataaaacagctagaatagttagaacatactggccgggcacggtggctcatgcctgtaatcctagcactttgggaggccgaggcgggtggatcacgaggtcaggagatggagaccatcctggctaacacggtgaaaccccgtctctactaaaaatacacaatattagccaggcgtggtggcgggcgcctgcagtcccagctacttgggaggct

SEQ ID NO: 3589 - protein, 33 aa, Homo sapiens
MYAYMYIYRFVFTHTHTDTQSYGIYCLTTTEMN

SEQ ID NO: 3590 - DNA, 1377 bp, Homo sapiens
agtcctgagtcgtgccaccaaagttggctgacacgtcaagatgccctgggctttgtctgcaggtgctggagccacagtaacgaggagtccttcagcccctgctccttggcctggctttacctgcacttgcggcttctctggggtgctatcctgcactcagccctgatctactttctgggaacctttctgctatccatattgatcgcctggactgtgcagtatttccagtctgtctcagcaagcgatccccctccaagaccatcccaggcctccccagacactgccacgtccactgcaagtccagctgtgactccagctgcagatgcctctgaccaagaccagcccacagtaactaataacccggagccacgtgggtgaactgtgcactccagttctctccagatgagagagaatcttttcaacagctggtattgggaagctggggccagggcatgatcctgataaacaccttaaatgtcttgtcaactggatgcaaattttgcaattggtgtcattttttttaaagtcaaattacaaggaagtacccagatcaggcagtggtaataccaaaggtcatcaaacacatacaaggaacatcttgatcatagggcatgtggggaagtttactgggccatcacagacttttgttctagtgattgtatgtattaggagtcatagcatgccctacggcagatctggattcttatacactaagatgtgtcttaagaatcacagtgcgtgcttcatccctttattgaagaacagaaaattatgactactctacaaggtggataatattttggtacctgtgcttgccacagccctgttcctcaaagctgaattgatagatttctctttgacttccaagacctagcagttataaggcaccttgaaataaattgtttgtgcctggaaatgcagggagggcaatagctttgtaaattggtttacatttttctccttgaatttttctagggtcctagtgcttccgaatcatttaatggcattgtcggatatcttttacatttcaattgcaatccatgaaattacatttagaagattcttagtacttaactgtagtcttctccatgaattacacgttagaatagactggcagcaacggaatatgcagcaagtaagcctctagcttatagtttcatccctacccctcatgcctgcgtgagtctgtacagggatatgtgtgtgtgtgtgtgtgtgtgtgtgttagagaggaagaggaagagcagaatgtctgtatactacatgctgctaaggtagtgaataaatcagtaatgcaatattgtgggtccaaactactctttgcactactttatttacagtagtaaataaaattatttttatacaattgactaccag

SEQ ID NO: 3591 - protein, 94 aa, Homo sapiens
MQILQLVSFFLKSNYKEVPRSGSGNTKGHQTHTRNILIIGHVGKFTGPSQTFVLVIVCIRSHSMPYGRSGFLYTKMCLKNHSACFIPLLKNRKL

SEQ ID NO: 3592 - DNA, 2352 bp, Homo sapiens
aatctgtatgacaaacctgtacatgtacccctaaagttgaaacagaagttaaaaacaaaacacaaaaaacatgatcctgagttctttcaatggcaacaatccagtttaattggtcaagttctaatggtaagtaccacatcgtttattgcttgtttcttaatctggccacctgctcggcttgtgatggagggtgtgcattctccaggcagtgtaatagtacccatcctttatgaagcatgtctttggtcgggccctctaactgtgtttattttattggatccgtacagcccaataagacaggtcttacctctaaggatcaagaacaaggtgtcagaggaagaggtaggaaaatataccatagtgggaatctgtgccaagaggagtcatgagaagaggtttctgcaccagcctaggaaagttgagatgagtgcccttaggtgatcccgtgcaagggaggcaccgccttgggttgtcagtcattggaagccgccctagccacagaaatattttgtcagatttccaacagggctatggcaactgagggcatagtctgtaggcaatggacatggtattcgactcagtattcttgtttcgtttatgatacaagggcacgttttccagtaagttctattctgagagagtgagcgagaaaggacggatctcccggttgactggcttcggagcagatgggacacagcagcttctgaaagcctcctggttctcctgcaaataaatttctcagatgcatatatttagggaaacaattcatcaatgaagatgacaaaaccatctggctctagagacttaaaaaaaattttagaggttgtaaacatttacattctgatgaagagtgtgtgtctaggttttatttcaaggatttgatgagtttggtttgtggcttgtttttagggattttttaacctggccctgctaatcgaggaaggtacgataatcccacaccatatcttggatttcttggaaattgactcaactctccattctaataacatctccattctccaggaactgtacgaaaggtgctggagccacagtaacgaggagtccttcagcccctgctccttggcctggctttacctgcacttgcggcttctctggggtgctatcctgcactcagccctgatctactttctgggaacctttctgctatccatattgatcgcctggactgtgcagtatttccagtctgtctcagcaagcgatccccctccaagaccatcccaggcctccccagacactgccacgtccactgcaagtccagctgtgactccagctgcagatgcctctgaccaagaccagcccacagtaactaataacccggagccacgtgggtgaactgtgcactccagttctctccagatgagagagaatcttttcaacagctggtattgggaagctggggccagggcatgatcctgataaacaccttaaatgtcttgtcaactggatgcaaattttgcaattggtgtcattttttttaaagtcaaattacaaggaagtacccagatcaggcagtggtaataccaaaggtcatcaaacacatacaaggaacatcttgatcatagggcatgtggggaagtttactgggccatcacagacttttgttctagtgattgtatgtattaggagtcatagcatgccctacggcagatctggattcttatacactaagatgtgtcttaagaatcacagtgcgtgcttcatccctttattgaagaacagaaaattatgactactctacaaggtggataatattttggtacctgtgcttgccacagccctgttcctcaaagctgaattgatagatttctctttgacttccaagacctagcagttataaggcaccttgaaataaattgtttgtgcctggaaatgcagggagggcaatagctttgtaaattggtttacatttttctccttgaatttttctagggtcctagtgcttccgaatcatttaatggcattgtcggatatcttttacatttcaattgcaatccatgaaattacatttagaagattcttagtacttaactgtagtcttctccatgaattacacgttagaatagactggcagcaacggaatatgcagcaagtaagcctctagcttatagtttcatccctacccctcatgcctgcgtgagtctgtacagggatatgtgtgtgtgtgtgtgtgtgtgtgtgttagagaggaagaggaagagcagaatgtctgtatactacatgctgctaaggtagtgaataaatcagtaatgcaatattgtgggtccaaactactctttgcactactttatttacagtagtaaataaaattatttttatacaattgactaccag

SEQ ID NO: 3593 - protein, 105 aa, Homo sapiens
MVSTTSFIACFLIWPPARLVMEGVHSPGSVIVPILYEACLWSGPLTVFILLDPYSPIRQVLPLRIKNKVSEEEVGKYTIVGICAKRSHEKRFLHQPRKVEMSALR

SEQ ID NO: 3594 - DNA, 4521 bp, Homo sapiens
cggcaggtggccccgcgcgcggcggccggcccggccgggggcgggcgggaaggtggcgcctcgggcgggggccggtccctgcaccaggtgacctgttccggcccggatccgggcggcctcgccatgcagcggcgcggcgcggggctcgggtggccgcggcagcagcagcagcaacccccgccgctcgcggtcggcccccgggccgcagccatggtcccgagtggcggcgtcccccagggcctcggcggccgctctgcctgcgcgctgctcctgctctgctacctgaatgttgtaccatctttgggtaggcagacttccctgacgacatcagtgatacccaaagctgagcagagcgtggcttacaaagactttatttattttactgtctttgaaggaaacgttcgcaacgtttctgaagtctcggttgagtatttatgctctcagccttgtgttgtcaatttggaagcagttgtttcatctgagttcagaagtagcattcccgtgtacaaaaaaaggtggaagaatgagaaacatcttcacaccagcaggacacaaatagtacatgtgaaatttccaagcattatggtttacagagatgattatttcatcagacattccatctctgtatctgcagtgatagtacgcgcctggattactcacaaatacagtggcagagactggaatgttaaatgggaggaaaacttgctccatgctgtagcaaagaattataccctcctgcagaccatcccgccttttgaacgccctttcaaagatcatcaagtgtgccttgagtggaacatgggttatatttggaaccttcgggcaaacaggattccacagtgtcctctggaaaatgatgtggttgccctgcttggctttccttatgcctccagtggagaaaacacaggcattgtcaagaagttcccgaggtttcggaaccgagagctggaggccactcgacgccagaggatggattacccagtgtttactgtttcattgtggctttatttactccattattgcaaggccaacctctgtgggattctgtactttgttgactctaatgagatgtacggcacaccttctgtatttcttacggaagagggctatttgcatattcagatgcatcttgtcaaaggggaagaccttgctgtaaaaactaaattcatcatacctttgaaggagtggtttcgactggatatctcttttaacggaggccagatagtagtaaccactagcattggacaggatttgaaaagctaccacaatcagaccattagcttccgggaggatttccattataatgacacagctgggtacttcattattggagggagcaggtatgtggctggcattgaagggttttttggacccctgaagtactatcgccttcgcagtctgcaccccgcccagatttttaatcccctccttgagaagcaacttgctgaacaaatcaagttatattatgaaaggtgtgctgaggttcaagaaatagtatctgtgtatgcatctgcagcaaagcacgggggcgagagacaagaagcatgccacctccacaactcctacctggacctccagcgcaggtatgggagaccctcgatgtgcagagccttcccctgggagaaggagctgaaagacaaacaccccagcttgttccaggcattgctggagatggatctgctgaccgtgccaaggaaccaaaatgaatctgtatcagaaatcggtgggaagatatttgagaaggctgtaaagagactctctagcattgatggtcttcaccaaattagctctatcgtcccctttctgacggattccagctgctgtggataccataaagcatcctactaccttgcagtcttttatgagactggattaaatgttcctcgggatcagctgcagggcatgttgtatagtttggttggaggccaggggagtgagaggctgtcttcaatgaatcttgggtataaacactaccagggtattgacaactaccccctggactgggaactgtcgtatgcctactacagcaacattgccaccaagacaccccttgaccagcacacactgcaaggagatcaggcatatgttgaaacaattagactaaaagatgatgaaatactcaaggtacaaaccaaagaagatggagatgtctttatgtggttgaagcatgaagctacccgaggcaatgcagcagctcagcaacgattggcccagatgctgttctgggggcagcaaggtgtggccaagaatcccgaagcagcaattgagtggtacgccaagggcgccctggagacggaggatcctgcgttaatctatgactatgccattgtgctattcaagggtcaaggagtaaaaaagaacagacggcttgccttagagctgatgaagaaagcagcttccaagggattgcatcaggcagtcaatggcctgggatggtattaccacaaattcaagaaaaattacgccaaagcagcaaagtactggttaaaagcagaagaaatggggaacccagatgcgtcatacaatcttggagtcctgcatttggatggcatcttccctggagttcctggaaggaatcaaactttagctggtgaatatttccataaggctgcgcaaggtggacacatggaagggaccttgtggtgttctctctactatatcacaggcaacctggagacattccctagagatcctgagaaagctgttgtatgggcaaaacatgtagctgagaaaaatggctacttgggccatgtcatccgcaaaggcctcaatgcctacctggaaggttcatggcatgaagctttgctgtattatgttttagcagcagaaactggaattgaagtgtcacagacaaatttagcacacatctgtgaggagaggccagacctggccaggagatacttgggtgttaactgtgtttggagatactataatttctctgtttttcaaatcgatgctccttcctttgcatatttgaagatgggagacctttactactatggccaccaaaaccagtcacaagacctggagttgtctgtgcagatgtacgcccaagccgccctggatggagactcccagggattttttaacctggccctgctaatcgaggaaggtacgataatcccacaccatatcttggatttcttggaaattgactcaactctccattctaataacatctccattctccaggaactgtacgaaaggtgctggagccacagtaacgaggagtccttcagcccctgctccttggcctggctttacctgcacttgcggcttctctggggtgctatcctgcactcagccctgatctactttctgggaacctttctgctatccatattgatcgcctggactgtgcagtatttccagtctgtctcagcaagcgatccccctccaagaccatcccaggcctccccagacactgccacgtccactgcaagtccagctgtgactccagctgcagatgcctctgaccaagaccagcccacagtaactaataacccggagccacgtgggtgaactgtgcactccagttctctccagatgagagagaatcttttcaacagctggtattgggaagctggggccagggcatgatcctgataaacaccttaaatgtcttgtcaactggatgcaaattttgcaattggtgtcattttttttaaagtcaaattacaaggaagtacccagatcaggcagtggtaataccaaaggtcatcaaacacatacaaggaacatcttgatcatagggcatgtggggaagtttactgggccatcacagacttttgttctagtgattgtatgtattaggagtcatagcatgccctacggcagatctggattcttatacactaagatgtgtcttaagaatcacagtgcgtgcttcatccctttattgaagaacagaaaattatgactactctacaaggtggataatattttggtacctgtgcttgccacagccctgttcctcaaagctgaattgatagatttctctttgacttccaagacctagcagttataaggcaccttgaaataaattgtttgtgcctggaaatgcagggagggcaatagctttgtaaattggtttacatttttctccttgaatttttctagggtcctagtgcttccgaatcatttaatggcattgtcggatatcttttacatttcaattgcaatccatgaaattacatttagaagattcttagtacttaactgtagtcttctccatgaattacacgttagaatagactggcagcaacggaatatgcagcaagtaagcctctagcttatagtttcatccctacccctcatgcctgcgtgagtctgtacagggatatgtgtgtgtgtgtgtgtgtgtgtgtgttagagaggaagaggaagagcagaatgtctgtatactacatgctgctaaggtagtgaataaatcagtaatgcaatattgtgggtccaaactactctttgcactactttatttacagtagtaaataaaattatttttatacaattgactaccag

SEQ ID NO: 3595 - protein, 1132 aa, Homo sapiens; identical to SEQ ID NO: 411

SEQ ID NO: 3596 - DNA, 4376 bp, Homo sapiens
tcaaaatccatcctgaaggcctgggagccgggcagctgcgcggcacaactccagggggcacactcgccctgcgccctgcgggaatggcgccccggccaaaaaagcaaccagacaaaaacccattgcacgggcgggaactgaatgttgtaccatctttgggtaggcagacttccctgacgacatcagtgatacccaaagctgagcagagcgtggcttacaaagactttatttattttactgtctttgaaggaaacgttcgcaacgtttctgaagtctcggttgagtatttatgctctcagccttgtgttgtcaatttggaagcagttgtttcatctgagttcagaagtagcattcccgtgtacaaaaaaaggtggaagaatgagaaacatcttcacaccagcaggacacaaatagtacatgtgaaatttccaagcattatggtttacagagatgattatttcatcagacattccatctctgtatctgcagtgatagtacgcgcctggattactcacaaatacagtggcagagactggaatgttaaatgggaggaaaacttgctccatgctgtagcaaagaattataccctcctgcagaccatcccgccttttgaacgccctttcaaagatcatcaagtgtgccttgagtggaacatgggttatatttggaaccttcgggcaaacaggattccacagtgtcctctggaaaatgatgtggttgccctgcttggctttccttatgcctccagtggagaaaacacaggcattgtcaagaagttcccgaggtttcggaaccgagagctggaggccactcgacgccagaggatggattacccagtgtttactgtttcattgtggctttatttactccattattgcaaggccaacctctgtgggattctgtactttgttgactctaatgagatgtacggcacaccttctgtatttcttacggaagagggctatttgcatattcagatgcatcttgtcaaaggggaagaccttgctgtaaaaactaaattcatcatacctttgaaggagtggtttcgactggatatctcttttaacggaggccagatagtagtaaccactagcattggacaggatttgaaaagctaccacaatcagaccattagcttccgggaggatttccattataatgacacagctgggtacttcattattggagggagcaggtatgtggctggcattgaagggttttttggacccctgaagtactatcgccttcgcagtctgcaccccgcccagatttttaatcccctccttgagaagcaacttgctgaacaaatcaagttatattatgaaaggtgtgctgaggttcaagaaatagtatctgtgtatgcatctgcagcaaagcacgggggcgagagacaagaagcatgccacctccacaactcctacctggacctccagcgcaggtatgggagaccctcgatgtgcagagccttcccctgggagaaggagctgaaagacaaacaccccagcttgttccaggcattgctggagatggatctgctgaccgtgccaaggaaccaaaatgaatctgtatcagaaatcggtgggaagatatttgagaaggctgtaaagagactctctagcattgatggtcttcaccaaattagctctatcgtcccctttctgacggattccagctgctgtggataccataaagcatcctactaccttgcagtcttttatgagactggattaaatgttcctcgggatcagctgcagggcatgttgtatagtttggttggaggccaggggagtgagaggctgtcttcaatgaatcttgggtataaacactaccagggtattgacaactaccccctggactgggaactgtcgtatgcctactacagcaacattgccaccaagacaccccttgaccagcacacactgcaaggagatcaggcatatgttgaaacaattagactaaaagatgatgaaatactcaaggtacaaaccaaagaagatggagatgtctttatgtggttgaagcatgaagctacccgaggcaatgcagcagctcagcaacgattggcccagatgctgttctgggggcagcaaggtgtggccaagaatcccgaagcagcaattgagtggtacgccaagggcgccctggagacggaggatcctgcgttaatctatgactatgccattgtgctattcaagggtcaaggagtaaaaaagaacagacggcttgccttagagctgatgaagaaagcagcttccaagggattgcatcaggcagtcaatggcctgggatggtattaccacaaattcaagaaaaattacgccaaagcagcaaagtactggttaaaagcagaagaaatggggaacccagatgcgtcatacaatcttggagtcctgcatttggatggcatcttccctggagttcctggaaggaatcaaactttagctggtgaatatttccataaggctgcgcaaggtggacacatggaagggaccttgtggtgttctctctactatatcacaggcaacctggagacattccctagagatcctgagaaagctgttgtatgggcaaaacatgtagctgagaaaaatggctacttgggccatgtcatccgcaaaggcctcaatgcctacctggaaggttcatggcatgaagctttgctgtattatgttttagcagcagaaactggaattgaagtgtcacagacaaatttagcacacatctgtgaggagaggccagacctggccaggagatacttgggtgttaactgtgtttggagatactataatttctctgtttttcaaatcgatgctccttcctttgcatatttgaagatgggagacctttactactatggccaccaaaaccagtcacaagacctggagttgtctgtgcagatgtacgcccaagccgccctggatggagactcccagggattttttaacctggccctgctaatcgaggaaggtacgataatcccacaccatatcttggatttcttggaaattgactcaactctccattctaataacatctccattctccaggaactgtacgaaaggtgctggagccacagtaacgaggagtccttcagcccctgctccttggcctggctttacctgcacttgcggcttctctggggtgctatcctgcactcagccctgatctactttctgggaacctttctgctatccatattgatcgcctggactgtgcagtatttccagtctgtctcagcaagcgatccccctccaagaccatcccaggcctccccagacactgccacgtccactgcaagtccagctgtgactccagctgcagatgcctctgaccaagaccagcccacagtaactaataacccggagccacgtgggtgaactgtgcactccagttctctccagatgagagagaatcttttcaacagctggtattgggaagctggggccagggcatgatcctgataaacaccttaaatgtcttgtcaactggatgcaaattttgcaattggtgtcattttttttaaagtcaaattacaaggaagtacccagatcaggcagtggtaataccaaaggtcatcaaacacatacaaggaacatcttgatcatagggcatgtggggaagtttactgggccatcacagacttttgttctagtgattgtatgtattaggagtcatagcatgccctacggcagatctggattcttatacactaagatgtgtcttaagaatcacagtgcgtgcttcatccctttattgaagaacagaaaattatgactactctacaaggtggataatattttggtacctgtgcttgccacagccctgttcctcaaagctgaattgatagatttctctttgacttccaagacctagcagttataaggcaccttgaaataaattgtttgtgcctggaaatgcagggagggcaatagctttgtaaattggtttacatttttctccttgaatttttctagggtcctagtgcttccgaatcatttaatggcattgtcggatatcttttacatttcaattgcaatccatgaaattacatttagaagattcttagtacttaactgtagtcttctccatgaattacacgttagaatagactggcagcaacggaatatgcagcaagtaagcctctagcttatagtttcatccctacccctcatgcctgcgtgagtctgtacagggatatgtgtgtgtgtgtgtgtgtgtgtgtgttagagaggaagaggaagagcagaatgtctgtatactacatgctgctaaggtagtgaataaatcagtaatgcaatattgtgggtccaaactactctttgcactactttatttacagtagtaaataaaattatttttatacaattgactaccag

SEQ ID NO: 3597 - protein, 1097 aa, Homo sapiens
MAPRPKKQPDKNPLHGRELNVVPSLGRQTSLTTSVIPKAEQSVAYKDFIYFTVFEGNVRNVSEVSVEYLCSQPCVVNLEAVVSSEFRSSIPVYKKRWKNEKHLHTSRTQIVHVKFPSIMVYRDDYFIRHSISVSAVIVRAWITHKYSGRDWNVKWEENLLHAVAKNYTLLQTIPPFERPFKDHQVCLEWNMGYIWNLRANRIPQCPLENDVVALLGFPYASSGENTGIVKKFPRFRNRELEATRRQRMDYPVFTVSLWLYLLHYCKANLCGILYFVDSNEMYGTPSVFLTEEGYLHIQMHLVKGEDLAVKTKFIIPLKEWFRLDISFNGGQIVVTTSIGQDLKSYHNQTISFREDFHYNDTAGYFIIGGSRYVAGIEGFFGPLKYYRLRSLHPAQIFNPLLEKQLAEQIKLYYERCAEVQEIVSVYASAAKHGGERQEACHLHNSYLDLQRRYGRPSMCRAFPWEKELKDKHPSLFQALLEMDLLTVPRNQNESVSEIGGKIFEKAVKRLSSIDGLHQISSIVPFLTDSSCCGYHKASYYLAVFYETGLNVPRDQLQGMLYSLVGGQGSERLSSMNLGYKHYQGIDNYPLDWELSYAYYSNIATKTPLDQHTLQGDQAYVETIRLKDDEILKVQTKEDGDVFMWLKHEATRGNAAAQQRLAQMLFWGQQGVAKNPEAAIEWYAKGALETEDPALIYDYAIVLFKGQGVKKNRRLALELMKKAASKGLHQAVNGLGWYYHKFKKNYAKAAKYWLKAEEMGNPDASYNLGVLHLDGIFPGVPGRNQTLAGEYFHKAAQGGHMEGTLWCSLYYITGNLETFPRDPEKAVVWAKHVAEKNGYLGHVIRKGLNAYLEGSWHEALLYYVLAAETGIEVSQTNLAHICEERPDLARRYLGVNCVWRYYNFSVFQIDAPSFAYLKMGDLYYYGHQNQSQDLELSVQMYAQAALDGDSQGFFNLALLIEEGTIIPHHILDFLEIDSTLHSNNISILQELYERCWSHSNEESFSPCSLAWLYLHLRLLWGAILHSALIYFLGTFLLSILIAWTVQYFQSVSASDPPPRPSQASPDTATSTASPAVTPAADASDQDQPTVTNNPEPRG

SEQ ID NO: 3598 - DNA, 1296 bp, Homo sapiens
agtcctgagtcgtgccaccaaagttggctgacacgtcaagatgccctgggctttgtctgcaggtgctggagccacagtaacgaggagtccttcagcccctgctccttggcctggctttacctgcacttgcggcttctctggggtgctatcctgcactcagccctgatctactttctgggaacctttctgctatccatattgatcgcctggactgtgcagtatttccagtctgtctcagcaagcgatccccctccaagaccatcccaggcctccccagacactgccacgtccactgcaagtccagctgtgactccagctgcagatgcctctgaccaagaccagcccacagtaactaataacccggagccacgtgggtgaactgtgcactccagttctctccagatgagagagaatcttttcaacagctggtattgggaagctggggccagggcatgatcctgataaacaccttaaatgtcttgtcaactggatgcaaattttgcaattggtgtcattttttttaaagtcaaattacaaggaagtacccagatcaggcagtggtaataccaaaggtcatcaaacacatacaaggaacatcttgatcatagggcatgtggggaagtttactgggccatcacagacttttgttctagtgattgtatgtattaggagtcatagcatgccctacggcagatctggattcttatacactaagatgtgtcttaagaatcacagtgcgtgcttcatccctttattgaagaacagaaaattatgactactctacaaggtggataatattttggtacctgtgcttgccacagccctgttcctcaaagctgaattgatagatttctctttgacttccaagacctagcagttataaggcaccttgaaataaattgtttgtgcctggaaatgcagggagggcaatagctttgtaaattggtttacatttttctccttgaatttttctagggtcctagtgcttccgaatcatttaatggcattgtcggatatcttttacatttcaattgcaatccatgaaattacatttagaagattcttagtacttaactgtagtcttctccatgaattacacgttagaatagactggcagcaacggaatatgcagcaagtaagcctctagcttatagtttcatccctacccctcatgcctgcgtgagtctgtacagggatatgtgtgtgtgtgtgtgtgtgtgtgtgttagagaggaagaggaagagcagaatgtctgtatactacatgctgctaaggtagtgaataaatcagtaatgc

SEQ ID NO: 3599 - protein, 94 aa, Homo sapiens; identical to SEQ ID NO: 3591

SEQ ID NO: 3600 - DNA, 1441 bp, Homo sapiens
catttacattctgatgaagagtgtgtgtctaggttttatttcaaggatttgatgagtttggtttgtggcttgtttttagggattttttaacctggccctgctaatcgaggaaggtacgataatcccacaccatatcttggatttcttggaaattgactcaactctccattctaataacatctccattctccaggaactgtacgaaaggtgctggagccacagtaacgaggagtccttcagcccctgctccttggcctggctttacctgcacttgcggcttctctggggtgctatcctgcactcagccctgatctactttctgggaacctttctgctatccatattgatcgcctggactgtgcagtatttccagtctgtctcagcaagcgatccccctccaagaccatcccaggcctccccagacactgccacgtccactgcaagtccagctgtgactccagctgcagatgcctctgaccaagaccagcccacagtaactaataacccggagccacgtgggtgaactgtgcactccagttctctccagatgagagagaatcttttcaacagctggtattgggaagctggggccagggcatgatcctgataaacaccttaaatgtcttgtcaactggatgcaaattttgcaattggtgtcattttttttaaagtcaaattacaaggaagtacccagatcaggcagtggtaataccaaaggtcatcaaacacatacaaggaacatcttgatcatagggcatgtggggaagtttactgggccatcacagacttttgttctagtgattgtatgtattaggagtcatagcatgccctacggcagatctggattcttatacactaagatgtgtcttaagaatcacagtgcgtgcttcatccctttattgaagaacagaaaattatgactactctacaaggtggataatattttggtacctgtgcttgccacagccctgttcctcaaagctgaattgatagatttctctttgacttccaagacctagcagttataaggcaccttgaaataaattgtttgtgcctggaaatgcagggagggcaatagctttgtaaattggtttacatttttctccttgaatttttctagggtcctagtgcttccgaatcatttaatggcattgtcggatatcttttacatttcaattgcaatccatgaaattacatttagaagattcttagtacttaactgtagtcttctccatgaattacacgttagaatagactggcagcaacggaatatgcagcaagtaagcctctagcttatagtttcatccctacccctcatgcctgcgtgagtctgtacagggatatgtgtgtgtgtgtgtgtgtgtgtgtgttagagaggaagaggaagagcagaatgtctgtatactacatgctgctaaggtagtgaataaatcagtaatgc

SEQ ID NO: 3601 - protein, 94 aa, Homo sapiens; identical to SEQ ID NO: 3591

SEQ ID NO: 3602 - DNA, 307 bp, Homo sapiens
agttgtctgtgcagatgtacgcccaagccgccctggatggagactcccagggattttttaacctggccctgctaatcgaggaaggaactgtacgaaaggtgctggagccacagtaacgaggagtccttcagcccctgctccttggcctggctttacctgcacttgcggcttctctggggtgctatcctgcactcagccctgatctactttctgggaacctttctgctatccatattgatcgcctggactgtgcagtatttccagtctgtctcaggtaaagatttataaaaagcgaaagcaatatatt

SEQ ID NO: 3603 - protein, 33 aa, Homo sapiens
MYAQAALDGDSQGFFNLALLIEEGTVRKVLEPQ

SEQ ID NO: 3604 - DNA, 462 bp, Homo sapiens
ggaaggaagggaggaacaagttttatagacttctatcgtccaatcattgtgtaaaccaggaggaagtgttacagaattctcaaacatttccattgaggaaacactgaaatccatcagaaagagatgtctaaaaaggcatgtgagatccatagaaacactgaacagaaatctacctctgggccgagcacagtggctcatgcctgtaatcctagcactttgggagggacagcaggggcttcactagcactggccatgtttatttttttaagtagagtgatagctttatggctgttcattttattgtcactctttggaggttatgtatgtatcatatatacttcatacatatcaatgattacatgataaaagaagagaaaagccaccctactgactcatgccacatcttccgttcaaatgctcggctccttttgaactaactcccctttcaggctctcccttcta

SEQ ID NO: 3605 - protein, 79 aa, Homo sapiens
MSKKACEIHRNTEQKSTSGPSTVAHACNPSTLGGTAGASLALAMFIFLSRVIALWLFILLSLFGGYVCIIYTSYISMIT

SEQ ID NO: 3606 - DNA, 2221 bp, Homo sapiens
atacagggctggccatggaactcacagcaggtctaggcggcgaatgccagaaataaggaggaaactgaaaaatgccaagttctcggggtttgggagtacacaactatttgccagcgggtgcatttgttttgtgtatccccgtactccagtcccttgatcataggaagctcccttctctccagcgcaacattggagtaagcaccccggagtttcccgtgatggcaggcggttggcgcggtcgtttgtgctcagaggccaacaagcgcgtggattttctgcttcagtgcgcccgggactgccaccccggccccggggatgtcggacatcgtactccagggtttcgagccctagccccgccgcatcctcggggcgtgcaggaagagaagttaaacttctagagaaacctaacagacaatatccacaacaggtggtaacagaaaacaatccagatggggtgcaggtgctgtaaaataatacaaagctatctctttgatccagttcaagtgccctctcctggctatgtcaatgaagtcaacagctgcaagctagatgaagacgacactgataaattaaaaggcaaatggagcagtgaagtcttggtgcagaaaaatgaccctcagaggcagggctcaaagaagactgagagcagcagcaggacagctgatccatgggagccctgctggcctcaccaagggccgctcccacagggggacgctggaggggaacaccatgcctgcggtgtcaacggcatcggccctgctgccactccacagcccactgggaattccagccccacccaggatgacaggggctcctgggccagtactgcaaatactgttcccccaactcaacccttcctggaaggagggggcaccaggaaacaggactgtgtgctgctggcctcagaagggacccaagtcatgagaaatggagactccagagctccttctgaggcagaaagttttgccttggaagtacaagaccatgtcttccagataccagccccagattaccttcagcattggggcccagctggagacaacgttgatcataatgaaaaggactgtgttttcaagaaccatactgaggatgaatccctagagggaattcagcccccagtgggggagcatggtttgaatacgcccttctctgtgaggagaagctgggattcattgaatgaggatgtggaaacagaagttctaagcatctgctttaatgagaagggtcctgttcatgccatgcctgtggttgactcaggaaacaggcaggaggatacccatggctccgatggagatggggatggggagattgtggacgaggatgcagcggtggcggaggcccttgcagctttagaagctgctactgcaggagaagatttggatgagactgattaggggaggggatttgcacagggaggtaagctggtgtcatgctgagcatgcagatgcatttgctccctggatgcatagcaggtgattctgccagcatgcaccagtgcagccttaccagttgtttacatccagcatctgttctgattgtcagcatctgtcccatgctgcttgtcacatatctggagtttcactctgtgtagatgagctgtcattcaggacactaggagaaaaatctgagtgggtcattgtgcccatatccacagaaaatgcagaagttgaacagcttgcttgacaaccctcaaacatctttgagcacctggtacagatgtttatgagaatactctaagatctcaacccttgatcccaaaggcacacaatcacagagcattccttttgactgtaaactgtttaccttgcttttgagagccaaacattgtacccaacctggaaaaagtaactaccccaattaaagtgcctcatgtgtccccagagcatggcttaacttcagggacaatcacccagggaactaataactaaccagttgttcaacagcgggttaagctcagcagttttcacagtagagcagaagtccccaggaaacaaagggttagtcattagctgagatgttgattttaaaacaccttgaccttaacttttttacattattacttttaaatctcctttgggattggggaggctggccaaaataagtcttaaaactgcttatgtcatatttggattttaagttcatgacattcggaacagcaaagccatatatgcaatgtttttatgccattaaatgtctgattccaattaaaatataacaacgt

SEQ ID NO: 3607 - protein, 314 aa, Homo sapiens; identical to SEQ ID NO: 413

SEQ ID NO: 3608 - DNA, 2592 bp, Homo sapiens
atacagggctggccatggaactcacagcaggtctaggcggcgaatgccagaaataaggaggaaactgaaaaatgccaagttctcggggtttgggagtacacaactatttgccagcgggtgcatttgttttgtgtatccccgtactccagtcccttgatcataggaagctcccttctctccagcgcaacattggagtaagcaccccggagtttcccgtgatggcaggcggttggcgcggtcgtttgtgctcagaggccaacaagcgcgtggattttctgcttcagtgcgcccgggactgccaccccggccccggggatgtcggacatcgtactccagggtttcgagccctagccccgccgcatcctcggggcgtgcaggaagagaagttaaacttctagagaaacctaacagacaatatccacaacaggtggtaacagaaaacaatccagatggggtgcaggtgctgtaaaataatacaaagctatctctttgatccagttcaagtgccctctcctggctatgtcaatgaagtcaacagctgcaagctagatgaagacgacactgataaattaaaaggcaaatggagcagtgaagtcttggtgcagaaaaatgaccctcagaggcagggctcaaagaagactgagagcagcagcaggacagctgatccatgggagccctgctggcctcaccaagggccgctcccacagggggacgctggaggggaacaccatgcctgcggtgtcaacggcatcggccctgctgccactccacagcccactgggaattccagccccacccaggatgacaggggctcctgggccagtactgcaaatactgttcccccaactcaacccttcctggaaggagggggcaccaggaaacaggactgtgtgctgctggcctcagaagggacccaagtcatgagaaatggagactccagagctccttctgaggcagaaagttttgccttggaagtacaagaccatgtcttccagataccagccccagattaccttcagcattggggcccagctggagacaacgttgatcataatgaaaaggactgtgttttcaagaaccatactgaggatgaatccctagagggaattcagcccccagtgggggagcatggtttgaatacgcccttctctgtgaggagaagctgggattcattgaatgaggatgtggaaacagaagttctaagcatctgctttaatgagaagggtcctgttcatgccatgcctgtggttgactcaggaaacaggcaggaggatacccatggctccgatggagatggggatggggagattgtggacgaggatgcagcggtggcggaggcccttgcagctttagaagctgctactgcaggagaagatttggatgagactgattaggggaggggatttgcacagggaggtaagctggtgtcatgctgagcatgcagatgcatttgctccctggatgcatagcaggtgattctgccagcatgcaccagtgcagccttaccagttgtttacatccagcatctgttctgattgtcagcatctgtcccatgctgcttgtcacatatctggagtttcactctgtgtagatgagctgtcattcaggacactaggagaaaaatctgagtgggtcattgtgcccatatccacagaaaatgcagaagttgaacagcttgcttgacaaccctcaaacatctttgagcacctggtacagatgtttatgagaatactctaagatctcaacccttgatcccaaaggcacacaatcacagagcattccttttgactgtaaactgtttaccttgcttttgagagccaaacattgtacccaacctggaaaaagtaactaccccaattaaagtgcctcatgtgtccccagagcatggcttaacttcagggacaatcacccagggaactaataactaaccagttgttcaacagcgggttaagctcagcagttttcacagtagagcagaagtccccaggaaacaaagggttagtcattagctgagatgttgattttaaaacaccttgaccttaacttttttacattattacttttaaatctcctttgggattggggaggctggccaaaataagtcttaaaactgcttatgtcatatttggattttaagttcatgacattcggaacagcaaagccatatatgcaatgtttttatgccattaaatgtctgattccaattaaaatataacaacgtatgtgtctttctagaagtcttaactcaaaggtggttctaattttctcagaatatcagtgaccctggatgttactttcaatgtaaagaactaatctagatggccgggcgtggtggctcatgcctgtaatcccagcactttgggaggccgaggcgggtggatcacaaggtcaggagttcaagatcagcctggccaacatagtgaaaccctgtctctactaaaaatacaaaaaattatccgggcacggtggcgggcgcctgtaatcccagctacttgggaggctgaggcaaggagaatcacttgaacctgggaggtggaggttgcagtgagctgagatcgtgccactgcactccagcctgggtgacagtgcaag

SEQ ID NO: 3609 - protein, 314 aa, Homo sapiens; identical to SEQ ID NO: 413

SEQ ID NO: 3610 - DNA, 2019 bp, Homo sapiens
ggcgggctcagggcagcgcggagccgctagcgtctcccggcgcggctgcccgaggccggcgaagccatgggcgccgggaccccgccgccgccgccgccgccgccgtctggccccagagcaagttgcaaacatcagttcatttcaccccagcacttcaatatgcattgcattaactgaagagaagttaaacttctagagaaacctaacagacaatatccacaacaggtggtaacagaaaacaatccagatggggtgcaggtgctgtaaaataatacaaagctatctctttgatccagttcaagtgccctctcctggctatgtcaatgaagtcaacagctgcaagctagatgaagacgacactgataaattaaaaggcaaatggagcagtgaagtcttggtgcagaaaaatgaccctcagaggcagggctcaaagaagactgagagcagcagcaggacagctgatccatgggagccctgctggcctcaccaagggccgctcccacagggggacgctggaggggaacaccatgcctgcggtgtcaacggcatcggccctgctgccactccacagcccactgggaattccagccccacccaggatgacaggggctcctgggccagtactgcaaatactgttcccccaactcaacccttcctggaaggagggggcaccaggaaacaggactgtgtgctgctggcctcagaagggacccaagtcatgagaaatggagactccagagctccttctgaggcagaaagttttgccttggaagtacaagaccatgtcttccagataccagccccagattaccttcagcattggggcccagctggagacaacgttgatcataatgaaaaggactgtgttttcaagaaccatactgaggatgaatccctagagggaattcagcccccagtgggggagcatggtttgaatacgcccttctctgtgaggagaagctgggattcattgaatgaggatgtggaaacagaagttctaagcatctgctttaatgagaagggtcctgttcatgccatgcctgtggttgactcaggaaacaggcaggaggatacccatggctccgatggagatggggatggggagattgtggacgaggatgcagcggtggcggaggcccttgcagctttagaagctgctactgcaggagaagatttggatgagactgattaggggaggggatttgcacagggaggtaagctggtgtcatgctgagcatgcagatgcatttgctccctggatgcatagcaggtgattctgccagcatgcaccagtgcagccttaccagttgtttacatccagcatctgttctgattgtcagcatctgtcccatgctgcttgtcacatatctggagtttcactctgtgtagatgagctgtcattcaggacactaggagaaaaatctgagtgggtcattgtgcccatatccacagaaaatgcagaagttgaacagcttgcttgacaaccctcaaacatctttgagcacctggtacagatgtttatgagaatactctaagatctcaacccttgatcccaaaggcacacaatcacagagcattccttttgactgtaaactgtttaccttgcttttgagagccaaacattgtacccaacctggaaaaagtaactaccccaattaaagtgcctcatgtgtccccagagcatggcttaacttcagggacaatcacccagggaactaataactaaccagttgttcaacagcgggttaagctcagcagttttcacagtagagcagaagtccccaggaaacaaagggttagtcattagctgagatgttgattttaaaacaccttgaccttaacttttttacattattacttttaaatctcctttgggattggggaggctggccaaaataagtcttaaaactgcttatgtcatatttggattttaagttcatgacattcggaacagcaaagccatatatgcaatgtttttatgccattaaatgtctgattccaattaaaatataacaacgt

SEQ ID NO: 3611 - protein, 314 aa, Homo sapiens; identical to SEQ ID NO: 413

SEQ ID NO: 3612 - DNA, 2390 bp, Homo sapiens
ggcgggctcagggcagcgcggagccgctagcgtctcccggcgcggctgcccgaggccggcgaagccatgggcgccgggaccccgccgccgccgccgccgccgccgtctggccccagagcaagttgcaaacatcagttcatttcaccccagcacttcaatatgcattgcattaactgaagagaagttaaacttctagagaaacctaacagacaatatccacaacaggtggtaacagaaaacaatccagatggggtgcaggtgctgtaaaataatacaaagctatctctttgatccagttcaagtgccctctcctggctatgtcaatgaagtcaacagctgcaagctagatgaagacgacactgataaattaaaaggcaaatggagcagtgaagtcttggtgcagaaaaatgaccctcagaggcagggctcaaagaagactgagagcagcagcaggacagctgatccatgggagccctgctggcctcaccaagggccgctcccacagggggacgctggaggggaacaccatgcctgcggtgtcaacggcatcggccctgctgccactccacagcccactgggaattccagccccacccaggatgacaggggctcctgggccagtactgcaaatactgttcccccaactcaacccttcctggaaggagggggcaccaggaaacaggactgtgtgctgctggcctcagaagggacccaagtcatgagaaatggagactccagagctccttctgaggcagaaagttttgccttggaagtacaagaccatgtcttccagataccagccccagattaccttcagcattggggcccagctggagacaacgttgatcataatgaaaaggactgtgttttcaagaaccatactgaggatgaatccctagagggaattcagcccccagtgggggagcatggtttgaatacgcccttctctgtgaggagaagctgggattcattgaatgaggatgtggaaacagaagttctaagcatctgctttaatgagaagggtcctgttcatgccatgcctgtggttgactcaggaaacaggcaggaggatacccatggctccgatggagatggggatggggagattgtggacgaggatgcagcggtggcggaggcccttgcagctttagaagctgctactgcaggagaagatttggatgagactgattaggggaggggatttgcacagggaggtaagctggtgtcatgctgagcatgcagatgcatttgctccctggatgcatagcaggtgattctgccagcatgcaccagtgcagccttaccagttgtttacatccagcatctgttctgattgtcagcatctgtcccatgctgcttgtcacatatctggagtttcactctgtgtagatgagctgtcattcaggacactaggagaaaaatctgagtgggtcattgtgcccatatccacagaaaatgcagaagttgaacagcttgcttgacaaccctcaaacatctttgagcacctggtacagatgtttatgagaatactctaagatctcaacccttgatcccaaaggcacacaatcacagagcattccttttgactgtaaactgtttaccttgcttttgagagccaaacattgtacccaacctggaaaaagtaactaccccaattaaagtgcctcatgtgtccccagagcatggcttaacttcagggacaatcacccagggaactaataactaaccagttgttcaacagcgggttaagctcagcagttttcacagtagagcagaagtccccaggaaacaaagggttagtcattagctgagatgttgattttaaaacaccttgaccttaacttttttacattattacttttaaatctcctttgggattggggaggctggccaaaataagtcttaaaactgcttatgtcatatttggattttaagttcatgacattcggaacagcaaagccatatatgcaatgtttttatgccattaaatgtctgattccaattaaaatataacaacgtatgtgtctttctagaagtcttaactcaaaggtggttctaattttctcagaatatcagtgaccctggatgttactttcaatgtaaagaactaatctagatggccgggcgtggtggctcatgcctgtaatcccagcactttgggaggccgaggcgggtggatcacaaggtcaggagttcaagatcagcctggccaacatagtgaaaccctgtctctactaaaaatacaaaaaattatccgggcacggtggcgggcgcctgtaatcccagctacttgggaggctgaggcaaggagaatcacttgaacctgggaggtggaggttgcagtgagctgagatcgtgccactgcactccagcctgggtgacagtgcaag

SEQ ID NO: 3613 - protein, 314 aa, Homo sapiens; identical to SEQ ID NO: 413

SEQ ID NO: 3614 - DNA, 1944 bp, Homo sapiens
cgcggagccgctagcgtctcccggcgcggctgcccgaggccggcgaagccatgggcgccgggaccccgccgccgccgccgccgccgccgtctggccccaggaagagaagttaaacttctagagaaacctaacagacaatatccacaacaggtggtaacagaaaacaatccagatggggtgcaggtgctgtaaaataatacaaagctatctctttgatccagttcaagtgccctctcctggctatgtcaatgaagtcaacagctgcaagctagatgaagacgacactgataaattaaaaggcaaatggagcagtgaagtcttggtgcagaaaaatgaccctcagaggcagggctcaaagaagactgagagcagcagcaggacagctgatccatgggagccctgctggcctcaccaagggccgctcccacagggggacgctggaggggaacaccatgcctgcggtgtcaacggcatcggccctgctgccactccacagcccactgggaattccagccccacccaggatgacaggggctcctgggccagtactgcaaatactgttcccccaactcaacccttcctggaaggagggggcaccaggaaacaggactgtgtgctgctggcctcagaagggacccaagtcatgagaaatggagactccagagctccttctgaggcagaaagttttgccttggaagtacaagaccatgtcttccagataccagccccagattaccttcagcattggggcccagctggagacaacgttgatcataatgaaaaggactgtgttttcaagaaccatactgaggatgaatccctagagggaattcagcccccagtgggggagcatggtttgaatacgcccttctctgtgaggagaagctgggattcattgaatgaggatgtggaaacagaagttctaagcatctgctttaatgagaagggtcctgttcatgccatgcctgtggttgactcaggaaacaggcaggaggatacccatggctccgatggagatggggatggggagattgtggacgaggatgcagcggtggcggaggcccttgcagctttagaagctgctactgcaggagaagatttggatgagactgattaggggaggggatttgcacagggaggtaagctggtgtcatgctgagcatgcagatgcatttgctccctggatgcatagcaggtgattctgccagcatgcaccagtgcagccttaccagttgtttacatccagcatctgttctgattgtcagcatctgtcccatgctgcttgtcacatatctggagtttcactctgtgtagatgagctgtcattcaggacactaggagaaaaatctgagtgggtcattgtgcccatatccacagaaaatgcagaagttgaacagcttgcttgacaaccctcaaacatctttgagcacctggtacagatgtttatgagaatactctaagatctcaacccttgatcccaaaggcacacaatcacagagcattccttttgactgtaaactgtttaccttgcttttgagagccaaacattgtacccaacctggaaaaagtaactaccccaattaaagtgcctcatgtgtccccagagcatggcttaacttcagggacaatcacccagggaactaataactaaccagttgttcaacagcgggttaagctcagcagttttcacagtagagcagaagtccccaggaaacaaagggttagtcattagctgagatgttgattttaaaacaccttgaccttaacttttttacattattacttttaaatctcctttgggattggggaggctggccaaaataagtcttaaaactgcttatgtcatatttggattttaagttcatgacattcggaacagcaaagccatatatgcaatgtttttatgccattaaatgtctgattccaattaaaatataacaacgt

SEQ ID NO: 3615 - protein, 314 aa, Homo sapiens; identical to SEQ ID NO: 413

SEQ ID NO: 3616 - DNA, 2315 bp, Homo sapiens
cgcggagccgctagcgtctcccggcgcggctgcccgaggccggcgaagccatgggcgccgggaccccgccgccgccgccgccgccgccgtctggccccaggaagagaagttaaacttctagagaaacctaacagacaatatccacaacaggtggtaacagaaaacaatccagatggggtgcaggtgctgtaaaataatacaaagctatctctttgatccagttcaagtgccctctcctggctatgtcaatgaagtcaacagctgcaagctagatgaagacgacactgataaattaaaaggcaaatggagcagtgaagtcttggtgcagaaaaatgaccctcagaggcagggctcaaagaagactgagagcagcagcaggacagctgatccatgggagccctgctggcctcaccaagggccgctcccacagggggacgctggaggggaacaccatgcctgcggtgtcaacggcatcggccctgctgccactccacagcccactgggaattccagccccacccaggatgacaggggctcctgggccagtactgcaaatactgttcccccaactcaacccttcctggaaggagggggcaccaggaaacaggactgtgtgctgctggcctcagaagggacccaagtcatgagaaatggagactccagagctccttctgaggcagaaagttttgccttggaagtacaagaccatgtcttccagataccagccccagattaccttcagcattggggcccagctggagacaacgttgatcataatgaaaaggactgtgttttcaagaaccatactgaggatgaatccctagagggaattcagcccccagtgggggagcatggtttgaatacgcccttctctgtgaggagaagctgggattcattgaatgaggatgtggaaacagaagttctaagcatctgctttaatgagaagggtcctgttcatgccatgcctgtggttgactcaggaaacaggcaggaggatacccatggctccgatggagatggggatggggagattgtggacgaggatgcagcggtggcggaggcccttgcagctttagaagctgctactgcaggagaagatttggatgagactgattaggggaggggatttgcacagggaggtaagctggtgtcatgctgagcatgcagatgcatttgctccctggatgcatagcaggtgattctgccagcatgcaccagtgcagccttaccagttgtttacatccagcatctgttctgattgtcagcatctgtcccatgctgcttgtcacatatctggagtttcactctgtgtagatgagctgtcattcaggacactaggagaaaaatctgagtgggtcattgtgcccatatccacagaaaatgcagaagttgaacagcttgcttgacaaccctcaaacatctttgagcacctggtacagatgtttatgagaatactctaagatctcaacccttgatcccaaaggcacacaatcacagagcattccttttgactgtaaactgtttaccttgcttttgagagccaaacattgtacccaacctggaaaaagtaactaccccaattaaagtgcctcatgtgtccccagagcatggcttaacttcagggacaatcacccagggaactaataactaaccagttgttcaacagcgggttaagctcagcagttttcacagtagagcagaagtccccaggaaacaaagggttagtcattagctgagatgttgattttaaaacaccttgaccttaacttttttacattattacttttaaatctcctttgggattggggaggctggccaaaataagtcttaaaactgcttatgtcatatttggattttaagttcatgacattcggaacagcaaagccatatatgcaatgtttttatgccattaaatgtctgattccaattaaaatataacaacgtatgtgtctttctagaagtcttaactcaaaggtggttctaattttctcagaatatcagtgaccctggatgttactttcaatgtaaagaactaatctagatggccgggcgtggtggctcatgcctgtaatcccagcactttgggaggccgaggcgggtggatcacaaggtcaggagttcaagatcagcctggccaacatagtgaaaccctgtctctactaaaaatacaaaaaattatccgggcacggtggcgggcgcctgtaatcccagctacttgggaggctgaggcaaggagaatcacttgaacctgggaggtggaggttgcagtgagctgagatcgtgccactgcactccagcctgggtgacagtgcaag

SEQ ID NO: 3617 - protein, 314 aa, Homo sapiens; identical to SEQ ID NO: 413

SEQ ID NO: 3618 - DNA, 2051 bp, Homo sapiens
gtctcccggcgcggctgcccgaggccggcgaagccatgggcgccgggaccccgccgccgccgccgccgccgccgtctggccccaggtggagtcttgctctttctaccaggctggagtgcagtggcgtgatcttggttcactgcaacctccgcctcccaggttcaagtgattctcctacctcagcctcccaagtagctgggattacaggaagagaagttaaacttctagagaaacctaacagacaatatccacaacaggtggtaacagaaaacaatccagatggggtgcaggtgctgtaaaataatacaaagctatctctttgatccagttcaagtgccctctcctggctatgtcaatgaagtcaacagctgcaagctagatgaagacgacactgataaattaaaaggcaaatggagcagtgaagtcttggtgcagaaaaatgaccctcagaggcagggctcaaagaagactgagagcagcagcaggacagctgatccatgggagccctgctggcctcaccaagggccgctcccacagggggacgctggaggggaacaccatgcctgcggtgtcaacggcatcggccctgctgccactccacagcccactgggaattccagccccacccaggatgacaggggctcctgggccagtactgcaaatactgttcccccaactcaacccttcctggaaggagggggcaccaggaaacaggactgtgtgctgctggcctcagaagggacccaagtcatgagaaatggagactccagagctccttctgaggcagaaagttttgccttggaagtacaagaccatgtcttccagataccagccccagattaccttcagcattggggcccagctggagacaacgttgatcataatgaaaaggactgtgttttcaagaaccatactgaggatgaatccctagagggaattcagcccccagtgggggagcatggtttgaatacgcccttctctgtgaggagaagctgggattcattgaatgaggatgtggaaacagaagttctaagcatctgctttaatgagaagggtcctgttcatgccatgcctgtggttgactcaggaaacaggcaggaggatacccatggctccgatggagatggggatggggagattgtggacgaggatgcagcggtggcggaggcccttgcagctttagaagctgctactgcaggagaagatttggatgagactgattaggggaggggatttgcacagggaggtaagctggtgtcatgctgagcatgcagatgcatttgctccctggatgcatagcaggtgattctgccagcatgcaccagtgcagccttaccagttgtttacatccagcatctgttctgattgtcagcatctgtcccatgctgcttgtcacatatctggagtttcactctgtgtagatgagctgtcattcaggacactaggagaaaaatctgagtgggtcattgtgcccatatccacagaaaatgcagaagttgaacagcttgcttgacaaccctcaaacatctttgagcacctggtacagatgtttatgagaatactctaagatctcaacccttgatcccaaaggcacacaatcacagagcattccttttgactgtaaactgtttaccttgcttttgagagccaaacattgtacccaacctggaaaaagtaactaccccaattaaagtgcctcatgtgtccccagagcatggcttaacttcagggacaatcacccagggaactaataactaaccagttgttcaacagcgggttaagctcagcagttttcacagtagagcagaagtccccaggaaacaaagggttagtcattagctgagatgttgattttaaaacaccttgaccttaacttttttacattattacttttaaatctcctttgggattggggaggctggccaaaataagtcttaaaactgcttatgtcatatttggattttaagttcatgacattcggaacagcaaagccatatatgcaatgtttttatgccattaaatgtctgattccaattaaaatataacaacgt

SEQ ID NO: 3619 - protein, 314 aa, Homo sapiens; identical to SEQ ID NO: 413

SEQ ID NO: 3620 - DNA, 2422 bp, Homo sapiens
gtctcccggcgcggctgcccgaggccggcgaagccatgggcgccgggaccccgccgccgccgccgccgccgccgtctggccccaggtggagtcttgctctttctaccaggctggagtgcagtggcgtgatcttggttcactgcaacctccgcctcccaggttcaagtgattctcctacctcagcctcccaagtagctgggattacaggaagagaagttaaacttctagagaaacctaacagacaatatccacaacaggtggtaacagaaaacaatccagatggggtgcaggtgctgtaaaataatacaaagctatctctttgatccagttcaagtgccctctcctggctatgtcaatgaagtcaacagctgcaagctagatgaagacgacactgataaattaaaaggcaaatggagcagtgaagtcttggtgcagaaaaatgaccctcagaggcagggctcaaagaagactgagagcagcagcaggacagctgatccatgggagccctgctggcctcaccaagggccgctcccacagggggacgctggaggggaacaccatgcctgcggtgtcaacggcatcggccctgctgccactccacagcccactgggaattccagccccacccaggatgacaggggctcctgggccagtactgcaaatactgttcccccaactcaacccttcctggaaggagggggcaccaggaaacaggactgtgtgctgctggcctcagaagggacccaagtcatgagaaatggagactccagagctccttctgaggcagaaagttttgccttggaagtacaagaccatgtcttccagataccagccccagattaccttcagcattggggcccagctggagacaacgttgatcataatgaaaaggactgtgttttcaagaaccatactgaggatgaatccctagagggaattcagcccccagtgggggagcatggtttgaatacgcccttctctgtgaggagaagctgggattcattgaatgaggatgtggaaacagaagttctaagcatctgctttaatgagaagggtcctgttcatgccatgcctgtggttgactcaggaaacaggcaggaggatacccatggctccgatggagatggggatggggagattgtggacgaggatgcagcggtggcggaggcccttgcagctttagaagctgctactgcaggagaagatttggatgagactgattaggggaggggatttgcacagggaggtaagctggtgtcatgctgagcatgcagatgcatttgctccctggatgcatagcaggtgattctgccagcatgcaccagtgcagccttaccagttgtttacatccagcatctgttctgattgtcagcatctgtcccatgctgcttgtcacatatctggagtttcactctgtgtagatgagctgtcattcaggacactaggagaaaaatctgagtgggtcattgtgcccatatccacagaaaatgcagaagttgaacagcttgcttgacaaccctcaaacatctttgagcacctggtacagatgtttatgagaatactctaagatctcaacccttgatcccaaaggcacacaatcacagagcattccttttgactgtaaactgtttaccttgcttttgagagccaaacattgtacccaacctggaaaaagtaactaccccaattaaagtgcctcatgtgtccccagagcatggcttaacttcagggacaatcacccagggaactaataactaaccagttgttcaacagcgggttaagctcagcagttttcacagtagagcagaagtccccaggaaacaaagggttagtcattagctgagatgttgattttaaaacaccttgaccttaacttttttacattattacttttaaatctcctttgggattggggaggctggccaaaataagtcttaaaactgcttatgtcatatttggattttaagttcatgacattcggaacagcaaagccatatatgcaatgtttttatgccattaaatgtctgattccaattaaaatataacaacgtatgtgtctttctagaagtcttaactcaaaggtggttctaattttctcagaatatcagtgaccctggatgttactttcaatgtaaagaactaatctagatggccgggcgtggtggctcatgcctgtaatcccagcactttgggaggccgaggcgggtggatcacaaggtcaggagttcaagatcagcctggccaacatagtgaaaccctgtctctactaaaaatacaaaaaattatccgggcacggtggcgggcgcctgtaatcccagctacttgggaggctgaggcaaggagaatcacttgaacctgggaggtggaggttgcagtgagctgagatcgtgccactgcactccagcctgggtgacagtgcaag

SEQ ID NO: 3621 - protein, 314 aa, Homo sapiens; identical to SEQ ID NO: 413

SEQ ID NO: 3622 - DNA, 828 bp, Homo sapiens
gccatgggcgccgggaccccgccgccgccgccgccgccgccgtctggccccaggaagagaagttaaacttctagagaaacctaacagacaatatccacaacaggtggtaacagaaaacaatccagatggggtgcaggtgctgtaaaataatacaaagacagagtcttgctgttgtcaccccggctgaagtgcagtggcatgatctcggctcacggcaacctctgcctcccgggttcaactgactctcctgcctcagcctcccgagtagctgggactacaggtgcccgccaccatgcctacctaatttttgtatttttagtagagatggggtttcaccgtgttgtccaggctggtctcgaactcctgacctcatgatctgcccaccttggcctcccaaagtgctgagattacaggtgtgagccaccgcacccggccaagaaatactttttaaagatataattgtacctccattgatctgaactagcaatcacagctgctctggagtctgcaagtctatgaccttcatctacctggaagaaaactgaatggctcacacacctggacctgatccagacagagccttaaaatccatcagctgctcatcagatgatcccatcggatgccaaggaggccatccaaaggctggaatgatcagttctgtgagctattgagctatgtgaagaaacggcggttgatttgctttcttgccaagaaaagcaaagctccctcacactccacggccactgagcatgtaagctcccaagtataaatttcttcccatccaagccctctcactacctagccctgagatatggggaacattaatcc

SEQ ID NO: 3623 - protein, 38 aa, Homo sapiens
MGCRCCKIIQRQSLAVVTPAEVQWHDLGSRQPLPPGFN

SEQ ID NO: 3624 - DNA, 1923 bp, Homo sapiens
atgtttcaacatatggattttggagggacactagtgttcaggccatagcaacatttagcctagaacagcctagaaatgggaagagaagttaaacttctagagaaacctaacagacaatatccacaacaggtggtaacagaaaacaatccagatggggtgcaggtgctgtaaaataatacaaagctatctctttgatccagttcaagtgccctctcctggctatgtcaatgaagtcaacagctgcaagctagatgaagacgacactgataaattaaaaggcaaatggagcagtgaagtcttggtgcagaaaaatgaccctcagaggcagggctcaaagaagactgagagcagcagcaggacagctgatccatgggagccctgctggcctcaccaagggccgctcccacagggggacgctggaggggaacaccatgcctgcggtgtcaacggcatcggccctgctgccactccacagcccactgggaattccagccccacccaggatgacaggggctcctgggccagtactgcaaatactgttcccccaactcaacccttcctggaaggagggggcaccaggaaacaggactgtgtgctgctggcctcagaagggacccaagtcatgagaaatggagactccagagctccttctgaggcagaaagttttgccttggaagtacaagaccatgtcttccagataccagccccagattaccttcagcattggggcccagctggagacaacgttgatcataatgaaaaggactgtgttttcaagaaccatactgaggatgaatccctagagggaattcagcccccagtgggggagcatggtttgaatacgcccttctctgtgaggagaagctgggattcattgaatgaggatgtggaaacagaagttctaagcatctgctttaatgagaagggtcctgttcatgccatgcctgtggttgactcaggaaacaggcaggaggatacccatggctccgatggagatggggatggggagattgtggacgaggatgcagcggtggcggaggcccttgcagctttagaagctgctactgcaggagaagatttggatgagactgattaggggaggggatttgcacagggaggtaagctggtgtcatgctgagcatgcagatgcatttgctccctggatgcatagcaggtgattctgccagcatgcaccagtgcagccttaccagttgtttacatccagcatctgttctgattgtcagcatctgtcccatgctgcttgtcacatatctggagtttcactctgtgtagatgagctgtcattcaggacactaggagaaaaatctgagtgggtcattgtgcccatatccacagaaaatgcagaagttgaacagcttgcttgacaaccctcaaacatctttgagcacctggtacagatgtttatgagaatactctaagatctcaacccttgatcccaaaggcacacaatcacagagcattccttttgactgtaaactgtttaccttgcttttgagagccaaacattgtacccaacctggaaaaagtaactaccccaattaaagtgcctcatgtgtccccagagcatggcttaacttcagggacaatcacccagggaactaataactaaccagttgttcaacagcgggttaagctcagcagttttcacagtagagcagaagtccccaggaaacaaagggttagtcattagctgagatgttgattttaaaacaccttgaccttaacttttttacattattacttttaaatctcctttgggattggggaggctggccaaaataagtcttaaaactgcttatgtcatatttggattttaagttcatgacattcggaacagcaaagccatatatgcaatgtttttatgccattaaatgtctgattccaattaaaatataacaacgt

SEQ ID NO: 3625 - protein, 314 aa, Homo sapiens; identical to SEQ ID NO: 413

SEQ ID NO: 3626 - DNA, 2294 bp, Homo sapiens
atgtttcaacatatggattttggagggacactagtgttcaggccatagcaacatttagcctagaacagcctagaaatgggaagagaagttaaacttctagagaaacctaacagacaatatccacaacaggtggtaacagaaaacaatccagatggggtgcaggtgctgtaaaataatacaaagctatctctttgatccagttcaagtgccctctcctggctatgtcaatgaagtcaacagctgcaagctagatgaagacgacactgataaattaaaaggcaaatggagcagtgaagtcttggtgcagaaaaatgaccctcagaggcagggctcaaagaagactgagagcagcagcaggacagctgatccatgggagccctgctggcctcaccaagggccgctcccacagggggacgctggaggggaacaccatgcctgcggtgtcaacggcatcggccctgctgccactccacagcccactgggaattccagccccacccaggatgacaggggctcctgggccagtactgcaaatactgttcccccaactcaacccttcctggaaggagggggcaccaggaaacaggactgtgtgctgctggcctcagaagggacccaagtcatgagaaatggagactccagagctccttctgaggcagaaagttttgccttggaagtacaagaccatgtcttccagataccagccccagattaccttcagcattggggcccagctggagacaacgttgatcataatgaaaaggactgtgttttcaagaaccatactgaggatgaatccctagagggaattcagcccccagtgggggagcatggtttgaatacgcccttctctgtgaggagaagctgggattcattgaatgaggatgtggaaacagaagttctaagcatctgctttaatgagaagggtcctgttcatgccatgcctgtggttgactcaggaaacaggcaggaggatacccatggctccgatggagatggggatggggagattgtggacgaggatgcagcggtggcggaggcccttgcagctttagaagctgctactgcaggagaagatttggatgagactgattaggggaggggatttgcacagggaggtaagctggtgtcatgctgagcatgcagatgcatttgctccctggatgcatagcaggtgattctgccagcatgcaccagtgcagccttaccagttgtttacatccagcatctgttctgattgtcagcatctgtcccatgctgcttgtcacatatctggagtttcactctgtgtagatgagctgtcattcaggacactaggagaaaaatctgagtgggtcattgtgcccatatccacagaaaatgcagaagttgaacagcttgcttgacaaccctcaaacatctttgagcacctggtacagatgtttatgagaatactctaagatctcaacccttgatcccaaaggcacacaatcacagagcattccttttgactgtaaactgtttaccttgcttttgagagccaaacattgtacccaacctggaaaaagtaactaccccaattaaagtgcctcatgtgtccccagagcatggcttaacttcagggacaatcacccagggaactaataactaaccagttgttcaacagcgggttaagctcagcagttttcacagtagagcagaagtccccaggaaacaaagggttagtcattagctgagatgttgattttaaaacaccttgaccttaacttttttacattattacttttaaatctcctttgggattggggaggctggccaaaataagtcttaaaactgcttatgtcatatttggattttaagttcatgacattcggaacagcaaagccatatatgcaatgtttttatgccattaaatgtctgattccaattaaaatataacaacgtatgtgtctttctagaagtcttaactcaaaggtggttctaattttctcagaatatcagtgaccctggatgttactttcaatgtaaagaactaatctagatggccgggcgtggtggctcatgcctgtaatcccagcactttgggaggccgaggcgggtggatcacaaggtcaggagttcaagatcagcctggccaacatagtgaaaccctgtctctactaaaaatacaaaaaattatccgggcacggtggcgggcgcctgtaatcccagctacttgggaggctgaggcaaggagaatcacttgaacctgggaggtggaggttgcagtgagctgagatcgtgccactgcactccagcctgggtgacagtgcaag

SEQ ID NO: 3627 - protein, 314 aa, Homo sapiens; identical to SEQ ID NO: 413

SEQ ID NO: 3628 - DNA, 1950 bp, Homo sapiens
acacaaccttggacattagagcctgtccgtctgatctagagaaggaatgttgctggggaaggaaaactcagggcgaggtgagagaggacagaacctctaaccaggaagaggctgtccccgccaagctccggagaggcgcggaagcatgaccctcaggtggtaacagaaaacaatccagatggggtgcaggtgctgtaaaataatacaaagctatctctttgatccagttcaagtgccctctcctggctatgtcaatgaagtcaacagctgcaagctagatgaagacgacactgataaattaaaaggcaaatggagcagtgaagtcttggtgcagaaaaatgaccctcagaggcagggctcaaagaagactgagagcagcagcaggacagctgatccatgggagccctgctggcctcaccaagggccgctcccacagggggacgctggaggggaacaccatgcctgcggtgtcaacggcatcggccctgctgccactccacagcccactgggaattccagccccacccaggatgacaggggctcctgggccagtactgcaaatactgttcccccaactcaacccttcctggaaggagggggcaccaggaaacaggactgtgtgctgctggcctcagaagggacccaagtcatgagaaatggagactccagagctccttctgaggcagaaagttttgccttggaagtacaagaccatgtcttccagataccagccccagattaccttcagcattggggcccagctggagacaacgttgatcataatgaaaaggactgtgttttcaagaaccatactgaggatgaatccctagagggaattcagcccccagtgggggagcatggtttgaatacgcccttctctgtgaggagaagctgggattcattgaatgaggatgtggaaacagaagttctaagcatctgctttaatgagaagggtcctgttcatgccatgcctgtggttgactcaggaaacaggcaggaggatacccatggctccgatggagatggggatggggagattgtggacgaggatgcagcggtggcggaggcccttgcagctttagaagctgctactgcaggagaagatttggatgagactgattaggggaggggatttgcacagggaggtaagctggtgtcatgctgagcatgcagatgcatttgctccctggatgcatagcaggtgattctgccagcatgcaccagtgcagccttaccagttgtttacatccagcatctgttctgattgtcagcatctgtcccatgctgcttgtcacatatctggagtttcactctgtgtagatgagctgtcattcaggacactaggagaaaaatctgagtgggtcattgtgcccatatccacagaaaatgcagaagttgaacagcttgcttgacaaccctcaaacatctttgagcacctggtacagatgtttatgagaatactctaagatctcaacccttgatcccaaaggcacacaatcacagagcattccttttgactgtaaactgtttaccttgcttttgagagccaaacattgtacccaacctggaaaaagtaactaccccaattaaagtgcctcatgtgtccccagagcatggcttaacttcagggacaatcacccagggaactaataactaaccagttgttcaacagcgggttaagctcagcagttttcacagtagagcagaagtccccaggaaacaaagggttagtcattagctgagatgttgattttaaaacaccttgaccttaacttttttacattattacttttaaatctcctttgggattggggaggctggccaaaataagtcttaaaactgcttatgtcatatttggattttaagttcatgacattcggaacagcaaagccatatatgcaatgtttttatgccattaaatgtctgattccaattaaaatataacaacgt

SEQ ID NO: 3629 - protein, 314 aa, Homo sapiens; identical to SEQ ID NO: 413

SEQ ID NO: 3630 - DNA, 2321 bp, Homo sapiens
acacaaccttggacattagagcctgtccgtctgatctagagaaggaatgttgctggggaaggaaaactcagggcgaggtgagagaggacagaacctctaaccaggaagaggctgtccccgccaagctccggagaggcgcggaagcatgaccctcaggtggtaacagaaaacaatccagatggggtgcaggtgctgtaaaataatacaaagctatctctttgatccagttcaagtgccctctcctggctatgtcaatgaagtcaacagctgcaagctagatgaagacgacactgataaattaaaaggcaaatggagcagtgaagtcttggtgcagaaaaatgaccctcagaggcagggctcaaagaagactgagagcagcagcaggacagctgatccatgggagccctgctggcctcaccaagggccgctcccacagggggacgctggaggggaacaccatgcctgcggtgtcaacggcatcggccctgctgccactccacagcccactgggaattccagccccacccaggatgacaggggctcctgggccagtactgcaaatactgttcccccaactcaacccttcctggaaggagggggcaccaggaaacaggactgtgtgctgctggcctcagaagggacccaagtcatgagaaatggagactccagagctccttctgaggcagaaagttttgccttggaagtacaagaccatgtcttccagataccagccccagattaccttcagcattggggcccagctggagacaacgttgatcataatgaaaaggactgtgttttcaagaaccatactgaggatgaatccctagagggaattcagcccccagtgggggagcatggtttgaatacgcccttctctgtgaggagaagctgggattcattgaatgaggatgtggaaacagaagttctaagcatctgctttaatgagaagggtcctgttcatgccatgcctgtggttgactcaggaaacaggcaggaggatacccatggctccgatggagatggggatggggagattgtggacgaggatgcagcggtggcggaggcccttgcagctttagaagctgctactgcaggagaagatttggatgagactgattaggggaggggatttgcacagggaggtaagctggtgtcatgctgagcatgcagatgcatttgctccctggatgcatagcaggtgattctgccagcatgcaccagtgcagccttaccagttgtttacatccagcatctgttctgattgtcagcatctgtcccatgctgcttgtcacatatctggagtttcactctgtgtagatgagctgtcattcaggacactaggagaaaaatctgagtgggtcattgtgcccatatccacagaaaatgcagaagttgaacagcttgcttgacaaccctcaaacatctttgagcacctggtacagatgtttatgagaatactctaagatctcaacccttgatcccaaaggcacacaatcacagagcattccttttgactgtaaactgtttaccttgcttttgagagccaaacattgtacccaacctggaaaaagtaactaccccaattaaagtgcctcatgtgtccccagagcatggcttaacttcagggacaatcacccagggaactaataactaaccagttgttcaacagcgggttaagctcagcagttttcacagtagagcagaagtccccaggaaacaaagggttagtcattagctgagatgttgattttaaaacaccttgaccttaacttttttacattattacttttaaatctcctttgggattggggaggctggccaaaataagtcttaaaactgcttatgtcatatttggattttaagttcatgacattcggaacagcaaagccatatatgcaatgtttttatgccattaaatgtctgattccaattaaaatataacaacgtatgtgtctttctagaagtcttaactcaaaggtggttctaattttctcagaatatcagtgaccctggatgttactttcaatgtaaagaactaatctagatggccgggcgtggtggctcatgcctgtaatcccagcactttgggaggccgaggcgggtggatcacaaggtcaggagttcaagatcagcctggccaacatagtgaaaccctgtctctactaaaaatacaaaaaattatccgggcacggtggcgggcgcctgtaatcccagctacttgggaggctgaggcaaggagaatcacttgaacctgggaggtggaggttgcagtgagctgagatcgtgccactgcactccagcctgggtgacagtgcaag

SEQ ID NO: 3631 - protein, 314 aa, Homo sapiens; identical to SEQ ID NO: 413

SEQ ID NO: 3632 - DNA, 1419 bp, Homo sapiens
caccccatctggattgttttctgttaccacctggaaaagaaagcgtaaaagatgaggagaagaaggtggaaggatgctagacagagaagggacttctgcttttctaatctgttaccttctacagaggacacaggaacctcaccagggcacggcccactgcacgcagcagcaggaggggaaggagattctgacggattccttgccagggcatttgctcctcaagagttaaaggatgccggaataagctggcggatccattgtgtcccatgattcaggccctgaggagcgtgatagcccgagtcatcgcacaagcttcaaccacactaaattgattctgtgttgcttttcctaccgctgggccaatctcagctatgatttgtggacctgttcttttgcagctcaaagacatgcccccttgggcttcctggcagaaggtggactcatttcccacttgcccactgttccctgacccctccccaagctgggcttttccccatcatttcctttggaacaaaatcttctcttcatataaaactgaccatgttggcctcttccttcctcagaacatcctaaaaatgagtatggaagcatctcttagatattattcatttctaatatctacagcctttatttttatttattatttttttttgagacacagtctcactctgtcgcccaggctggagtgcagtggcgcaatctcggctcactgcaacctctgcctcccaggttcaagcgattctcctgcctcagcctcccaagtagctgggtttacaggcgggtgccaccatgcctggctaatctttgtatttttagtagagacagggttttgccacgttggccatgctggtctcaaactcctgacctcaagtgatctgcctgccttggcctctcaaaggtctgggattacaggcatgagccactgtgacgggcctacagcctttaaaaagacaagccaaaacagaatctgcatccccagtctccctgtctccatgaagcacatgcaccagaaagagacatcattcattgctggctgtgtctctgtctcccatgttgtccctccttccttctttcaatcataggtgaatttccagggatgctgcttcataagcttttgtccacagtgaatatgactggtgctttttaagaagtacagattggttgcttagttaaaagggactagatttacattaaaaaaataaaatccacaaataactccctatggtaggctgaaaaatggcccccaaagatatccacatcctaatccctggaacctataaataataccttatatgccaccccagcccccaaattaaaggtatttgcagatgtgattaagtgtaggattttcagatggtacaatttgcctagtttatctgggtggactctaaatacaattaaataaatgcttatgagaag

SEQ ID NO: 3633 - protein, 72 aa, Homo sapiens
MRRRRWKDARQRRDFCFSNLLPSTEDTGTSPGHGPLHAAAGGEGDSDGFLARAFAPQELKDAGISWRIHCVP

SEQ ID NO: 3634 - DNA, 1610 bp, Homo sapiens
cactcgatcagcccgccggctccggagcggctctgccttcccgagcgcgggacgcggcgccctgggggaggagggcgaagcgacgcggcgatggctccgcgggcactcccggggtccgccgtcctagccgctgctgtcttcgtgggaggcgccgtgagttcgccgctggtggctccggacaatgggagcagccgcacattgcactccagaacagagacgaccccgtcgcccagcaacgatactgggaatggacacccagaatatattgcatacgcgcttgtccctgtgttctttatcatgggtctctttggcgtcctcatttgccacctgcttaagaagaaaggctatcgttgtacaacagaagcagagcaagatatcgaagaggaaaaggttgaaaagatagaattgaatgacagtgtgaatgaaaacagtgacactgttgggcaaatcgtccactacatcatgaaaaatgaagcgaatgctgatgtcttaaaggcgatggtagcagataacagcctgtatgatcctgaaagccccgtgacccccagcacaccagggagcccgccagtgagtcctgggcctttgtcaccaggggggacgccagggaagcacgtctgtggccatcatctgcatacggtgggcggtgttgtcgagagggatgtgtgtcatcggtgtaggcacaagcggtggcactttataaagcccactaacaagtccagagagagcagaccacggcgccaaggcgaggtcacggtcctttctgttggcagatttagagttacaaaagtggagcacaagtcaaaccagaaggaacggagaagcctgatgtctgttagtggggctgaaaccgtcaatggggaggtgccggcaacacctgtgaagagagaacgcagtggcacagagtagcagtgtcctgaatgacagctcatctacacagagtgaaactccagatatgtgacaagcagcatgggacagatgctgacaatcagaacagatgctggatgtaaacaactggtaaggctgcactggtgcatgctggcagaatcacctgctatgcatccagggagcaaatgcatctgcatgctcagcatgacaccagcttacctccctgtgcaaatcccctcccctaatcagtctcatccaaatcttctcctgcagtagcagcttctaaagctgcaagggcctccgccaccgctgcatcctcgtccacaatctccccatccccatctccatcggagccatgggtatcctcctgcctgtttcctgagtcaaccacaggcatggcatgaacaggacccttctcattaaagcagatgcttagaacttctgtttccacatcctcattcaatgaatcccagcttctcctcacagagaagggcgtattcaaaccatgctcccccactgggggctgaattccctctagggattcatcctcagtatggttcttgaaaacacagtccttttcattatgatcaacgttgtctccagctgggccccaatgctgaaggtaatctggggctggtatctggaagacatggtcttgtacttccaaggcaaaactttctgcctcagaaggagctctggagtctccatttctcatgacttgggtc

SEQ ID NO: 3635 - protein, 271 aa, Homo sapiens
MAPRALPGSAVLAAAVFVGGAVSSPLVAPDNGSSRTLHSRTETTPSPSNDTGNGHPEYIAYALVPVFFIMGLFGVLICHLLKKKGYRCTTEAEQDIEEEKVEKIELNDSVNENSDTVGQIVHYIMKNEANADVLKAMVADNSLYDPESPVTPSTPGSPPVSPGPLSPGGTPGKHVCGHHLHTVGGVVERDVCHRCRHKRWHFIKPTNKSRESRPRRQGEVTVLSVGRFRVTKVEHKSNQKERRSLMSVSGAETVNGEVPATPVKRERSGTE

SEQ ID NO: 3636 - DNA, 1327 bp, Homo sapiens
cactcgatcagcccgccggctccggagcggctctgccttcccgagcgcgggacgcggcgccctgggggaggagggcgaagcgacgcggcgatggctccgcgggcactcccggggtccgccgtcctagccgctgctgtcttcgtgggaggcgccgtgagttcgccgctggtggctccggacaatgggagcagccgcacattgcactccagaacagagacgaccccgtcgcccagcaacgatactgggaatggacacccagaatatattgcatacgcgcttgtccctgtgttctttatcatgggtctctttggcgtcctcatttgccacctgcttaagaagaaaggctatcgttgtacaacagaagcagagcaagatatcgaagaggaaaaggttgaaaagatagaattgaatgacagtgtgaatgaaaacagtgacactgttgggcaaatcgtccactacatcatgaaaaatgaagcgaatgctgatgtcttaaaggcgatggtagcagataacagcctgtatgatcctgaaagccccgtgacccccagcacaccagggagcccgccagtgagtcctgggcctttgtcaccaggggggacgccagggaagcacgtctgtggccatcatctgcatacggtgggcggtgttgtcgagagggatgtgtgtcatcggtgtaggcacaagcggtggcactttataaagcccactaacaagtccagagagagcagaccacggcgccaaggcgaggtcacggtcctttctgttggcagatttagagttacaaaagtggagcacaagtcaaaccagaaggaacggagaagcctgatgtctgttagtggggctgaaaccgtcaatggggaggtgccggcaacacctgtgaagagagaacgcagtggcacagagtagcagtgtcctgaatgacagctcatctacacagagtgaaactccagatatgtgacaagcagcatgggacagatgctgacaatcagaacagatgctggatgtaaacaactggtaaggctgcactggtgcatgctggcagaatcacctgctatgcatccagggagcaaatgcatctgcatgctcagcatgacaccagcttacctccctgtgcaaatcccctcccctaatcagtctcatccaaatcttctcctgcagtagcagcttctaaagctgcaagggcctccgccaccgctgcatcctcgtccacaatctccccatccccatctccatcggagccatgggtatcctcctgcctgtttcctgagtcaaccacaggcatggcatgaacaggacccttctcattaaagcagatgcttagaacttc

SEQ ID NO: 3637 - protein, 271 aa, Homo sapiens; identical to SEQ ID NO: 3635

SEQ ID NO: 3638 - DNA, 779 bp, Homo sapiens
tgtcccatgctgcttgtcacatatctggagtttcactctgtgtagatgagctgtcattcaggacactaggagaaaaatctgagtgggtcattgtgcccatatccacagaaaatgcagaagttgaacagagcgggttaagctcagcagttttcacagtagagcagaagtccccaggaaacaaagggttagtcattagctgagatgttgattttaaaacaccttgaccttaacttttttacattattacttttaaatctcctttgggattggggaggctggccaaaataagtcttaaaactgcttatgtcatatttggattttaagttcatgacattcggaacagcaaagccatatatgcaatgtttttatgccattaaatgtctgattccaattaaaatataacaacgtatgtgtctttctagaagtcttaactcaaaggtggttctaattttctcagaatatcagtgaccctggatgttactttcaatgtaaagaactaatctagatggccgggcgtggtggctcatgcctgtaatcccagcactttgggaggccgaggcgggtggatcacaaggtcaggagttcaagatcagcctggccaacatagtgaaaccctgtctctactaaaaatacaaaaaattatccgggcacggtggcgggcgcctgtaatcccagctacttgggaggctgaggcaaggagaatcacttgaacctgggaggtggaggttgcagtgagctgagatcgtgccactgcactccagcctgggtgacagtgcaag

SEQ ID NO: 3639 - protein, 33 aa, Homo sapiens
MPVIPALWEAEAGGSQGQEFKISLANIVKPCLY

SEQ ID NO: 3640 - DNA, 3156 bp, Homo sapiens
cggtcccctacccccacctactcgcccgccccctccggggccacccggggactctgaccccccggcctggcgccgcctgacggagcgggagtggctcgctccgggccggccggcgccggggatgaggctgcccggacagggtctaggggcgcgcgaggggccgagcatcccactcagctcgccggccccggcccccgcctcccccgctcctcccgcctggccgccccggcccgccgtgacccacggccgcctccggagcccgacgcggacttccaatagtagtcagacattatcatcctgtcatactatggagccatgtacatcagatgaatttttccaagcccttaatcatgccgagcaaacatttaaaaaaatggaaaactatttgagacataaacagttgtgtgatgtaattttagtcgctggtgatcgcagaattccagctcacagattggtgctctcctctgtctcagactattttgctgccatgtttactaatgatgtcagagaggcaagacaagaagaaataaaaatggaaggtgtagaaccaaattcgttgtggtccttgatccagtatgcttatacaggccgccttgaattaaaagaagataatattgagtgcctgttatctacagcttgccttcttcagctttcacaggttgtagaagcatgctgtaagtttttaatgaaacagcttcatccatccaactgtcttggaattcgttcttttgctgatgcccaaggttgtacagatttgcataaagtggctcacaattatactatggagcatttcatggaagtaatcagaaaccaggaatttgtattattaccagccagcgaaattgcaaagctcttggctagtgatgacatgaacattcctaatgaggagacaatattgaatgcacttcttacttgggtccgtcatgatttggaacagagacggaaagatctaagtaaacttttggcttatattaggctacctcttcttgcaccacagttcctggcagacatggaaaataatgtactttttcgggatgatatagaatgtcagaaactcattatggaagcaatgaagtaccatttattaccagagagacgacccatgttacaaagtcctcggacaaaacctaggaagtcaactgttggtacattatttgcagttgggggaatggattcaacaaaaggagcaacaagcattgaaaagtatgatctccgtacaaatatgtggactccagtagcaaatatgaatgggaggaggctacagttcggtgttgcagtgctagatgacaaactgtatgtggttggaggaagagatggactgaagactttgaatactgtagagtgctacaaccccaaaacaaaaacttggagtgtgatgccacctatgtccacacatagacatggccttggtgtggctgtactggaaggtcccatgtatgccgtaggaggacatgatggctggagctatctgaacacagtggaaagatgggaccctcaggctcgccagtggaattttgttgccactatgtctacccctaggagtacagtaggtgtggcagtactaagtggaaaactttatgcagttggtggtcgtgatggaagttcttgtctcaaatcagtagaatgttttgatcctcatactaataagtggacactgtgtgcacagatgtcaaaaaggagaggtggcgtaggagtgacgacctggaatggactgctgtatgctataggggggcacgatgctcccgcatccaacttgacttccagactctcagactgtgtggaaagatatgatcccaaaacagacatgtggactgcagtagcatccatgagcatcagcagagatgcagtgggggtctgtttacttggtgataagttatatgctgttggggggtatgatggacaggcataccttaatactgtggaggcttatgatccccagacaaatgagtggacccaggttgctccactgtgcctaggaagagctggagcttgtgttgtgactgtaaaattataatttagtgccccgttttctacatgaagacaccgtcttcctttattaatttagtataattattctatcaatggatacatttttagtaaatgtgcattgtcacaatcctgggcacaaagtgcctgatgtcaaaatgaagatagtaaaacaagggaggaagcagtggatggaccaggattaattcctttcatttcttagtaaattaaaacctgcagctggtggattgtgatcacacattcccgaagtaataagtgaggacgaatgcactgctctggaacataacccagtgctaactgggggtttcatttattcagtcaagcacatcttactcacatccagatttattttcctacagtgcaaacacaccagatgaaactttaaaatgttactttttgtaagcttatcataaatgagttgcagtaatttgtttgcttgtttgtttaaccacaaccactattttaatgatatactaaagataacactatttagttttttcagaaacatctgcattatatgtgtgttggttgtggattttgtttctaaaattggcttagtccaataaataaagaaaagcattaaggacttaaagcaacaataaccaaataaaaacttgataggatctttgaagtctatttaaatattcattccattacatctagactcaccaagaactacatgttatgatgttaagttgaagttgaaacatgatgttttgcattaaatttaagatatgcaaatttatgtagagaaaataaatgttatataccctataatctttcacctaattagtatttaattatatggatttgttttatattataaaagatgttttgattttgtcttttgatattgacaaaattgtttggatatccttatgttctcaagtctgtatctgcctcccctgccttatttcttatgttttgccacagttaacccattgtgcttctttgtaatcaaacagtttgtgggagaatgggcttattgaatgtctaaaaaataagtttaaagtgtttgttaccctaagttttttacatttttaaactctaattacatatgtgaatgttattactctcagtgaattgttattgtttgcaaaaatgcactgggcagtaacattttgtgataaatcctataagatataagtc

SEQ ID NO: 3641 - protein, 630 aa, Homo sapiens
MRLPGQGLGAREGPSIPLSSPAPAPASPAPPAWPPRPAVTHGRLRSPTRTSNSSQTLSSCHTMEPCTSDEFFQALNHAEQTFKKMENYLRHKQLCDVILVAGDRRIPAHRLVLSSVSDYFAAMFTNDVREARQEEIKMEGVEPNSLWSLIQYAYTGRLELKEDNIECLLSTACLLQLSQVVEACCKFLMKQLHPSNCLGIRSFADAQGCTDLHKVAHNYTMEHFMEVIRNQEFVLLPASEIAKLLASDDMNIPNEETILNALLTWVRHDLEQRRKDLSKLLAYIRLPLLAPQFLADMENNVLFRDDIECQKLIMEAMKYHLLPERRPMLQSPRTKPRKSTVGTLFAVGGMDSTKGATSIEKYDLRTNMWTPVANMNGRRLQFGVAVLDDKLYVVGGRDGLKTLNTVECYNPKTKTWSVMPPMSTHRHGLGVAVLEGPMYAVGGHDGWSYLNTVERWDPQARQWNFVATMSTPRSTVGVAVLSGKLYAVGGRDGSSCLKSVECFDPHTNKWTLCAQMSKRRGGVGVTTWNGLLYAIGGHDAPASNLTSRLSDCVERYDPKTDMWTAVASMSISRDAVGVCLLGDKLYAVGGYDGQAYLNTVEAYDPQTNEWTQVAPLCLGRAGACVVTVKL

SEQ ID NO: 3642 - DNA, 3242 bp, Homo sapiens
cggtcccctacccccacctactcgcccgccccctccggggccacccggggactctgaccccccggcctggcgccgcctgacggagcgggagtggctcgctccgggccggccggcgccggggatgaggctgcccggacagggtctaggggcgcgcgaggggccgagcatcccactcagctcgccggccccggcccccgcctcccccgctcctcccgcctggccgccccggcccgccgtgacccacggccgcctccggagcccgacgcggacttccaatagtagtcagacattatcatcctgtcatactatggagccatgtacatcagatgaatttttccaagcccttaatcatgccgagcaaacatttaaaaaaatggaaaactatttgagacataaacagttgtgtgatgtaattttagtcgctggtgatcgcagaattccagctcacagattggtgctctcctctgtctcagactattttgctgccatgtttactaatgatgtcagagaggcaagacaagaagaaataaaaatggaaggtgtagaaccaaattcgttgtggtccttgatccagtatgcttatacaggccgccttgaattaaaagaagataatattgagtgcctgttatctacagcttgccttcttcagctttcacaggttgtagaagcatgctgtaagtttttaatgaaacagcttcatccatccaactgtcttggaattcgttcttttgctgatgcccaaggttgtacagatttgcataaagtggctcacaattatactatggagcatttcatggaagtaatcagaaaccaggaatttgtattattaccagccagcgaaattgcaaagctcttggctagtgatgacatgaacattcctaatgaggagacaatattgaatgcacttcttacttgggtccgtcatgatttggaacagagacggaaagatctaagtaaacttttggcttatattaggctacctcttcttgcaccacagttcctggcagacatggaaaataatgtactttttcgggatgatatagaatgtcagaaactcattatggaagcaatgaagtaccatttattaccagagagacgacccatgttacaaagtcctcggacaaaacctaggaagtcaactgttggtacattatttgcagttgggggaatggattcaacaaaaggagcaacaagcattgaaaagtatgatctccgtacaaatatgtggactccagtagcaaatatgaatgggaggaggctacagttcggtgttgcagtgctagatgacaaactgtatgtggttggaggaagagatggactgaagactttgaatactgtagagtgctacaaccccaaaacaaaaacttggagtgtgatgccacctatgtccacacatagacatggccttggtgtggctgtactggaaggtcccatgtatgccgtaggaggacatgatggctggagctatctgaacacagtggaaagatgggaccctcaggctcgccagtggaattttgttgccactatgtctacccctaggagtacagtaggtgtggcagtactaagtggaaaactttatgcagttggtggtcgtgatggaagttcttgtctcaaatcagtagaatgttttgatcctcatactaataagtggacactgtgtgcacagatgtcaaaaaggagaggtggcgtaggagtgacgacctggaatggactgctgtatgctataggggggcacgatgctcccgcatccaacttgacttccagactctcagactgtgtggaaagatatgatcccaaaacagacatgtggactgcagtagcatccatgagcatcagcagagatgcagtgggggtctgtttacttggtgataagttatatgctgttggggggtatgatggacaggcataccttaatactgtggaggcttatgatccccagacaaatgagtggacccaggttgctccactgtgcctaggaagagctggagcttgtgttgtgactgtaaaattataatttagtgccccgttttctacatgaagacaccgtcttcctttattaatttagtataattattctatcaatggatacatttttagtaaatgtgcattgtcacaatcctgggcacaaagtgcctgatgtcaaaatgaagatagtaaaacaagggaggaagcagtggatggaccaggattaattcctttcatttcttagtaaattaaaacctgcagctggtggattgtgatcacacattcccgaagtaataagtgaggacgaatgcactgctctggaacataacccagtgctaactgggggtttcatttattcagtcaagcacatcttactcacatccagatttattttcctacagtgcaaacacaccagatgaaactttaaaatgttactttttgtaagcttatcataaatgagttgcagtaatttgtttgcttgtttgtttaaccacaaccactattttaatgatatactaaagataacactatttagttttttcagaaacatctgcattatatgtgtgttggttgtggattttgtttctaaaattggcttagtccaataaataaagaaaagcattaaggacttaaagcaacaataaccaaataaaaacttgataggatctttgaagtctatttaaatattcattccattacatctagactcaccaagaactacatgttatgatgttaagttgaagttgaaacatgatgttttgcattaaatttaagatatgcaaatttatgtagagaaaataaatgttatataccctataatctttcacctaattagtatttaattatatggatttgttttatattataaaagatgttttgattttgtcttttgatattgacaaaattgtttggatatccttatgttctcaagtctgtatctgcctcccctgccttatttcttatgttttgccacagttaacccattgtgcttctttgtaatcaaacagtttgtgggagaatgggcttattgaatgtctaaaaaataagtttaaagtgtttgttaccctaagttttttacatttttaaactctaattacatatgtgaatgttattactctcagtgaattgttattgtttgcaaaaatgcactgggcagtaacattttgtgataaatcctataagatataagtcattgagatgtctaagatgctttttattttaaccccagttaataaccaccttacggaaaataatatttgctaatattgtttattgtg

SEQ ID NO: 3643 - protein, 630 aa, Homo sapiens; identical to SEQ ID NO: 3641

SEQ ID NO: 3644 - DNA, 4735 bp, Homo sapiens
cggtcccctacccccacctactcgcccgccccctccggggccacccggggactctgaccccccggcctggcgccgcctgacggagcgggagtggctcgctccgggccggccggcgccggggatgaggctgcccggacagggtctaggggcgcgcgaggggccgagcatcccactcagctcgccggccccggcccccgcctcccccgctcctcccgcctggccgccccggcccgccgtgacccacggccgcctccggagcccgacgcggacttccaatagtagtcagacattatcatcctgtcatactatggagccatgtacatcagatgaatttttccaagcccttaatcatgccgagcaaacatttaaaaaaatggaaaactatttgagacataaacagttgtgtgatgtaattttagtcgctggtgatcgcagaattccagctcacagattggtgctctcctctgtctcagactattttgctgccatgtttactaatgatgtcagagaggcaagacaagaagaaataaaaatggaaggtgtagaaccaaattcgttgtggtccttgatccagtatgcttatacaggccgccttgaattaaaagaagataatattgagtgcctgttatctacagcttgccttcttcagctttcacaggttgtagaagcatgctgtaagtttttaatgaaacagcttcatccatccaactgtcttggaattcgttcttttgctgatgcccaaggttgtacagatttgcataaagtggctcacaattatactatggagcatttcatggaagtaatcagaaaccaggaatttgtattattaccagccagcgaaattgcaaagctcttggctagtgatgacatgaacattcctaatgaggagacaatattgaatgcacttcttacttgggtccgtcatgatttggaacagagacggaaagatctaagtaaacttttggcttatattaggctacctcttcttgcaccacagttcctggcagacatggaaaataatgtactttttcgggatgatatagaatgtcagaaactcattatggaagcaatgaagtaccatttattaccagagagacgacccatgttacaaagtcctcggacaaaacctaggaagtcaactgttggtacattatttgcagttgggggaatggattcaacaaaaggagcaacaagcattgaaaagtatgatctccgtacaaatatgtggactccagtagcaaatatgaatgggaggaggctacagttcggtgttgcagtgctagatgacaaactgtatgtggttggaggaagagatggactgaagactttgaatactgtagagtgctacaaccccaaaacaaaaacttggagtgtgatgccacctatgtccacacatagacatggccttggtgtggctgtactggaaggtcccatgtatgccgtaggaggacatgatggctggagctatctgaacacagtggaaagatgggaccctcaggctcgccagtggaattttgttgccactatgtctacccctaggagtacagtaggtgtggcagtactaagtggaaaactttatgcagttggtggtcgtgatggaagttcttgtctcaaatcagtagaatgttttgatcctcatactaataagtggacactgtgtgcacagatgtcaaaaaggagaggtggcgtaggagtgacgacctggaatggactgctgtatgctataggggggcacgatgctcccgcatccaacttgacttccagactctcagactgtgtggaaagatatgatcccaaaacagacatgtggactgcagtagcatccatgagcatcagcagagatgcagtgggggtctgtttacttggtgataagttatatgctgttggggggtatgatggacaggcataccttaatactgtggaggcttatgatccccagacaaatgagtggacccaggttgctccactgtgcctaggaagagctggagcttgtgttgtgactgtaaaattataatttagtgccccgttttctacatgaagacaccgtcttcctttattaatttagtataattattctatcaatggatacatttttagtaaatgtgcattgtcacaatcctgggcacaaagtgcctgatgtcaaaatgaagatagtaaaacaagggaggaagcagtggatggaccaggattaattcctttcatttcttagtaaattaaaacctgcagctggtggattgtgatcacacattcccgaagtaataagtgaggacgaatgcactgctctggaacataacccagtgctaactgggggtttcatttattcagtcaagcacatcttactcacatccagatttattttcctacagtgcaaacacaccagatgaaactttaaaatgttactttttgtaagcttatcataaatgagttgcagtaatttgtttgcttgtttgtttaaccacaaccactattttaatgatatactaaagataacactatttagttttttcagaaacatctgcattatatgtgtgttggttgtggattttgtttctaaaattggcttagtccaataaataaagaaaagcattaaggacttaaagcaacaataaccaaataaaaacttgataggatctttgaagtctatttaaatattcattccattacatctagactcaccaagaactacatgttatgatgttaagttgaagttgaaacatgatgttttgcattaaatttaagatatgcaaatttatgtagagaaaataaatgttatataccctataatctttcacctaattagtatttaattatatggatttgttttatattataaaagatgttttgattttgtcttttgatattgacaaaattgtttggatatccttatgttctcaagtctgtatctgcctcccctgccttatttcttatgttttgccacagttaacccattgtgcttctttgtaatcaaacagtttgtgggagaatgggcttattgaatgtctaaaaaataagtttaaagtgtttgttaccctaagttttttacatttttaaactctaattacatatgtgaatgttattactctcagtgaattgttattgtttgcaaaaatgcactgggcagtaacattttgtgataaatcctataagatataagtcattgagatgtctaagatgctttttattttaaccccagttaataaccaccttacggaaaataatatttgctaatattgtttattgtgaactaggaatcaaagtttttgtatgcatcaatgcacttaatccttataacaaccttatgaggtagttctattccctttttatagctaaggaaattggggtacagagaagttagccccaaggttatatattgcaagtaagtggcagagcagggattcatacaaagaccttctcactcagcagtcttcactcttactattcctgccactaggtagaaaaagaaagatttcggccgggcacagtggctcacgcctataattcccagcactttgggaggctgaggtgggcggatcacgaggtcaggagatggagaccatcctggctaacacagtgaaaccccgtctctactaaaaataaaaaataaaaaaaaattagccaggcgtggtggcgggtgcctgtacgcccagctactcgggaggctgaggcgggagaatggcgtgaacccaggaggaggagcttgcagtgtgccaagatcgcaccactgcactccagcctgggtgacagagcgagactccatcaaaaaaaaataaataaaaaaaaaataaaagatttcattttatgtgaggaattattttaataaaaaaaagagggtttatgctctatagtaataaaatttaccagtaacacccaatcagaaaattttggttccttagtatttagggaagacttttgtttaaatctcttatggaattttacatgttttgatttagaaaagtagatgcaatataatatatttcaagttttatacatattagatgaattgcatggtattttaggcaacttaactataaacaaatttattcatagaagcattgttgccaacaatttagatgacctcgatgaaaaaacacaccaattgacaaaactggctcaaaaggaaataaaaaatccaaacagacctgtaacaagtaaagagattgaaccagtaatcaaaaatctcccaacaaagaaagtccaggactaaatgagtttactggcaaactatgccaaacatataaagaagaattaacactaatccttctcgaactctcccaaaaaatggaagagaaaggagcaccctgtgacattctataaggcggacattaccttaacaccaaagccagacaaagacctcacagggaagctacagaccaatatcccttatgaatatagatgcaaaaaaacttcaaaatactagcaggccaaatccagcagcttattaaaatgatcacacagcatgaccaagtgagatttatcaaagaaatgcagggatggttctacatacaaatgtcaatcgatgtaataatataccatattaatagaatgaaggggaaaaaacagcatgatcacctcaattgataagaaaaagcatttgacaaaaatccaacaccctttcatggtaaaaacactctgcaaactaggaagaaaagggaactttcttaacctgataaagacatccataaaaacccacagctaacaacataatagcaaaacattgaaaatttttcccctaata

SEQ ID NO: 3645 - protein, 630 aa, Homo sapiens; identical to SEQ ID NO: 3641

SEQ ID NO: 3646 - DNA, 3424 bp, Homo sapiens
ctcccgcctggccgccccggcccgccgtgacccacggccgcctccggagcccgacgcgcagggcatatacttctcttgtcttggttggatgcacaaatctgtgtgcagtgctttttgcccgttgcctagacgatcacttggtttctctgaggatgtctggttctcgtaaagagtttgatgtgaaacagattttgaaaatcagatggaggtggtttggtcatcaagcatcatctcctaattctacagttgacagccagcagggagaattttggaaccgaggacagactggagcaaacggtgggagaaagtttttagatccatgtagcctacaattgcctttggcttcaattggttaccgaaggtccagccaactggattttcagaattcaccttcttggccaatggcatccacctctgaagtccctgcatttgagtttacagcagaagattgtggcggtgcacattggctggatagaccagaagtggatgatggcactagtgaagaagaaaatgaatctgattccagttcatgcaggacttccaatagtagtcagacattatcatcctgtcatactatggagccatgtacatcagatgaatttttccaagcccttaatcatgccgagcaaacatttaaaaaaatggaaaactatttgagacataaacagttgtgtgatgtaattttagtcgctggtgatcgcagaattccagctcacagattggtgctctcctctgtctcagactattttgctgccatgtttactaatgatgtcagagaggcaagacaagaagaaataaaaatggaaggtgtagaaccaaattcgttgtggtccttgatccagtatgcttatacaggccgccttgaattaaaagaagataatattgagtgcctgttatctacagcttgccttcttcagctttcacaggttgtagaagcatgctgtaagtttttaatgaaacagcttcatccatccaactgtcttggaattcgttcttttgctgatgcccaaggttgtacagatttgcataaagtggctcacaattatactatggagcatttcatggaagtaatcagaaaccaggaatttgtattattaccagccagcgaaattgcaaagctcttggctagtgatgacatgaacattcctaatgaggagacaatattgaatgcacttcttacttgggtccgtcatgatttggaacagagacggaaagatctaagtaaacttttggcttatattaggctacctcttcttgcaccacagttcctggcagacatggaaaataatgtactttttcgggatgatatagaatgtcagaaactcattatggaagcaatgaagtaccatttattaccagagagacgacccatgttacaaagtcctcggacaaaacctaggaagtcaactgttggtacattatttgcagttgggggaatggattcaacaaaaggagcaacaagcattgaaaagtatgatctccgtacaaatatgtggactccagtagcaaatatgaatgggaggaggctacagttcggtgttgcagtgctagatgacaaactgtatgtggttggaggaagagatggactgaagactttgaatactgtagagtgctacaaccccaaaacaaaaacttggagtgtgatgccacctatgtccacacatagacatggccttggtgtggctgtactggaaggtcccatgtatgccgtaggaggacatgatggctggagctatctgaacacagtggaaagatgggaccctcaggctcgccagtggaattttgttgccactatgtctacccctaggagtacagtaggtgtggcagtactaagtggaaaactttatgcagttggtggtcgtgatggaagttcttgtctcaaatcagtagaatgttttgatcctcatactaataagtggacactgtgtgcacagatgtcaaaaaggagaggtggcgtaggagtgacgacctggaatggactgctgtatgctataggggggcacgatgctcccgcatccaacttgacttccagactctcagactgtgtggaaagatatgatcccaaaacagacatgtggactgcagtagcatccatgagcatcagcagagatgcagtgggggtctgtttacttggtgataagttatatgctgttggggggtatgatggacaggcataccttaatactgtggaggcttatgatccccagacaaatgagtggacccaggttgctccactgtgcctaggaagagctggagcttgtgttgtgactgtaaaattataatttagtgccccgttttctacatgaagacaccgtcttcctttattaatttagtataattattctatcaatggatacatttttagtaaatgtgcattgtcacaatcctgggcacaaagtgcctgatgtcaaaatgaagatagtaaaacaagggaggaagcagtggatggaccaggattaattcctttcatttcttagtaaattaaaacctgcagctggtggattgtgatcacacattcccgaagtaataagtgaggacgaatgcactgctctggaacataacccagtgctaactgggggtttcatttattcagtcaagcacatcttactcacatccagatttattttcctacagtgcaaacacaccagatgaaactttaaaatgttactttttgtaagcttatcataaatgagttgcagtaatttgtttgcttgtttgtttaaccacaaccactattttaatgatatactaaagataacactatttagttttttcagaaacatctgcattatatgtgtgttggttgtggattttgtttctaaaattggcttagtccaataaataaagaaaagcattaaggacttaaagcaacaataaccaaataaaaacttgataggatctttgaagtctatttaaatattcattccattacatctagactcaccaagaactacatgttatgatgttaagttgaagttgaaacatgatgttttgcattaaatttaagatatgcaaatttatgtagagaaaataaatgttatataccctataatctttcacctaattagtatttaattatatggatttgttttatattataaaagatgttttgattttgtcttttgatattgacaaaattgtttggatatccttatgttctcaagtctgtatctgcctcccctgccttatttcttatgttttgccacagttaacccattgtgcttctttgtaatcaaacagtttgtgggagaatgggcttattgaatgtctaaaaaataagtttaaagtgtttgttaccctaagttttttacatttttaaactctaattacatatgtgaatgttattactctcagtgaattgttattgtttgcaaaaatgcactgggcagtaacattttgtgataaatcctataagatataagtc

SEQ ID NO: 3647 - protein, 709 aa, Homo sapiens; identical to SEQ ID NO: 416

SEQ ID NO: 3648 - DNA, 3510 bp, Homo sapiens
ctcccgcctggccgccccggcccgccgtgacccacggccgcctccggagcccgacgcgcagggcatatacttctcttgtcttggttggatgcacaaatctgtgtgcagtgctttttgcccgttgcctagacgatcacttggtttctctgaggatgtctggttctcgtaaagagtttgatgtgaaacagattttgaaaatcagatggaggtggtttggtcatcaagcatcatctcctaattctacagttgacagccagcagggagaattttggaaccgaggacagactggagcaaacggtgggagaaagtttttagatccatgtagcctacaattgcctttggcttcaattggttaccgaaggtccagccaactggattttcagaattcaccttcttggccaatggcatccacctctgaagtccctgcatttgagtttacagcagaagattgtggcggtgcacattggctggatagaccagaagtggatgatggcactagtgaagaagaaaatgaatctgattccagttcatgcaggacttccaatagtagtcagacattatcatcctgtcatactatggagccatgtacatcagatgaatttttccaagcccttaatcatgccgagcaaacatttaaaaaaatggaaaactatttgagacataaacagttgtgtgatgtaattttagtcgctggtgatcgcagaattccagctcacagattggtgctctcctctgtctcagactattttgctgccatgtttactaatgatgtcagagaggcaagacaagaagaaataaaaatggaaggtgtagaaccaaattcgttgtggtccttgatccagtatgcttatacaggccgccttgaattaaaagaagataatattgagtgcctgttatctacagcttgccttcttcagctttcacaggttgtagaagcatgctgtaagtttttaatgaaacagcttcatccatccaactgtcttggaattcgttcttttgctgatgcccaaggttgtacagatttgcataaagtggctcacaattatactatggagcatttcatggaagtaatcagaaaccaggaatttgtattattaccagccagcgaaattgcaaagctcttggctagtgatgacatgaacattcctaatgaggagacaatattgaatgcacttcttacttgggtccgtcatgatttggaacagagacggaaagatctaagtaaacttttggcttatattaggctacctcttcttgcaccacagttcctggcagacatggaaaataatgtactttttcgggatgatatagaatgtcagaaactcattatggaagcaatgaagtaccatttattaccagagagacgacccatgttacaaagtcctcggacaaaacctaggaagtcaactgttggtacattatttgcagttgggggaatggattcaacaaaaggagcaacaagcattgaaaagtatgatctccgtacaaatatgtggactccagtagcaaatatgaatgggaggaggctacagttcggtgttgcagtgctagatgacaaactgtatgtggttggaggaagagatggactgaagactttgaatactgtagagtgctacaaccccaaaacaaaaacttggagtgtgatgccacctatgtccacacatagacatggccttggtgtggctgtactggaaggtcccatgtatgccgtaggaggacatgatggctggagctatctgaacacagtggaaagatgggaccctcaggctcgccagtggaattttgttgccactatgtctacccctaggagtacagtaggtgtggcagtactaagtggaaaactttatgcagttggtggtcgtgatggaagttcttgtctcaaatcagtagaatgttttgatcctcatactaataagtggacactgtgtgcacagatgtcaaaaaggagaggtggcgtaggagtgacgacctggaatggactgctgtatgctataggggggcacgatgctcccgcatccaacttgacttccagactctcagactgtgtggaaagatatgatcccaaaacagacatgtggactgcagtagcatccatgagcatcagcagagatgcagtgggggtctgtttacttggtgataagttatatgctgttggggggtatgatggacaggcataccttaatactgtggaggcttatgatccccagacaaatgagtggacccaggttgctccactgtgcctaggaagagctggagcttgtgttgtgactgtaaaattataatttagtgccccgttttctacatgaagacaccgtcttcctttattaatttagtataattattctatcaatggatacatttttagtaaatgtgcattgtcacaatcctgggcacaaagtgcctgatgtcaaaatgaagatagtaaaacaagggaggaagcagtggatggaccaggattaattcctttcatttcttagtaaattaaaacctgcagctggtggattgtgatcacacattcccgaagtaataagtgaggacgaatgcactgctctggaacataacccagtgctaactgggggtttcatttattcagtcaagcacatcttactcacatccagatttattttcctacagtgcaaacacaccagatgaaactttaaaatgttactttttgtaagcttatcataaatgagttgcagtaatttgtttgcttgtttgtttaaccacaaccactattttaatgatatactaaagataacactatttagttttttcagaaacatctgcattatatgtgtgttggttgtggattttgtttctaaaattggcttagtccaataaataaagaaaagcattaaggacttaaagcaacaataaccaaataaaaacttgataggatctttgaagtctatttaaatattcattccattacatctagactcaccaagaactacatgttatgatgttaagttgaagttgaaacatgatgttttgcattaaatttaagatatgcaaatttatgtagagaaaataaatgttatataccctataatctttcacctaattagtatttaattatatggatttgttttatattataaaagatgttttgattttgtcttttgatattgacaaaattgtttggatatccttatgttctcaagtctgtatctgcctcccctgccttatttcttatgttttgccacagttaacccattgtgcttctttgtaatcaaacagtttgtgggagaatgggcttattgaatgtctaaaaaataagtttaaagtgtttgttaccctaagttttttacatttttaaactctaattacatatgtgaatgttattactctcagtgaattgttattgtttgcaaaaatgcactgggcagtaacattttgtgataaatcctataagatataagtcattgagatgtctaagatgctttttattttaaccccagttaataaccaccttacggaaaataatatttgctaatattgtttattgtg

SEQ ID NO: 3649 - protein, 709 aa, Homo sapiens; identical to SEQ ID NO: 416

SEQ ID NO: 3650 - DNA, 5003 bp, Homo sapiens
ctcccgcctggccgccccggcccgccgtgacccacggccgcctccggagcccgacgcgcagggcatatacttctcttgtcttggttggatgcacaaatctgtgtgcagtgctttttgcccgttgcctagacgatcacttggtttctctgaggatgtctggttctcgtaaagagtttgatgtgaaacagattttgaaaatcagatggaggtggtttggtcatcaagcatcatctcctaattctacagttgacagccagcagggagaattttggaaccgaggacagactggagcaaacggtgggagaaagtttttagatccatgtagcctacaattgcctttggcttcaattggttaccgaaggtccagccaactggattttcagaattcaccttcttggccaatggcatccacctctgaagtccctgcatttgagtttacagcagaagattgtggcggtgcacattggctggatagaccagaagtggatgatggcactagtgaagaagaaaatgaatctgattccagttcatgcaggacttccaatagtagtcagacattatcatcctgtcatactatggagccatgtacatcagatgaatttttccaagcccttaatcatgccgagcaaacatttaaaaaaatggaaaactatttgagacataaacagttgtgtgatgtaattttagtcgctggtgatcgcagaattccagctcacagattggtgctctcctctgtctcagactattttgctgccatgtttactaatgatgtcagagaggcaagacaagaagaaataaaaatggaaggtgtagaaccaaattcgttgtggtccttgatccagtatgcttatacaggccgccttgaattaaaagaagataatattgagtgcctgttatctacagcttgccttcttcagctttcacaggttgtagaagcatgctgtaagtttttaatgaaacagcttcatccatccaactgtcttggaattcgttcttttgctgatgcccaaggttgtacagatttgcataaagtggctcacaattatactatggagcatttcatggaagtaatcagaaaccaggaatttgtattattaccagccagcgaaattgcaaagctcttggctagtgatgacatgaacattcctaatgaggagacaatattgaatgcacttcttacttgggtccgtcatgatttggaacagagacggaaagatctaagtaaacttttggcttatattaggctacctcttcttgcaccacagttcctggcagacatggaaaataatgtactttttcgggatgatatagaatgtcagaaactcattatggaagcaatgaagtaccatttattaccagagagacgacccatgttacaaagtcctcggacaaaacctaggaagtcaactgttggtacattatttgcagttgggggaatggattcaacaaaaggagcaacaagcattgaaaagtatgatctccgtacaaatatgtggactccagtagcaaatatgaatgggaggaggctacagttcggtgttgcagtgctagatgacaaactgtatgtggttggaggaagagatggactgaagactttgaatactgtagagtgctacaaccccaaaacaaaaacttggagtgtgatgccacctatgtccacacatagacatggccttggtgtggctgtactggaaggtcccatgtatgccgtaggaggacatgatggctggagctatctgaacacagtggaaagatgggaccctcaggctcgccagtggaattttgttgccactatgtctacccctaggagtacagtaggtgtggcagtactaagtggaaaactttatgcagttggtggtcgtgatggaagttcttgtctcaaatcagtagaatgttttgatcctcatactaataagtggacactgtgtgcacagatgtcaaaaaggagaggtggcgtaggagtgacgacctggaatggactgctgtatgctataggggggcacgatgctcccgcatccaacttgacttccagactctcagactgtgtggaaagatatgatcccaaaacagacatgtggactgcagtagcatccatgagcatcagcagagatgcagtgggggtctgtttacttggtgataagttatatgctgttggggggtatgatggacaggcataccttaatactgtggaggcttatgatccccagacaaatgagtggacccaggttgctccactgtgcctaggaagagctggagcttgtgttgtgactgtaaaattataatttagtgccccgttttctacatgaagacaccgtcttcctttattaatttagtataattattctatcaatggatacatttttagtaaatgtgcattgtcacaatcctgggcacaaagtgcctgatgtcaaaatgaagatagtaaaacaagggaggaagcagtggatggaccaggattaattcctttcatttcttagtaaattaaaacctgcagctggtggattgtgatcacacattcccgaagtaataagtgaggacgaatgcactgctctggaacataacccagtgctaactgggggtttcatttattcagtcaagcacatcttactcacatccagatttattttcctacagtgcaaacacaccagatgaaactttaaaatgttactttttgtaagcttatcataaatgagttgcagtaatttgtttgcttgtttgtttaaccacaaccactattttaatgatatactaaagataacactatttagttttttcagaaacatctgcattatatgtgtgttggttgtggattttgtttctaaaattggcttagtccaataaataaagaaaagcattaaggacttaaagcaacaataaccaaataaaaacttgataggatctttgaagtctatttaaatattcattccattacatctagactcaccaagaactacatgttatgatgttaagttgaagttgaaacatgatgttttgcattaaatttaagatatgcaaatttatgtagagaaaataaatgttatataccctataatctttcacctaattagtatttaattatatggatttgttttatattataaaagatgttttgattttgtcttttgatattgacaaaattgtttggatatccttatgttctcaagtctgtatctgcctcccctgccttatttcttatgttttgccacagttaacccattgtgcttctttgtaatcaaacagtttgtgggagaatgggcttattgaatgtctaaaaaataagtttaaagtgtttgttaccctaagttttttacatttttaaactctaattacatatgtgaatgttattactctcagtgaattgttattgtttgcaaaaatgcactgggcagtaacattttgtgataaatcctataagatataagtcattgagatgtctaagatgctttttattttaaccccagttaataaccaccttacggaaaataatatttgctaatattgtttattgtgaactaggaatcaaagtttttgtatgcatcaatgcacttaatccttataacaaccttatgaggtagttctattccctttttatagctaaggaaattggggtacagagaagttagccccaaggttatatattgcaagtaagtggcagagcagggattcatacaaagaccttctcactcagcagtcttcactcttactattcctgccactaggtagaaaaagaaagatttcggccgggcacagtggctcacgcctataattcccagcactttgggaggctgaggtgggcggatcacgaggtcaggagatggagaccatcctggctaacacagtgaaaccccgtctctactaaaaataaaaaataaaaaaaaattagccaggcgtggtggcgggtgcctgtacgcccagctactcgggaggctgaggcgggagaatggcgtgaacccaggaggaggagcttgcagtgtgccaagatcgcaccactgcactccagcctgggtgacagagcgagactccatcaaaaaaaaataaataaaaaaaaaataaaagatttcattttatgtgaggaattattttaataaaaaaaagagggtttatgctctatagtaataaaatttaccagtaacacccaatcagaaaattttggttccttagtatttagggaagacttttgtttaaatctcttatggaattttacatgttttgatttagaaaagtagatgcaatataatatatttcaagttttatacatattagatgaattgcatggtattttaggcaacttaactataaacaaatttattcatagaagcattgttgccaacaatttagatgacctcgatgaaaaaacacaccaattgacaaaactggctcaaaaggaaataaaaaatccaaacagacctgtaacaagtaaagagattgaaccagtaatcaaaaatctcccaacaaagaaagtccaggactaaatgagtttactggcaaactatgccaaacatataaagaagaattaacactaatccttctcgaactctcccaaaaaatggaagagaaaggagcaccctgtgacattctataaggcggacattaccttaacaccaaagccagacaaagacctcacagggaagctacagaccaatatcccttatgaatatagatgcaaaaaaacttcaaaatactagcaggccaaatccagcagcttattaaaatgatcacacagcatgaccaagtgagatttatcaaagaaatgcagggatggttctacatacaaatgtcaatcgatgtaataatataccatattaatagaatgaaggggaaaaaacagcatgatcacctcaattgataagaaaaagcatttgacaaaaatccaacaccctttcatggtaaaaacactctgcaaactaggaagaaaagggaactttcttaacctgataaagacatccataaaaacccacagctaacaacataatagcaaaacattgaaaatttttcccctaata

SEQ ID NO: 3651 - protein, 709 aa, Homo sapiens; identical to SEQ ID NO: 416

SEQ ID NO: 3652 - DNA, 3496 bp, Homo sapiens
actgcaacggggatagtgttttctgtctctgtcatttgtggtttaagaaaaagggggtggtgttctgcatttgaaaggactttaatgaatgctgtcagtgtttgtgagacctaatggtcagtatgggaaaggagagccgggaaagtggtctagctgcttcaggataggtggatgagagtttgctctgattgaacggaatgttccaccgtgtttcatctttattcattatcctttgttctttaaaatctgatatattggcataaaagtaattgtagatatatatatgaatgtgatttattttcctttacatatttttgttgtgtacagcagggcatatacttctcttgtcttggttggatgcacaaatctgtgtgcagtgctttttgcccgttgcctagacgatcacttggtttctctgaggatgtctggttctcgtaaagagtttgatgtgaaacagattttgaaaatcagatggaggtggtttggtcatcaagcatcatctcctaattctacagttgacagccagcagggagaattttggaaccgaggacagactggagcaaacggtgggagaaagtttttagatccatgtagcctacaattgcctttggcttcaattggttaccgaaggtccagccaactggattttcagaattcaccttcttggccaatggcatccacctctgaagtccctgcatttgagtttacagcagaagattgtggcggtgcacattggctggatagaccagaagtggatgatggcactagtgaagaagaaaatgaatctgattccagttcatgcaggacttccaatagtagtcagacattatcatcctgtcatactatggagccatgtacatcagatgaatttttccaagcccttaatcatgccgagcaaacatttaaaaaaatggaaaactatttgagacataaacagttgtgtgatgtaattttagtcgctggtgatcgcagaattccagctcacagattggtgctctcctctgtctcagactattttgctgccatgtttactaatgatgtcagagaggcaagacaagaagaaataaaaatggaaggtgtagaaccaaattcgttgtggtccttgatccagtatgcttatacaggccgccttgaattaaaagaagataatattgagtgcctgttatctacagcttgccttcttcagctttcacaggttgtagaagcatgctgtaagtttttaatgaaacagcttcatccatccaactgtcttggaattcgttcttttgctgatgcccaaggttgtacagatttgcataaagtggctcacaattatactatggagcatttcatggaagtaatcagaaaccaggaatttgtattattaccagccagcgaaattgcaaagctcttggctagtgatgacatgaacattcctaatgaggagacaatattgaatgcacttcttacttgggtccgtcatgatttggaacagagacggaaagatctaagtaaacttttggcttatattaggctacctcttcttgcaccacagttcctggcagacatggaaaataatgtactttttcgggatgatatagaatgtcagaaactcattatggaagcaatgaagtaccatttattaccagagagacgacccatgttacaaagtcctcggacaaaacctaggaagtcaactgttggtacattatttgcagttgggggaatggattcaacaaaaggagcaacaagcattgaaaagtatgatctccgtacaaatatgtggactccagtagcaaatatgaatgggaggaggctacagttcggtgttgcagtgctagatgacaaactgtatgtggttggaggaagagatggactgaagactttgaatactgtagagtgctacaaccccaaaacaaaaacttggagtgtgatgccacctatgtccacacatagacatggccttggtgtggctgtactggaaggtcccatgtatgccgtaggaggacatgatggctggagctatctgaacacagtggaaagatgggaccctcaggctcgccagtggaattttgttgccactatgtctacccctaggagtacagtaggtgtggcagtactaagtggaaaactttatgcagttggtggtcgtgatggaagttcttgtctcaaatcagtagaatgttttgatcctcatactaataagtggacactgtgtgcacagatgtcaaaaaggagaggtggcgtaggagtgacgacctggaatggactgctgtatgctataggggggcacgatgctcccgcatccaacttgacttccagactctcagactgtgtggaaagatatgatcccaaaacagacatgtggactgcagtagcatccatgagcatcagcagagatgcagtgggggtctgtttacttggtgataagttatatgctgttggggggtatgatggacaggcataccttaatactgtggaggcttatgatccccagacaaatgagtggacccaggtatggcattcatgtttcattattacactgactctctttttattaaaacaattcttatggtaaaacagatcccctcaatcttgtccaatactgaaatatatggcataaatatgacaatcacgttttgattagcgatgagaaaaagaggcaatgtttaattttataacataattaaaatccagaattacctttgagatgtaagttaatactcagagaaattattaattatctgctaccacttgcatgatgaagtgttctagcctgattaaagctgataggactactggagggctgcaacaatgggaggggagactggaaaataaaaacaaggatagtagtcagaaaactttgaacaacttgcccatgtgtgagcagtcggatttttaaatactcaacccattgatatctgggagcagattaaagtcctgataacctaatgaagatggcaaccctaaattacactgagtaagaaacctgatctggcagtcttactaacagaaagaatttcacccttgtgtatttctgggagggtctagcacttctaaaaatgatcttttgagatctttgcttccatcatcaccaagaacagaatcaggaatttgtgcttgtgtcacccagttcagtacttggtacataaaagacaataaatgtttaactgagccaagattttcttgtatacaaggagccatgataagtatggtcaagaaaacaaagcttctaggccaggcatggtggcttatgcctataatcccagcactttgggaggctgaggcgggcagatcacgaggtcaggagttcaagaccagcctgaccaatatggtgagaccccatctctactaaaaatacaaaaaaattagccgggcatggtggcacgtgcctgtaatcccagctactcggggggctgaggcaggagaatcgcttgaacccaggaggcagaggttgcagtgagcagagatcatgccactgcacttcagcctgggtgacagagtgagactccatctt

SEQ ID NO: 3653 - protein, 757 aa, Homo sapiens
MNVIYFPLHIFVVYSRAYTSLVLVGCTNLCAVLFARCLDDHLVSLRMSGSRKEFDVKQILKIRWRWFGHQASSPNSTVDSQQGEFWNRGQTGANGGRKFLDPCSLQLPLASIGYRRSSQLDFQNSPSWPMASTSEVPAFEFTAEDCGGAHWLDRPEVDDGTSEEENESDSSSCRTSNSSQTLSSCHTMEPCTSDEFFQALNHAEQTFKKMENYLRHKQLCDVILVAGDRRIPAHRLVLSSVSDYFAAMFTNDVREARQEEIKMEGVEPNSLWSLIQYAYTGRLELKEDNIECLLSTACLLQLSQVVEACCKFLMKQLHPSNCLGIRSFADAQGCTDLHKVAHNYTMEHFMEVIRNQEFVLLPASEIAKLLASDDMNIPNEETILNALLTWVRHDLEQRRKDLSKLLAYIRLPLLAPQFLADMENNVLFRDDIECQKLIMEAMKYHLLPERRPMLQSPRTKPRKSTVGTLFAVGGMDSTKGATSIEKYDLRTNMWTPVANMNGRRLQFGVAVLDDKLYVVGGRDGLKTLNTVECYNPKTKTWSVMPPMSTHRHGLGVAVLEGPMYAVGGHDGWSYLNTVERWDPQARQWNFVATMSTPRSTVGVAVLSGKLYAVGGRDGSSCLKSVECFDPHTNKWTLCAQMSKRRGGVGVTTWNGLLYAIGGHDAPASNLTSRLSDCVERYDPKTDMWTAVASMSISRDAVGVCLLGDKLYAVGGYDGQAYLNTVEAYDPQTNEWTQVWHSCFIITLTLFLLKQFLW

SEQ ID NO: 3654 - DNA, 3510 bp, Homo sapiens
actgcaacggggatagtgttttctgtctctgtcatttgtggtttaagaaaaagggggtggtgttctgcatttgaaaggactttaatgaatgctgtcagtgtttgtgagacctaatggtcagtatgggaaaggagagccgggaaagtggtctagctgcttcaggataggtggatgagagtttgctctgattgaacggaatgttccaccgtgtttcatctttattcattatcctttgttctttaaaatctgatatattggcataaaagtaattgtagatatatatatgaatgtgatttattttcctttacatatttttgttgtgtacagcagggcatatacttctcttgtcttggttggatgcacaaatctgtgtgcagtgctttttgcccgttgcctagacgatcacttggtttctctgaggatgtctggttctcgtaaagagtttgatgtgaaacagattttgaaaatcagatggaggtggtttggtcatcaagcatcatctcctaattctacagttgacagccagcagggagaattttggaaccgaggacagactggagcaaacggtgggagaaagtttttagatccatgtagcctacaattgcctttggcttcaattggttaccgaaggtccagccaactggattttcagaattcaccttcttggccaatggcatccacctctgaagtccctgcatttgagtttacagcagaagattgtggcggtgcacattggctggatagaccagaagtggatgatggcactagtgaagaagaaaatgaatctgattccagttcatgcagattggtgctctcctctgtctcagactattttgctgccatgtttactaatgatgtcagagaggcaagacaagaagaaataaaaatggaaggtgtagaaccaaattcgttgtggtccttgatccagtatgcttatacaggccgccttgaattaaaagaagataatattgagtgcctgttatctacagcttgccttcttcagctttcacaggttgtagaagcatgctgtaagtttttaatgaaacagcttcatccatccaactgtcttggaattcgttcttttgctgatgcccaaggttgtacagatttgcataaagtggctcacaattatactatggagcatttcatggaagtaatcagaaaccaggaatttgtattattaccagccagcgaaattgcaaagctcttggctagtgatgacatgaacattcctaatgaggagacaatattgaatgcacttcttacttgggtccgtcatgatttggaacagagacggaaagatctaagtaaacttttggcttatattaggctacctcttcttgcaccacagttcctggcagacatggaaaataatgtactttttcgggatgatatagaatgtcagaaactcattatggaagcaatgaagtaccatttattaccagagagacgacccatgttacaaagtcctcggacaaaacctaggaagtcaactgttggtacattatttgcagttgggggaatggattcaacaaaaggagcaacaagcattgaaaagtatgatctccgtacaaatatgtggactccagtagcaaatatgaatgggaggaggctacagttcggtgttgcagtgctagatgacaaactgtatgtggttggaggaagagatggactgaagactttgaatactgtagagtgctacaaccccaaaacaaaaacttggagtgtgatgccacctatgtccacacatagacatggccttggtgtggctgtactggaaggtcccatgtatgccgtaggaggacatgatggctggagctatctgaacacagtggaaagatgggaccctcaggctcgccagtggaattttgttgccactatgtctacccctaggagtacagtaggtgtggcagtactaagtggaaaactttatgcagttggtggtcgtgatggaagttcttgtctcaaatcagtagaatgttttgatcctcatactaataagtggacactgtgtgcacagatgtcaaaaaggagaggtggcgtaggagtgacgacctggaatggactgctgtatgctataggggggcacgatgctcccgcatccaacttgacttccagactctcagactgtgtggaaagatatgatcccaaaacagacatgtggactgcagtagcatccatgagcatcagcagagatgcagtgggggtctgtttacttggtgataagttatatgctgttggggggtatgatggacaggcataccttaatactgtggaggcttatgatccccagacaaatgagtggacccaggttgctccactgtgcctaggaagagctggagcttgtgttgtgactgtaaaattataatttagtgccccgttttctacatgaagacaccgtcttcctttattaatttagtataattattctatcaatggatacatttttagtaaatgtgcattgtcacaatcctgggcacaaagtgcctgatgtcaaaatgaagatagtaaaacaagggaggaagcagtggatggaccaggattaattcctttcatttcttagtaaattaaaacctgcagctggtggattgtgatcacacattcccgaagtaataagtgaggacgaatgcactgctctggaacataacccagtgctaactgggggtttcatttattcagtcaagcacatcttactcacatccagatttattttcctacagtgcaaacacaccagatgaaactttaaaatgttactttttgtaagcttatcataaatgagttgcagtaatttgtttgcttgtttgtttaaccacaaccactattttaatgatatactaaagataacactatttagttttttcagaaacatctgcattatatgtgtgttggttgtggattttgtttctaaaattggcttagtccaataaataaagaaaagcattaaggacttaaagcaacaataaccaaataaaaacttgataggatctttgaagtctatttaaatattcattccattacatctagactcaccaagaactacatgttatgatgttaagttgaagttgaaacatgatgttttgcattaaatttaagatatgcaaatttatgtagagaaaataaatgttatataccctataatctttcacctaattagtatttaattatatggatttgttttatattataaaagatgttttgattttgtcttttgatattgacaaaattgtttggatatccttatgttctcaagtctgtatctgcctcccctgccttatttcttatgttttgccacagttaacccattgtgcttctttgtaatcaaacagtttgtgggagaatgggcttattgaatgtctaaaaaataagtttaaagtgtttgttaccctaagttttttacatttttaaactctaattacatatgtgaatgttattactctcagtgaattgttattgtttgcaaaaatgcactgggcagtaacattttgtgataaatcctataagatataagtc

SEQ ID NO: 3655 - protein, 694 aa, Homo sapiens; identical to SEQ ID NO: 420

SEQ ID NO: 3656 - DNA, 3779 bp, Homo sapiens
actgcaacggggatagtgttttctgtctctgtcatttgtggtttaagaaaaagggggtggtgttctgcatttgaaaggactttaatgaatgctgtcagtgtttgtgagacctaatggtcagtatgggaaaggagagccgggaaagtggtctagctgcttcaggataggtggatgagagtttgctctgattgaacggaatgttccaccgtgtttcatctttattcattatcctttgttctttaaaatctgatatattggcataaaagtaattgtagatatatatatgaatgtgatttattttcctttacatatttttgttgtgtacagcagggcatatacttctcttgtcttggttggatgcacaaatctgtgtgcagtgctttttgcccgttgcctagacgatcacttggtttctctgaggatgtctggttctcgtaaagagtttgatgtgaaacagattttgaaaatcagatggaggtggtttggtcatcaagcatcatctcctaattctacagttgacagccagcagggagaattttggaaccgaggacagactggagcaaacggtgggagaaagtttttagatccatgtagcctacaattgcctttggcttcaattggttaccgaaggtccagccaactggattttcagaattcaccttcttggccaatggcatccacctctgaagtccctgcatttgagtttacagcagaagattgtggcggtgcacattggctggatagaccagaagtggatgatggcactagtgaagaagaaaatgaatctgattccagttcatgcaggacttccaatagtagtcagacattatcatcctgtcatactatggagccatgtacatcagatgaatttttccaagcccttaatcatgccgagcaaacatttaaaaaaatggaaaactatttgagacataaacagttgtgtgatgtaattttagtcgctggtgatcgcagaattccagctcacagattggtgctctcctctgtctcagactattttgctgccatgtttactaatgatgtcagagaggcaagacaagaagaaataaaaatggaaggtgtagaaccaaattcgttgtggtccttgatccagtatgcttatacaggccgccttgaattaaaagaagataatattgagtgcctgttatctacagcttgccttcttcagctttcacaggttgtagaagcatgctgtaagtttttaatgaaacagcttcatccatccaactgtcttggaattcgttcttttgctgatgcccaaggttgtacagatttgcataaagtggctcacaattatactatggagcatttcatggaagtaatcagaaaccaggaatttgtattattaccagccagcgaaattgcaaagctcttggctagtgatgacatgaacattcctaatgaggagacaatattgaatgcacttcttacttgggtccgtcatgatttggaacagagacggaaagatctaagtaaacttttggcttatattaggctacctcttcttgcaccacagttcctggcagacatggaaaataatgtactttttcgggatgatatagaatgtcagaaactcattatggaagcaatgaagtaccatttattaccagagagacgacccatgttacaaagtcctcggacaaaacctaggaagtcaactgttggtacattatttgcagttgggggaatggattcaacaaaaggagcaacaagcattgaaaagtatgatctccgtacaaatatgtggactccagtagcaaatatgaatgggaggaggctacagttcggtgttgcagtgctagatgacaaactgtatgtggttggaggaagagatggactgaagactttgaatactgtagagtgctacaaccccaaaacaaaaacttggagtgtgatgccacctatgtccacacatagacatggccttggtgtggctgtactggaaggtcccatgtatgccgtaggaggacatgatggctggagctatctgaacacagtggaaagatgggaccctcaggctcgccagtggaattttgttgccactatgtctacccctaggagtacagtaggtgtggcagtactaagtggaaaactttatgcagttggtggtcgtgatggaagttcttgtctcaaatcagtagaatgttttgatcctcatactaataagtggacactgtgtgcacagatgtcaaaaaggagaggtggcgtaggagtgacgacctggaatggactgctgtatgctataggggggcacgatgctcccgcatccaacttgacttccagactctcagactgtgtggaaagatatgatcccaaaacagacatgtggactgcagtagcatccatgagcatcagcagagatgcagtgggggtctgtttacttggtgataagttatatgctgttggggggtatgatggacaggcataccttaatactgtggaggcttatgatccccagacaaatgagtggacccaggttgctccactgtgcctaggaagagctggagcttgtgttgtgactgtaaaattataatttagtgccccgttttctacatgaagacaccgtcttcctttattaatttagtataattattctatcaatggatacatttttagtaaatgtgcattgtcacaatcctgggcacaaagtgcctgatgtcaaaatgaagatagtaaaacaagggaggaagcagtggatggaccaggattaattcctttcatttcttagtaaattaaaacctgcagctggtggattgtgatcacacattcccgaagtaataagtgaggacgaatgcactgctctggaacataacccagtgctaactgggggtttcatttattcagtcaagcacatcttactcacatccagatttattttcctacagtgcaaacacaccagatgaaactttaaaatgttactttttgtaagcttatcataaatgagttgcagtaatttgtttgcttgtttgtttaaccacaaccactattttaatgatatactaaagataacactatttagttttttcagaaacatctgcattatatgtgtgttggttgtggattttgtttctaaaattggcttagtccaataaataaagaaaagcattaaggacttaaagcaacaataaccaaataaaaacttgataggatctttgaagtctatttaaatattcattccattacatctagactcaccaagaactacatgttatgatgttaagttgaagttgaaacatgatgttttgcattaaatttaagatatgcaaatttatgtagagaaaataaatgttatataccctataatctttcacctaattagtatttaattatatggatttgttttatattataaaagatgttttgattttgtcttttgatattgacaaaattgtttggatatccttatgttctcaagtctgtatctgcctcccctgccttatttcttatgttttgccacagttaacccattgtgcttctttgtaatcaaacagtttgtgggagaatgggcttattgaatgtctaaaaaataagtttaaagtgtttgttaccctaagttttttacatttttaaactctaattacatatgtgaatgttattactctcagtgaattgttattgtttgcaaaaatgcactgggcagtaacattttgtgataaatcctataagatataagtcattgagatgtctaagatgctttttattttaaccccagttaataaccaccttacggaaaataatatttgctaatattgtttattgtg

SEQ ID NO: 3657 - protein, 755 aa, Homo sapiens; identical to SEQ ID NO: 418

SEQ ID NO: 3658 - DNA, 3596 bp, Homo sapiens
actgcaacggggatagtgttttctgtctctgtcatttgtggtttaagaaaaagggggtggtgttctgcatttgaaaggactttaatgaatgctgtcagtgtttgtgagacctaatggtcagtatgggaaaggagagccgggaaagtggtctagctgcttcaggataggtggatgagagtttgctctgattgaacggaatgttccaccgtgtttcatctttattcattatcctttgttctttaaaatctgatatattggcataaaagtaattgtagatatatatatgaatgtgatttattttcctttacatatttttgttgtgtacagcagggcatatacttctcttgtcttggttggatgcacaaatctgtgtgcagtgctttttgcccgttgcctagacgatcacttggtttctctgaggatgtctggttctcgtaaagagtttgatgtgaaacagattttgaaaatcagatggaggtggtttggtcatcaagcatcatctcctaattctacagttgacagccagcagggagaattttggaaccgaggacagactggagcaaacggtgggagaaagtttttagatccatgtagcctacaattgcctttggcttcaattggttaccgaaggtccagccaactggattttcagaattcaccttcttggccaatggcatccacctctgaagtccctgcatttgagtttacagcagaagattgtggcggtgcacattggctggatagaccagaagtggatgatggcactagtgaagaagaaaatgaatctgattccagttcatgcagattggtgctctcctctgtctcagactattttgctgccatgtttactaatgatgtcagagaggcaagacaagaagaaataaaaatggaaggtgtagaaccaaattcgttgtggtccttgatccagtatgcttatacaggccgccttgaattaaaagaagataatattgagtgcctgttatctacagcttgccttcttcagctttcacaggttgtagaagcatgctgtaagtttttaatgaaacagcttcatccatccaactgtcttggaattcgttcttttgctgatgcccaaggttgtacagatttgcataaagtggctcacaattatactatggagcatttcatggaagtaatcagaaaccaggaatttgtattattaccagccagcgaaattgcaaagctcttggctagtgatgacatgaacattcctaatgaggagacaatattgaatgcacttcttacttgggtccgtcatgatttggaacagagacggaaagatctaagtaaacttttggcttatattaggctacctcttcttgcaccacagttcctggcagacatggaaaataatgtactttttcgggatgatatagaatgtcagaaactcattatggaagcaatgaagtaccatttattaccagagagacgacccatgttacaaagtcctcggacaaaacctaggaagtcaactgttggtacattatttgcagttgggggaatggattcaacaaaaggagcaacaagcattgaaaagtatgatctccgtacaaatatgtggactccagtagcaaatatgaatgggaggaggctacagttcggtgttgcagtgctagatgacaaactgtatgtggttggaggaagagatggactgaagactttgaatactgtagagtgctacaaccccaaaacaaaaacttggagtgtgatgccacctatgtccacacatagacatggccttggtgtggctgtactggaaggtcccatgtatgccgtaggaggacatgatggctggagctatctgaacacagtggaaagatgggaccctcaggctcgccagtggaattttgttgccactatgtctacccctaggagtacagtaggtgtggcagtactaagtggaaaactttatgcagttggtggtcgtgatggaagttcttgtctcaaatcagtagaatgttttgatcctcatactaataagtggacactgtgtgcacagatgtcaaaaaggagaggtggcgtaggagtgacgacctggaatggactgctgtatgctataggggggcacgatgctcccgcatccaacttgacttccagactctcagactgtgtggaaagatatgatcccaaaacagacatgtggactgcagtagcatccatgagcatcagcagagatgcagtgggggtctgtttacttggtgataagttatatgctgttggggggtatgatggacaggcataccttaatactgtggaggcttatgatccccagacaaatgagtggacccaggttgctccactgtgcctaggaagagctggagcttgtgttgtgactgtaaaattataatttagtgccccgttttctacatgaagacaccgtcttcctttattaatttagtataattattctatcaatggatacatttttagtaaatgtgcattgtcacaatcctgggcacaaagtgcctgatgtcaaaatgaagatagtaaaacaagggaggaagcagtggatggaccaggattaattcctttcatttcttagtaaattaaaacctgcagctggtggattgtgatcacacattcccgaagtaataagtgaggacgaatgcactgctctggaacataacccagtgctaactgggggtttcatttattcagtcaagcacatcttactcacatccagatttattttcctacagtgcaaacacaccagatgaaactttaaaatgttactttttgtaagcttatcataaatgagttgcagtaatttgtttgcttgtttgtttaaccacaaccactattttaatgatatactaaagataacactatttagttttttcagaaacatctgcattatatgtgtgttggttgtggattttgtttctaaaattggcttagtccaataaataaagaaaagcattaaggacttaaagcaacaataaccaaataaaaacttgataggatctttgaagtctatttaaatattcattccattacatctagactcaccaagaactacatgttatgatgttaagttgaagttgaaacatgatgttttgcattaaatttaagatatgcaaatttatgtagagaaaataaatgttatataccctataatctttcacctaattagtatttaattatatggatttgttttatattataaaagatgttttgattttgtcttttgatattgacaaaattgtttggatatccttatgttctcaagtctgtatctgcctcccctgccttatttcttatgttttgccacagttaacccattgtgcttctttgtaatcaaacagtttgtgggagaatgggcttattgaatgtctaaaaaataagtttaaagtgtttgttaccctaagttttttacatttttaaactctaattacatatgtgaatgttattactctcagtgaattgttattgtttgcaaaaatgcactgggcagtaacattttgtgataaatcctataagatataagtcattgagatgtctaagatgctttttattttaaccccagttaataaccaccttacggaaaataatatttgctaatattgtttattgtg

SEQ ID NO: 3659 - protein, 694 aa, Homo sapiens; identical to SEQ ID NO: 420

SEQ ID NO: 3660 - DNA, 5272 bp, Homo sapiens
actgcaacggggatagtgttttctgtctctgtcatttgtggtttaagaaaaagggggtggtgttctgcatttgaaaggactttaatgaatgctgtcagtgtttgtgagacctaatggtcagtatgggaaaggagagccgggaaagtggtctagctgcttcaggataggtggatgagagtttgctctgattgaacggaatgttccaccgtgtttcatctttattcattatcctttgttctttaaaatctgatatattggcataaaagtaattgtagatatatatatgaatgtgatttattttcctttacatatttttgttgtgtacagcagggcatatacttctcttgtcttggttggatgcacaaatctgtgtgcagtgctttttgcccgttgcctagacgatcacttggtttctctgaggatgtctggttctcgtaaagagtttgatgtgaaacagattttgaaaatcagatggaggtggtttggtcatcaagcatcatctcctaattctacagttgacagccagcagggagaattttggaaccgaggacagactggagcaaacggtgggagaaagtttttagatccatgtagcctacaattgcctttggcttcaattggttaccgaaggtccagccaactggattttcagaattcaccttcttggccaatggcatccacctctgaagtccctgcatttgagtttacagcagaagattgtggcggtgcacattggctggatagaccagaagtggatgatggcactagtgaagaagaaaatgaatctgattccagttcatgcaggacttccaatagtagtcagacattatcatcctgtcatactatggagccatgtacatcagatgaatttttccaagcccttaatcatgccgagcaaacatttaaaaaaatggaaaactatttgagacataaacagttgtgtgatgtaattttagtcgctggtgatcgcagaattccagctcacagattggtgctctcctctgtctcagactattttgctgccatgtttactaatgatgtcagagaggcaagacaagaagaaataaaaatggaaggtgtagaaccaaattcgttgtggtccttgatccagtatgcttatacaggccgccttgaattaaaagaagataatattgagtgcctgttatctacagcttgccttcttcagctttcacaggttgtagaagcatgctgtaagtttttaatgaaacagcttcatccatccaactgtcttggaattcgttcttttgctgatgcccaaggttgtacagatttgcataaagtggctcacaattatactatggagcatttcatggaagtaatcagaaaccaggaatttgtattattaccagccagcgaaattgcaaagctcttggctagtgatgacatgaacattcctaatgaggagacaatattgaatgcacttcttacttgggtccgtcatgatttggaacagagacggaaagatctaagtaaacttttggcttatattaggctacctcttcttgcaccacagttcctggcagacatggaaaataatgtactttttcgggatgatatagaatgtcagaaactcattatggaagcaatgaagtaccatttattaccagagagacgacccatgttacaaagtcctcggacaaaacctaggaagtcaactgttggtacattatttgcagttgggggaatggattcaacaaaaggagcaacaagcattgaaaagtatgatctccgtacaaatatgtggactccagtagcaaatatgaatgggaggaggctacagttcggtgttgcagtgctagatgacaaactgtatgtggttggaggaagagatggactgaagactttgaatactgtagagtgctacaaccccaaaacaaaaacttggagtgtgatgccacctatgtccacacatagacatggccttggtgtggctgtactggaaggtcccatgtatgccgtaggaggacatgatggctggagctatctgaacacagtggaaagatgggaccctcaggctcgccagtggaattttgttgccactatgtctacccctaggagtacagtaggtgtggcagtactaagtggaaaactttatgcagttggtggtcgtgatggaagttcttgtctcaaatcagtagaatgttttgatcctcatactaataagtggacactgtgtgcacagatgtcaaaaaggagaggtggcgtaggagtgacgacctggaatggactgctgtatgctataggggggcacgatgctcccgcatccaacttgacttccagactctcagactgtgtggaaagatatgatcccaaaacagacatgtggactgcagtagcatccatgagcatcagcagagatgcagtgggggtctgtttacttggtgataagttatatgctgttggggggtatgatggacaggcataccttaatactgtggaggcttatgatccccagacaaatgagtggacccaggttgctccactgtgcctaggaagagctggagcttgtgttgtgactgtaaaattataatttagtgccccgttttctacatgaagacaccgtcttcctttattaatttagtataattattctatcaatggatacatttttagtaaatgtgcattgtcacaatcctgggcacaaagtgcctgatgtcaaaatgaagatagtaaaacaagggaggaagcagtggatggaccaggattaattcctttcatttcttagtaaattaaaacctgcagctggtggattgtgatcacacattcccgaagtaataagtgaggacgaatgcactgctctggaacataacccagtgctaactgggggtttcatttattcagtcaagcacatcttactcacatccagatttattttcctacagtgcaaacacaccagatgaaactttaaaatgttactttttgtaagcttatcataaatgagttgcagtaatttgtttgcttgtttgtttaaccacaaccactattttaatgatatactaaagataacactatttagttttttcagaaacatctgcattatatgtgtgttggttgtggattttgtttctaaaattggcttagtccaataaataaagaaaagcattaaggacttaaagcaacaataaccaaataaaaacttgataggatctttgaagtctatttaaatattcattccattacatctagactcaccaagaactacatgttatgatgttaagttgaagttgaaacatgatgttttgcattaaatttaagatatgcaaatttatgtagagaaaataaatgttatataccctataatctttcacctaattagtatttaattatatggatttgttttatattataaaagatgttttgattttgtcttttgatattgacaaaattgtttggatatccttatgttctcaagtctgtatctgcctcccctgccttatttcttatgttttgccacagttaacccattgtgcttctttgtaatcaaacagtttgtgggagaatgggcttattgaatgtctaaaaaataagtttaaagtgtttgttaccctaagttttttacatttttaaactctaattacatatgtgaatgttattactctcagtgaattgttattgtttgcaaaaatgcactgggcagtaacattttgtgataaatcctataagatataagtcattgagatgtctaagatgctttttattttaaccccagttaataaccaccttacggaaaataatatttgctaatattgtttattgtgaactaggaatcaaagtttttgtatgcatcaatgcacttaatccttataacaaccttatgaggtagttctattccctttttatagctaaggaaattggggtacagagaagttagccccaaggttatatattgcaagtaagtggcagagcagggattcatacaaagaccttctcactcagcagtcttcactcttactattcctgccactaggtagaaaaagaaagatttcggccgggcacagtggctcacgcctataattcccagcactttgggaggctgaggtgggcggatcacgaggtcaggagatggagaccatcctggctaacacagtgaaaccccgtctctactaaaaataaaaaataaaaaaaaattagccaggcgtggtggcgggtgcctgtacgcccagctactcgggaggctgaggcgggagaatggcgtgaacccaggaggaggagcttgcagtgtgccaagatcgcaccactgcactccagcctgggtgacagagcgagactccatcaaaaaaaaataaataaaaaaaaaataaaagatttcattttatgtgaggaattattttaataaaaaaaagagggtttatgctctatagtaataaaatttaccagtaacacccaatcagaaaattttggttccttagtatttagggaagacttttgtttaaatctcttatggaattttacatgttttgatttagaaaagtagatgcaatataatatatttcaagttttatacatattagatgaattgcatggtattttaggcaacttaactataaacaaatttattcatagaagcattgttgccaacaatttagatgacctcgatgaaaaaacacaccaattgacaaaactggctcaaaaggaaataaaaaatccaaacagacctgtaacaagtaaagagattgaaccagtaatcaaaaatctcccaacaaagaaagtccaggactaaatgagtttactggcaaactatgccaaacatataaagaagaattaacactaatccttctcgaactctcccaaaaaatggaagagaaaggagcaccctgtgacattctataaggcggacattaccttaacaccaaagccagacaaagacctcacagggaagctacagaccaatatcccttatgaatatagatgcaaaaaaacttcaaaatactagcaggccaaatccagcagcttattaaaatgatcacacagcatgaccaagtgagatttatcaaagaaatgcagggatggttctacatacaaatgtcaatcgatgtaataatataccatattaatagaatgaaggggaaaaaacagcatgatcacctcaattgataagaaaaagcatttgacaaaaatccaacaccctttcatggtaaaaacactctgcaaactaggaagaaaagggaactttcttaacctgataaagacatccataaaaacccacagctaacaacataatagcaaaacattgaaaatttttcccctaata

SEQ ID NO: 3661 - protein, 755 aa, Homo sapiens; identical to SEQ ID NO: 418

SEQ ID NO: 3662 - DNA, 5089 bp, Homo sapiens
actgcaacggggatagtgttttctgtctctgtcatttgtggtttaagaaaaagggggtggtgttctgcatttgaaaggactttaatgaatgctgtcagtgtttgtgagacctaatggtcagtatgggaaaggagagccgggaaagtggtctagctgcttcaggataggtggatgagagtttgctctgattgaacggaatgttccaccgtgtttcatctttattcattatcctttgttctttaaaatctgatatattggcataaaagtaattgtagatatatatatgaatgtgatttattttcctttacatatttttgttgtgtacagcagggcatatacttctcttgtcttggttggatgcacaaatctgtgtgcagtgctttttgcccgttgcctagacgatcacttggtttctctgaggatgtctggttctcgtaaagagtttgatgtgaaacagattttgaaaatcagatggaggtggtttggtcatcaagcatcatctcctaattctacagttgacagccagcagggagaattttggaaccgaggacagactggagcaaacggtgggagaaagtttttagatccatgtagcctacaattgcctttggcttcaattggttaccgaaggtccagccaactggattttcagaattcaccttcttggccaatggcatccacctctgaagtccctgcatttgagtttacagcagaagattgtggcggtgcacattggctggatagaccagaagtggatgatggcactagtgaagaagaaaatgaatctgattccagttcatgcagattggtgctctcctctgtctcagactattttgctgccatgtttactaatgatgtcagagaggcaagacaagaagaaataaaaatggaaggtgtagaaccaaattcgttgtggtccttgatccagtatgcttatacaggccgccttgaattaaaagaagataatattgagtgcctgttatctacagcttgccttcttcagctttcacaggttgtagaagcatgctgtaagtttttaatgaaacagcttcatccatccaactgtcttggaattcgttcttttgctgatgcccaaggttgtacagatttgcataaagtggctcacaattatactatggagcatttcatggaagtaatcagaaaccaggaatttgtattattaccagccagcgaaattgcaaagctcttggctagtgatgacatgaacattcctaatgaggagacaatattgaatgcacttcttacttgggtccgtcatgatttggaacagagacggaaagatctaagtaaacttttggcttatattaggctacctcttcttgcaccacagttcctggcagacatggaaaataatgtactttttcgggatgatatagaatgtcagaaactcattatggaagcaatgaagtaccatttattaccagagagacgacccatgttacaaagtcctcggacaaaacctaggaagtcaactgttggtacattatttgcagttgggggaatggattcaacaaaaggagcaacaagcattgaaaagtatgatctccgtacaaatatgtggactccagtagcaaatatgaatgggaggaggctacagttcggtgttgcagtgctagatgacaaactgtatgtggttggaggaagagatggactgaagactttgaatactgtagagtgctacaaccccaaaacaaaaacttggagtgtgatgccacctatgtccacacatagacatggccttggtgtggctgtactggaaggtcccatgtatgccgtaggaggacatgatggctggagctatctgaacacagtggaaagatgggaccctcaggctcgccagtggaattttgttgccactatgtctacccctaggagtacagtaggtgtggcagtactaagtggaaaactttatgcagttggtggtcgtgatggaagttcttgtctcaaatcagtagaatgttttgatcctcatactaataagtggacactgtgtgcacagatgtcaaaaaggagaggtggcgtaggagtgacgacctggaatggactgctgtatgctataggggggcacgatgctcccgcatccaacttgacttccagactctcagactgtgtggaaagatatgatcccaaaacagacatgtggactgcagtagcatccatgagcatcagcagagatgcagtgggggtctgtttacttggtgataagttatatgctgttggggggtatgatggacaggcataccttaatactgtggaggcttatgatccccagacaaatgagtggacccaggttgctccactgtgcctaggaagagctggagcttgtgttgtgactgtaaaattataatttagtgccccgttttctacatgaagacaccgtcttcctttattaatttagtataattattctatcaatggatacatttttagtaaatgtgcattgtcacaatcctgggcacaaagtgcctgatgtcaaaatgaagatagtaaaacaagggaggaagcagtggatggaccaggattaattcctttcatttcttagtaaattaaaacctgcagctggtggattgtgatcacacattcccgaagtaataagtgaggacgaatgcactgctctggaacataacccagtgctaactgggggtttcatttattcagtcaagcacatcttactcacatccagatttattttcctacagtgcaaacacaccagatgaaactttaaaatgttactttttgtaagcttatcataaatgagttgcagtaatttgtttgcttgtttgtttaaccacaaccactattttaatgatatactaaagataacactatttagttttttcagaaacatctgcattatatgtgtgttggttgtggattttgtttctaaaattggcttagtccaataaataaagaaaagcattaaggacttaaagcaacaataaccaaataaaaacttgataggatctttgaagtctatttaaatattcattccattacatctagactcaccaagaactacatgttatgatgttaagttgaagttgaaacatgatgttttgcattaaatttaagatatgcaaatttatgtagagaaaataaatgttatataccctataatctttcacctaattagtatttaattatatggatttgttttatattataaaagatgttttgattttgtcttttgatattgacaaaattgtttggatatccttatgttctcaagtctgtatctgcctcccctgccttatttcttatgttttgccacagttaacccattgtgcttctttgtaatcaaacagtttgtgggagaatgggcttattgaatgtctaaaaaataagtttaaagtgtttgttaccctaagttttttacatttttaaactctaattacatatgtgaatgttattactctcagtgaattgttattgtttgcaaaaatgcactgggcagtaacattttgtgataaatcctataagatataagtcattgagatgtctaagatgctttttattttaaccccagttaataaccaccttacggaaaataatatttgctaatattgtttattgtgaactaggaatcaaagtttttgtatgcatcaatgcacttaatccttataacaaccttatgaggtagttctattccctttttatagctaaggaaattggggtacagagaagttagccccaaggttatatattgcaagtaagtggcagagcagggattcatacaaagaccttctcactcagcagtcttcactcttactattcctgccactaggtagaaaaagaaagatttcggccgggcacagtggctcacgcctataattcccagcactttgggaggctgaggtgggcggatcacgaggtcaggagatggagaccatcctggctaacacagtgaaaccccgtctctactaaaaataaaaaataaaaaaaaattagccaggcgtggtggcgggtgcctgtacgcccagctactcgggaggctgaggcgggagaatggcgtgaacccaggaggaggagcttgcagtgtgccaagatcgcaccactgcactccagcctgggtgacagagcgagactccatcaaaaaaaaataaataaaaaaaaaataaaagatttcattttatgtgaggaattattttaataaaaaaaagagggtttatgctctatagtaataaaatttaccagtaacacccaatcagaaaattttggttccttagtatttagggaagacttttgtttaaatctcttatggaattttacatgttttgatttagaaaagtagatgcaatataatatatttcaagttttatacatattagatgaattgcatggtattttaggcaacttaactataaacaaatttattcatagaagcattgttgccaacaatttagatgacctcgatgaaaaaacacaccaattgacaaaactggctcaaaaggaaataaaaaatccaaacagacctgtaacaagtaaagagattgaaccagtaatcaaaaatctcccaacaaagaaagtccaggactaaatgagtttactggcaaactatgccaaacatataaagaagaattaacactaatccttctcgaactctcccaaaaaatggaagagaaaggagcaccctgtgacattctataaggcggacattaccttaacaccaaagccagacaaagacctcacagggaagctacagaccaatatcccttatgaatatagatgcaaaaaaacttcaaaatactagcaggccaaatccagcagcttattaaaatgatcacacagcatgaccaagtgagatttatcaaagaaatgcagggatggttctacatacaaatgtcaatcgatgtaataatataccatattaatagaatgaaggggaaaaaacagcatgatcacctcaattgataagaaaaagcatttgacaaaaatccaacaccctttcatggtaaaaacactctgcaaactaggaagaaaagggaactttcttaacctgataaagacatccataaaaacccacagctaacaacataatagcaaaacattgaaaatttttcccctaata

SEQ ID NO: 3663 - protein, 694 aa, Homo sapiens; identical to SEQ ID NO: 420

SEQ ID NO: 3664 - DNA, 946 bp, Homo sapiens
ccggctttagataatagggcagtctaatgacttctgaattcctcagataaggagttttgcctccagatggtctgcttgatggccaccaggtgatctttgctgtcctcaaaagaactctagacactgggtaattcatagtggaaataaaagtgtggacaaaaatagttctgaagaattactctgaacacagtaagaatctatgcatttgacccaggagagttaaaatgttaacatggattcagcggtctcccctcccattgttgcagccctccagtagtcctatcagctttaatcaggctagaacacttcatcatgcaagtggtagcagataattaataatttctctgagtattaacttacatctcaaagtttttcttcccaggaaattacctttccacacagtctgagagtctggaagtcaagttggatgcgggagcatcgtgcccccctatagcatacagcagtccattccaggtcgtcactcctacgccacctctcctttttgacatctgtgcacacagtgtccacttattagtatgaggatcaaaacattctactgatttgagacaagaacttccatcacgaccaccaactgcataaagtctgcaaaaagaatatatgaaatgataaataagacatgtgccattatgcttagaacaaagaggctcttcttatgttgttatctcattgaatttaaggtgccatcagttataaaacacactgtcaatgtgtgtgtcattaaaaaagtatgctatgtttgaaatgacacatgtaagtatcatatatcactctgtatatacatgaaaaggaaaacaaactgcacatgaaggcagtgacaactgtttcatcactgccatctctttgacaagtcaccattggttgtaatatgcatggaaattcagaggtgttaaaatatgtcttagaatagacaaaatatggtgtataa

SEQ ID NO: 3665 - protein, 35 aa, Homo sapiens
MLTWIQRSPLPLLQPSSSPISFNQARTLHHASGSR

SEQ ID NO: 3666 - DNA, 901 bp, Homo sapiens
cacagggagacctcgtctctacaaatatgttttttaaaaattagccaggcgtgatggtgtgcacctctggtcccagctactcaggaggcagagacaggaggattgcctgagcctgggaggccaaggctgcagtgagctacgatcagcctgggtgacagagtgagaccttgcctcaaaaaataaaaaataaaataaaatatatggagacacagcagctggtcataaaattgccaaagatgcaatcagcaagcgggcccccatacactcagtccagctgctcctccctcccaaccttgtttaagtagccatacggactgcttccagctgaaatacattaactaagcggtctattttctcttctcccagcaatattacaacatattttcttaaaaaaaaaaaacaattacaacttttttttttttttgagacggagtcttgctctgttgcccaggctggagtgcagtggcattgcccaggctggagtgcagtggcacaatctcggctcactgcaacctccgcctcctgggttcaagtggttctcctgcctcagcctcctgaatagctgggattacaggcatgagtcactgtgcctggcttcaacttttatttcagagttagggggatacaagtgtaggtttgttacataggtatattgtgtgatgctgaggtttggggtacggatgatcctgtcacttcggtggtgaacacagcacccaacagatagtttttcagcccacagcccctacctcccttccctctgtaggagtctccagtgtctattgttccatctttatgtcctttataacagattttcaaatgttattgtattttactcaatatttgggttgtggagaaattttataatttatttgcattacataaatccttcacaatgagaaac

SEQ ID NO: 3667 - protein, 34 aa, Homo sapiens
METQQLVIKLPKMQSASGPPYTQSSCSSLPTLFK

SEQ ID NO: 3668 - DNA, 457 bp, Homo sapiens
aaaacatttccaacctgtgcatgggggatcattcttccgtcacctagaatatgaggcctccgagaggatgagaatgagggaaaaaactacaaagaaaatggtagcaaatactagcaaagaaaatggaacaagacagaggatcccaggtggaaatccacggagcttgggaaatccactgcttttatagtaagtggtaggctatcctgctctttgtcctggagatttctcgctgcaaacacaaccctgagaaatggcccagctaatcagtagtgggcggggacgctcagaacccgcagcagagtgcctctccccttccttctgcaatgtctccagcaccctctaccgacaaaattagcactgtgcagactggcgaaggagaaaaaggctcatgtccacgttgactgagcaggtaatgaagactggatttgtagatgagaagcactaattaaaaactggt

SEQ ID NO: 3669 - protein, 39 aa, Homo sapiens
MRMREKTTKKMVANTSKENGTRQRIPGGNPRSLGNPLLL

SEQ ID NO: 3670 - DNA, 4522 bp, Homo sapiens
ggcccggcccctcgaggcaccgcctttcaattagcactcgctgattggtcgctgctcgcgcggtctcctgggtgacgggaacgcggtagcctgcttggtggagaccgggtgcgcctgcgtacttcatagttcgcgtagcggctcgagcgtggagatgaagcgtattttctcactgctagaaaagacttggcttggcgcaccaatacagtttgcctggcaaaaaacatcaggaaactaccttgcagtaacaggagctgattatattgtgaaaatctttgatcgccatggtcaaaaaagaagtgaaattaacttacctggtaactgtgttgccatggattgggataaagatggagatgtcctagcagtgattgctgagaaatctagctgcatttatctttgggatgccaacacaaataagaccagccagttagacaatggcatgagggatcaaatgtctttccttctttggtcaaaagttggaagtttcctggctgttggaactgttaaaggaaatttgcttatttataatcatcagacatctcgaaagattcctgtccttggaaaacatactaagagaatcacttgtggatgttggaatgcagaaaatctgcttgctttaggtggtgaagataaaatgattacagttagtaatcaggaaggtgacacgataagacagacacaagtgagatcagagcctagcaacatgcagtttttcttgatgaagatggatgaccgaacctctgctgctgaaagcatgataagtgtggtgcttggcaagaaaactttgttttttttaaatctgaatgaaccagataacccagctgatcttgaatttcagcaggactttggcaacattgtctgctataattggtatggtgatggccgcatcatgattggtttttcatgtggacattttgtggtcatttctactcatactggagagcttggtcaagagatatttcaggctcgtaaccataaagataatctaaccagcattgcagtatcacagactcttaacaaagttgctacatgtggagataactgcattaaaatccaagacttggttgacttaaaagacatgtatgttatactcaacctggatgaggaaaataaaggattgggtaccttgtcctggactgatgatggccagttgctagcactctctacccaaaggggctcacttcatgttttcctgaccaagcttcccatacttggggatgcctgcagcacaaggattgcctatctcacctccctccttgaagtcaccgtagccaaccctgttgaaggagagctaccaatcacagtttctgttgatgtggaacccaactttgtggcagtaggtctttatcatctggctgtaggaatgaataatcgagcttggttttatgtccttggagaaaatgctgtgaaaaaattgaaagatatggagtatctgggaacagtagccagtatttgccttcattctgactatgctgctgcactttttgaaggcaaagtccagttacatttgatagaaagcgaaatcttggatgctcaagaagaacgtgagactcggcttttcccagcagtggatgataagtgccgtatcttatgccatgccttaactagtgatttcctcatctatggtacagatactggtgtcgttcagtatttctacattgaagactggcaattcgttaatgattatcgacatcctgtcagtgtgaaaaagatttttcccgacccaaatgggaccagattagttttcattgatgaaaaaagtgatggatttgtttactgtccagtcaatgacgctacctatgagattccagatttttcaccaaccattaaaggtgttctttgggaaaactggccaatggataaaggtgtatttattgcttatgatgatgataaggtgtacacttatgtctttcacaaggacactatacaaggagccaaggttattttggctggtagcaccaaagttccttttgctcataaacctttgctgctatataatggagagctgacctgccaaacacagagtggaaaagtaaacaacatctaccttagcacccatggctttctcagcaacttaaaagatacggggcctgacgaactgagaccaatgctggcacagaatttaatgctaaagaggttttctgatgcttgggaaatgtgcaggattctgaatgatgaggctgcctggaatgagttggccagagcttgtctacatcacatggaagtggagtttgcaatccgtgtttatcggagaattggaaatgttggcatagtgatgtccttggaacaaataaagggaatagaggactacaatcttttggcaggacaccttgccatgtttaccaacgattataacctggctcaggacttgtaccttgcatccagctgtcctattgctgccctggagatgagaagggatttacagcattgggacagtgctctacaactggcaaagcatttggccccagaccagataccttttatatcaaaagaatatgctattcagcttgaattcgcgggtgattatgtaaatgctttggctcattatgagaaaggaataacaggtgataataaggaacatgatgaagcttgtctggctggagtggcccagatgtccataagaatgggagacatacgtcgaggggttaaccaagccctcaagcatcccagcagggtccttaaaagagactgtggagccatattggagaatatgaagcaattttcagaagcggcccaactgtatgaaaaaggtctctactacgataaagcagcatctgtttacatccgctctaagaattgggcaaaagttggtgatcttctgccccacgtttcttctcctaagatccatttgcagtatgccaaagccaaggaagcagatggaagatacaaagaagctgttgtagcttatgaaaatgcaaaacagtggcaaagtgtaatccgcatctatctggatcacctcaataatcctgaaaaagctgtcaatattgttagagagacccagtctctggatggagccaaaatggtagccaggttttttctacagcttggtgactatgggtctgccatccagtttcttgtcatgtccaaatgcaacaatgaagctttcacactggctcagcaacacaacaaaatggaaatctatgcagatattattggttctgaagacactactaatgaagactatcaaagcattgccttatactttgaaggagaaaagagatatcttcaggctggaaaattcttcttgctgtgtggccaatattcacgagcacttaaacacttcctgaaatgcccaagctcggaagataatgtggcaatagaaatggcaattgaaactgttggtcaggccaaagatgaactgctgaccaatcagctgatagaccatctcctgggggagaacgatggcatgcctaaggatgccaagtacctgttccgcttgtacatggctctgaagcaataccgagaagctgcccagactgccatcatcattgccagagaagagcagtctgcaggcaactaccggaatgcacacgatgttctcttcagtatgtatgcagaactgaaatcccagaagatcaaaattccctccgagatggccaccaacctcatgattctgcacagctatatactagtaaagattcatgttaaaaatggagatcacatgaaaggggctcgcatgctcattcgggtggccaacaacatcagcaaatttccatcacacattgtacccatcctgacgtcaactgtgattgagtgtcacagggcaggcctgaagaactctgctttcagcttcgcagctatgttgatgaggcctgaataccgcagcaaaatagatgccaaatacaaaaagaagatcgagggaatggtcaggagacccgatatatctgagatagaagaggccacgactccatgtccattctgcaaatttcttctcccagagtgtgaactcctctgtcctggatgtaaaaacagtatcccatattgcattgcaacaggtcgacacatgttgaaagatgactggacggtgtgtccacattgtgacttccctgctctatactcagaattgaagatcatgctaaacactgaaagcacatgtcctatgtgttcagaaagattaaacgctgctcagctgaaaaagatttcagactgtacccagtacctgcgaacggaggaggaactgtgattggcacgtgcagatacaatgctcctgagaagacagcattttccacaggaggctgtttcctcccctggtggatttaagagacggtcctttctggatacagagaaatgaaacaacggtgacctctccaggtcggcactttccacttctgtacggtggcaaaacgatgacatgtaaccttgctgtttattgtactttgtatattatttcctcttcaaagtctttcttacacactctatcctctgcactgttaatagtaacctatgacataattgtaaatattcagctttttgctaacttttgtattttgaaaaactttaaaataaaattgttgactagata

SEQ ID NO: 3671 - protein, 1342 aa, Homo sapiens; identical to SEQ ID NO: 422

SEQ ID NO: 3672 - DNA, 604 bp, Homo sapiens
gaacgcggtagcctgcttggtggagaccgggtgcgcctgcgtacttcatagttcgcgtagcggctcgagcgtggagatgaagcgtattttctcactgctagaaaagacttggcttggcgcaccaatacagtttgcctggcaaaaaacatcaggaaactaccttgcagtaacaggagctgattatattgtgaaaatctttgatcgccatggtcaaaaaagaagtgaaattaacttacctggtaactgtgttgccatggattgggataaagatggagatgtcctagcagtgattgctgagaaatctagctgcatttatctttgggatgccaacacaaataagaccagccagttagacaatggcatgagggatcaaatgtctttccttctttggtcaaaagttggaagtttcctggctgttggaactgttaaaggaaatttgcttatttataatcatcagacatctcgaaagattcctgtccttggtaggtgatagctggaaacactgctaaatatttgagatgctctacctcaatgtaaattctgccgcctcaggtttccctgatcttgcaatggaaattttgcagtacaaaccccctccccatgt

SEQ ID NO: 3673 - protein, 137 aa, Homo sapiens
MKRIFSLLEKTWLGAPIQFAWQKTSGNYLAVTGADYIVKIFDRHGQKRSEINLPGNCVAMDWDKDGDVLAVIAEKSSCIYLWDANTNKTSQLDNGMRDQMSFLLWSKVGSFLAVGTVKGNLLIYNHQTSRKIPVLGR

SEQ ID NO: 3674 - DNA, 593 bp, Homo sapiens
gaacgcggtagcctgcttggtggagaccgggtgcgcctgcgtacttcatagttcgcgtagcggctcgagcgtggagatgaagcgtattttctcactgctagaaaagacttggcttggcgcaccaatacagtttgcctggcaaaaaacatcaggaaactaccttgcagtaacaggagctgattatattgtgaaaatctttgatcgccatggtcaaaaaagaagtgaaattaacttacctggtaactgtgttgccatggattgggataaagatggagatgtcctagcagtgattgctgagaaatctagctgcatttatctttgggatgccaacacaaataagaccagccagttagacaatggcatgagacacaagtgagatcagagcctagcaacatgcagtttttcttgatgaagatggatgaccgaacctctgctgctgaaagcatgataagtgtggtgcttggcaagaaaactttgttttttttaaatctgaatgaaccagataacccagctgatcttgaatttcagcaggactttggcaacattgtctgctataattggtatggtgatggccgcatcatgattggtttttc

SEQ ID NO: 3675 - protein, 99 aa, Homo sapiens
MKRIFSLLEKTWLGAPIQFAWQKTSGNYLAVTGADYIVKIFDRHGQKRSEINLPGNCVAMDWDKDGDVLAVIAEKSSCIYLWDANTNKTSQLDNGMRHK

SEQ ID NO: 3676 - DNA, 2053 bp, Homo sapiens
gaacgcggtagcctgcttggtggagaccgggtgcgcctgcgtacttcatagttcgcgtagcggctcgagcgtggagatgaagcgtattttctcactgctagaaaagacttggcttggcgcaccaatacagtttgcctggcaaaaaacatcaggaaactaccttgcagtaacaggagctgattatattgtgaaaatctttgatcgccatggtcaaaaaagaagtgaaattaacttacctggtaactgtgttgccatggattgggataaagatggagatgtcctagcagtgattgctgagaaatctagctgcatttatctttgggatgccaacacaaataagaccagccagttagacaatggcatgagggatcaaatgtctttccttctttggtcaaaagttggaagtttcctggctgttggaactgttaaaggaaatttgcttatttataatcatcagacatctcgaaagattcctgtccttggaaaacatactaagagaatcacttgtggatgttggaatgcagaaaatctgcttgctttaggtggtgaagataaaatgattacagttagtaatcaggaaggtgacacgataagacagacacaagtgagatcagagcctagcaacatgcagtttttcttgatgaagatggatgaccgaacctctgctgctgaaagcatgataagtgtggtgcttggcaagaaaactttgttttttttaaatctgaatgaaccagataacccagctgatcttgaatttcagcaggactttggcaacattgtctgctataattggtatggtgatggccgcatcatgattggtttttcatgtggacattttgtggtcatttctactcatactggagagcttggtcaagagatatttcaggctcgtaaccataaagataatctaaccagcattgcagtatcacagactcttaacaaagttgctacatgtggagataactgcattaaaatccaagacttggttgacttaaaagacatgtatgttatactcaacctggatgaggaaaataaaggattgggtaccttgtcctggactgatgatggccagttgctagcactctctacccaaaggggctcacttcatgttttcctgaccaagcttcccatacttggggatgcctgcagcacaaggattgcctatctcacctccctccttgaagtcaccgtagccaaccctgttgaaggagagctaccaatcacagtttctgttgatgtggaacccaactttgtggcagtaggtctttatcatctggctgtaggaatgaataatcgagcttggttttatgtccttggagaaaatgctgtgaaaaaattgaaagatatggagtatctgggaacagtagccagtatttgccttcattctgactatgctgctgcactttttgaaggcaaagtccagttacatttgatagaaagcgaaatcttggatgctcaagaagaacgtgagactcggcttttcccagcagtggatgataagtgccgtatcttatgccatgccttaactagtgatttcctcatctatggtacagatactggtgtcgttcagtatttctacactctatactcagaattgaagatcatgctaaacactgaaagcacatgtcctatgtgttcagaaagattaaacgctgctcagctgaaaaagatttcagactgtacccagtacctgcgaacggaggaggaactgtgattggcacgtgcagatacaatgctcctgagaagacagcattttccacaggaggctgtttcctcccctggtggatttaagagacggtcctttctggatacagagaaatgaaacaacggtgacctctccaggtcggcactttccacttctgtacggtggcaaaacgatgacatgtaaccttgctgtttattgtactttgtatattatttcctcttcaaagtctttcttacacactctatcctctgcactgttaatagtaacctatgacataattgtaaatattcagctttttgctaacttttgtattttgaaaaactttaaaataaaattgttgactagata

SEQ ID NO: 3677 - protein, 545 aa, Homo sapiens [sequence omitted]

SEQ ID NO: 3678 - DNA, 562 bp, Homo sapiens
acttcatagttcgcgtagcggctcgagcgtggagatgaagagctgacctgccaaacacagagtggaaaagtaaacaacatctaccttagcacccatggctttctcagcaacttaaaagatacggggcctgacgaactgagaccaatgctggcacagaatttaatgctaaagaggttttctgatgcttgggaaatgtgcaggattctgaatgatgaggctgcctggaatgagttggccagagcttgtctacatcacatggaagtggagtttgcaatccgtgtttatcggagaattggaaatgttggcatagtgatgtccttggaacaaataaagggaatagaggactacaatcttttggcaggacaccttgccatgtttaccaacgattataacctggctcaggacttgtaccttgcatccagctgtcctattgctgccctggagatgagaagggatttacagcattgggacagtgctctacaactggcaaagcatttggccccagaccagatgtccataagaatgggagacatacgtcgaggggttaaccaagccctcaagc

SEQ ID NO: 3679 - protein, 138 aa, Homo sapiens
MLAQNLMLKRFSDAWEMCRILNDEAAWNELARACLHHMEVEFAIRVYRRIGNVGIVMSLEQIKGIEDYNLLAGHLAMFTNDYNLAQDLYLASSCPIAALEMRRDLQHWDSALQLAKHLAPDQMSIRMGDIRRGVNQAL

SEQ ID NO: 3680 - DNA, 1275 bp, Homo sapiens
cacaaatgttaaccacatacacttttaacatgtcacaaaaatatttttcttttgatgttttttcaaccatttaaaaatgtaaaaatcatccttagctcatggaccatacaaaaagtcagagggctagatttggtccatgggtcataattggccaacccacattctctaagtgtatttttgttgttgttacatcaaagtctaccatgcgggcaaggtatgggataggacaggcactctcatgactgctggtggggatggaaattggtatggcctttgcagaaagcagtttggcaatttgtggtaagagtattttttaaaaggtcctgtttttgagccggtaattctgggtgtctgtcctgaagaaagaatttgatgcctgcagagagattagtgtataaagtcattaatccccctaatgcttttatcagcagtcctgtcagatgcaaaaaatatctaagaggcatgaaaggaaactcatggaagtgttgcctcaaggggtgcaggtcctagtgttacaaggcagaacatggtgtcatcaaaggaaaagcacttgatgggcagttagcctgaccccacagctacgtactttcctcattaaacagatcatatctggttctttgcagaaaaagcaaagttcagagaccatgaccctgttttcctacagaaccagggtggaatcccgcctgtatcactgaggacagcagacactgtgctgttgctgctctccccttttctcttgcagacattggtcgacacatgttgaaagatgactggacggtgtgtccacattgtgacttccctgctctatactcagaattgaagatcatgctaaacactgaaagcacatgtcctatgtgttcagaaagattaaacgctgctcagctgaaaaagatttcagactgtacccagtacctgcgaacggaggaggaactgtgattggcacgtgcagatacaatgctcctgagaagacagcattttccacaggaggctgtttcctcccctggtggatttaagagacggtcctttctggatacagagaaatgaaacaacggtgacctctccaggtcggcactttccacttctgtacggtggcaaaacgatgacatgtaaccttgctgtttattgtactttgtatattatttcctcttcaaagtctttcttacacactctatcctctgcactgttaatagtaacctatgacataattgtaaatattcagctttttgctaacttttgtattttgaaaaactttaaaataaaattgttgactagata

SEQ ID NO: 3681 - protein, 59 aa, Homo sapiens
MLKDDWTVCPHCDFPALYSELKIMLNTESTCPMCSERLNAAQLKKISDCTQYLRTEEEL

SEQ ID NO: 3682 - DNA, 1048 bp, Homo sapiens
gacagttctattggacggtgctggtataacttgtaccacttctgttacacaaaagggagagacagagggaaaataccaagctcaccactccagtagcacaggaagagagaagaccgcaagacctacccatgctttctgccgttgaatgtgctatgaactccagttcccaaaggtggcccatgtaacaccctagaacctaaccaatcctaggtactcttcctcctccctggagtggatcaagggctggtgtgagcttgtaagtatctctctaagcccagagtctgactatgaagtaggtgtgtcatatgtccctggttttccaaatatgctttctctttgccatccccggtacatgaataaaacggcatttttaaatgacatgattcttcctcacaggagacccgatatatctgagatagaagaggccacgactccatgtccattctgcaaatttcttctcccagagtgtgaactcctctgtcctggatgtaaaaacagtatcccatattgcattgcaacaggtcgacacatgttgaaagatgactggacggtgtgtccacattgtgacttccctgctctatactcagaattgaagatcatgctaaacactgaaagcacatgtcctatgtgttcagaaagattaaacgctgctcagctgaaaaagatttcagactgtacccagtacctgcgaacggaggaggaactgtgattggcacgtgcagatacaatgctcctgagaagacagcattttccacaggaggctgtttcctcccctggtggatttaagagacggtcctttctggatacagagaaatgaaacaacggtgacctctccaggtcggcactttccacttctgtacggtggcaaaacgatgacatgtaaccttgctgtttattgtactttgtatattatttcctcttcaaagtctttcttacacactctatcctctgcactgttaatagtaacctatgacataattgtaaatattcagctttttgctaacttttgtattttgaaaaactttaaaataaaattgttgactagata

SEQ ID NO: 3683 - protein, 127 aa, Homo sapiens
MLSLCHPRYMNKTAFLNDMILPHRRPDISEIEEATTPCPFCKFLLPECELLCPGCKNSIPYCIATGRHMLKDDWTVCPHCDFPALYSELKIMLNTESTCPMCSERLNAAQLKKISDCTQYLRTEEEL

SEQ ID NO: 3684 - DNA, 717 bp, Homo sapiens
tcttttcttccgaagcattcttctatttgtgttcctaaggatctctaaagactcaaattgtcttctgggaagaacctcctgtgacctttgagaatattatctttaaagaggatcttgcatgagactgaatagttctgattctcaaattgcatggtggacatgtgttaagaggtgtagacagaaagttgttgtctttctcattagagtaacccaaagctaaaggaatgttatatatttaatttactctgcctttccctcccctaaacagcatgctaaacactgaaagcacatgtcctatgtgttcagaaagattaaacgctgctcagctgaaaaagatttcagactgtacccagtacctgcgaacggaggaggaactgtgattggcacgtgcagatacaatgctcctgagaagacagcattttccacaggaggctgtttcctcccctggtggatttaagagacggtcctttctggatacagagaaatgaaacaacggtgacctctccaggtcggcactttccacttctgtacggtggcaaaacgatgacatgtaaccttgctgtttattgtactttgtatattatttcctcttcaaagtctttcttacacactctatcctctgcactgttaatagtaacctatgacataattgtaaatattcagctttttgctaacttttgtattttgaaaaactttaaaataaaattgttgactaga

SEQ ID NO: 3685 - protein, 55 aa, Homo sapiens
MSYVFRKIKRCSAEKDFRLYPVPANGGGTVIGTCRYNAPEKTAFSTGGCFLPWWI

SEQ ID NO: 3686 - DNA, 2239 bp, Homo sapiens
aagtagaaaatttcctttgggcacattgatgtgtacccattaccctcatgctgtggtgctgggctttctaaactacaccagctggctgtcaaataaacttactccagcaaaaggactgtaaacatggattatctgtcgcttctaagggatgcacttgtacagcccttgacctcacaaggagtagacggagtacaggatgttgttgcacttatggacacatattatttgatgaaagaagactttgagaatatcatggaaatcagcagctggggtggcaaacctagtcccttttcaaagctggatcccaaggtgaaagcagccttcacaagagcttacaataaggaagcccaccttactccatactcacttcaagctataaaggcatctagacacagcacaagcccatccctggattcggaatacaatgaagaattaaatgaagatgactctcaatctgatgagaaagaccaagatgctatagaaactgatgccatgatcaagaaaaagacaaaatcttcaaagccttcaaaaccagaaaaagataaggagcccagaaaaggaaaaggaaaaagttcgaagaaatgaaaccatttttcactagcgacagccactttttactctccctcctgaccagtccagctggtctagagaaagccttgttttttcccagagcaaccatgttttagcataatgggatgacctggtgtcccattataaataaagggtggtatggctagaagggtatgagcagtaggcttatgtacacctcttatagaggttgataggactgcttgggtcctccactgtcctctgtcaatctagttagacgtgcttctgaatgactgtagaattggaactagaaactacacctgggctttggagtcagattttagttaacaataatgagcctgggagcagtagtactaaggcgtcttttgtaggcttaagaatttatcctaatggcctttataggaccaatgctgattttttttaaaggcagttcctattatgtggtgaaattttgtaaataaatgattatacaaaacagtcaccacctagaactgggtattctttgtacattgtcagatatctttcaaagtataaattaggaataaaaatgttccacatgatatgtgtacaaattctttttaagattgtcatcttgtacagcaaaatattatgttggtatattacttccttattaatttgcaaatgattggattaaaaaagctcactgtattccttactaacctgttgtgtgaaacataacattggcagtcgaggagtcagaactcggattcccagcctcactccctctgtgtgtgttgaccacgtctctgctgtgaataggatttcatgcagtggtctgttatggggctttgcagcgtggggggctgcagaagattctcagacattcttatccttctggagtctcaacccatcaggttcagaccagtaggaaccaggctgggtcaggctcttaatttcactatggtgggggacaaaatgaacactggcttttgttcactttgcccctgagagatctagtcctgtcctgtgatggcttccacaaaccctgttggaagtttgggttattcctataactgtatgtgttgagtggccgtgaggctatggacctagcctggaatttagatgtctagctattttttaatcttgttggtaaatgctcagaggtctgtgctacctctgtgaggtatatactaaaatgaatgtaaaataaggatcgtattccctgctttaaggaactggtagtcttgtttgggtgatgagacaaagttcttgagacatttaaactgtatttaccagtgtgaaaaatgtcatttatggagattaattcattatggaaataaaacattgcctaagcccttgcctgctgagtcacgaccctgtctttgttaaagtccatcttgaaattcttatgcttcaggaaaggttttctcaccagtagggtgaggctggctttcctattcatgttcttccatttctatgccttttggatatgcaagtcacgtctccctaggtcttctgcagcccccaggagagagacttgaatctccatgcagccaggatgcggcatagtgtccttcacttgttcattatgattttgtttgtaattttaaatgttttaaacccaagattgggataatatgtgtgtaaaattaatagcatttcttttagaattagaaattgtaaatatgccctttatgaggatggcata

SEQ ID NO: 3687 - protein, 153 aa, Homo sapiens [sequence omitted]

SEQ ID NO: 3688 - DNA, 2313 bp, Homo sapiens
gaaagggtctgactgccctgtaggccatttatgccagtgttcttcctggagagttgatgagggggtacatgacccagtttcccaccttcccaagctggctggggaagcactcgtctacaggcaaacatgatcgtattgttcaggacctggccttgcatatgagtctcagaacttactccagcaaaaggactgtaaacatggattatctgtcgcttctaagggatgcacttgtacagcccttgacctcacaaggagtagacggagtacaggatgttgttgcacttatggacacatattatttgatgaaagaagactttgagaatatcatggaaatcagcagctggggtggcaaacctagtcccttttcaaagctggatcccaaggtgaaagcagccttcacaagagcttacaataaggaagcccaccttactccatactcacttcaagctataaaggcatctagacacagcacaagcccatccctggattcggaatacaatgaagaattaaatgaagatgactctcaatctgatgagaaagaccaagatgctatagaaactgatgccatgatcaagaaaaagacaaaatcttcaaagccttcaaaaccagaaaaagataaggagcccagaaaaggaaaaggaaaaagttcgaagaaatgaaaccatttttcactagcgacagccactttttactctccctcctgaccagtccagctggtctagagaaagccttgttttttcccagagcaaccatgttttagcataatgggatgacctggtgtcccattataaataaagggtggtatggctagaagggtatgagcagtaggcttatgtacacctcttatagaggttgataggactgcttgggtcctccactgtcctctgtcaatctagttagacgtgcttctgaatgactgtagaattggaactagaaactacacctgggctttggagtcagattttagttaacaataatgagcctgggagcagtagtactaaggcgtcttttgtaggcttaagaatttatcctaatggcctttataggaccaatgctgattttttttaaaggcagttcctattatgtggtgaaattttgtaaataaatgattatacaaaacagtcaccacctagaactgggtattctttgtacattgtcagatatctttcaaagtataaattaggaataaaaatgttccacatgatatgtgtacaaattctttttaagattgtcatcttgtacagcaaaatattatgttggtatattacttccttattaatttgcaaatgattggattaaaaaagctcactgtattccttactaacctgttgtgtgaaacataacattggcagtcgaggagtcagaactcggattcccagcctcactccctctgtgtgtgttgaccacgtctctgctgtgaataggatttcatgcagtggtctgttatggggctttgcagcgtggggggctgcagaagattctcagacattcttatccttctggagtctcaacccatcaggttcagaccagtaggaaccaggctgggtcaggctcttaatttcactatggtgggggacaaaatgaacactggcttttgttcactttgcccctgagagatctagtcctgtcctgtgatggcttccacaaaccctgttggaagtttgggttattcctataactgtatgtgttgagtggccgtgaggctatggacctagcctggaatttagatgtctagctattttttaatcttgttggtaaatgctcagaggtctgtgctacctctgtgaggtatatactaaaatgaatgtaaaataaggatcgtattccctgctttaaggaactggtagtcttgtttgggtgatgagacaaagttcttgagacatttaaactgtatttaccagtgtgaaaaatgtcatttatggagattaattcattatggaaataaaacattgcctaagcccttgcctgctgagtcacgaccctgtctttgttaaagtccatcttgaaattcttatgcttcaggaaaggttttctcaccagtagggtgaggctggctttcctattcatgttcttccatttctatgccttttggatatgcaagtcacgtctccctaggtcttctgcagcccccaggagagagacttgaatctccatgcagccaggatgcggcatagtgtccttcacttgttcattatgattttgtttgtaattttaaatgttttaaacccaagattgggataatatgtgtgtaaaattaatagcatttcttttagaattagaaattgtaaatatgccctttatgaggatggcata

SEQ ID NO: 3689 - protein, 200 aa, Homo sapiens
MRGYMTQFPTFPSWLGKHSSTGKHDRIVQDLALHMSLRTYSSKRTVNMDYLSLLRDALVQPLTSQGVDGVQDVVALMDTYYLMKEDFENIMEISSWGGKPSPFSKLDPKVKAAFTRAYNKEAHLTPYSLQAIKASRHSTSPSLDSEYNEELNEDDSQSDEKDQDAIETDAMIKKKTKSSKPSKPEKDKEPRKGKGKSSKK

SEQ ID NO: 3690 - DNA, 5257 bp, Homo sapiens
aaagctcgcgcctcctgacgtcatcaccgcgcgccactgtcttcgccttcttgcacttcgcgggagaagttgttggcgcgaatggatcctgagcctcgataacagattcctcaaccggcccacccgccagccagccagcgccttcatcctggggctgcgatggacattcggaaattctttggagtaataccaagtggaaagaaacttgtaagtgaaacagtaaagaagaatgagaaaacaaagtctgatgaagaaactttaaaagcaaagaaaggaataaaggaaatcaaggtaaatagctcccgtaaagaggatgacttcaaacaaaagcaaccaagcaagaaaaagaggatcatctatgattcagattcagagtcagaggagacgttgcaggtaaaaaatgccaaaaagccaccagaaaaactgccagtatcttctaaacctggtaaaatttcacggcaggatcctgttacatacatttcagaaacagatgaagaagatgactttatgtgtaagaaggcggcctctaaatcaaaagagaatggaagatctacaaatagtcatcttggaacatcaaacatgaaaaagaatgaagaaaacactaagaccaagaataagcctttatcaccaataaaacttacacccacatcagtacttgattattttggaactggaagtgtccaaagatctaataagaagatggtggcaagcaaaagaaaagagctttcacaaaatacagatgagtctggattaaatgatgaagccatcgccaagcaattacagcttgatgaagatgcggagctggagaggcagttgcatgaagatgaagagtttgccagaacattagccatgttggatgaagaacccaagaccaaaaaggctcgaaaggacacagaagcgggagaaacgttttcatctgtccaagccaatttaagtaaagcagaaaaacataaatatcctcataaagtaaaaacagcacaagtttcagatgaaagaaagagctacagtcctaggaagcaaagtaaatatgaaagttcaaaagaatctcagcaacattccaagtcatcagctgacaaaataggagaagtctcttctcccaaggccagttctaagctggcaattatgaaaagaaaagaagagagctcttataaagaaatagagcctgtggcctcaaaaagaaaagaaaatgccattaaattgaaaggagagacaaaaactcctaagaaaaccaaaagttctccagctaaaaaagagtctgtaagtcctgaagattctgaaaagaaacgcactaattatcaagcttatcgaagctacttaaatcgagaaggtcccaaggctctgggctccaaagaaataccaaagggagctgaaaattgcttggaaggccttatatttgtaatcacaggcgtgctggagtctattgaacgagatgaggccaagtctctaattgaacgttatgggggaaaagtaacaggaaatgtcagcaagaaaacaaattatcttgtcatgggtcgtgatagtggacagtccaagagtgataaggccgcagccttggggacaaaaattattgatgaagatggcctgttgaatctgattcggactatgccaggcaagaaatccaagtatgaaatagcagttgaaactgagatgaagaaagagtccaaactggagagaacaccccaaaaaaatgtccaaggaaaaagaaaaattagtccatctaaaaaggaatcagaatctaaaaagagcaggccgacttccaaaagggacagtttggcaaagacaataaaaaaggaaacagatgtgttttggaaaagcctggatttcaaggagcaggtggctgaggagacaagtggtgacagcaaggctaggaatttggctgatgacagcagtgaaaacaaagtggaaaatttgctctgggtggataaatataagccaacctcgctcaagaccataattggacagcaaggtgaccagagctgtgccaacaaactcctacgctggctccgaaactggcaaaagagttcttccgaagataaaaaacacgcaaagtttggtaaattttccggcaaagatgatggctctagttttaaagcagcgttgctgtcaggccctcctggtgttggcaaaaccaccacagcttccctggtgtgtcaggagttgggatacagctacgtggaactgaatgcaagtgacacccggagtaagagcagtttgaaggcgattgttgctgagtcactgaacaataccagcatcaaaggcttttattcaaatggagcagcctcttcagtaagcacgaaacatgctctcatcatggatgaagtagatggcatggcaggcaatgaggataggggaggaattcaggaattaattggcctgataaaacatactaaaattcccattatttgtatgtgcaatgatagaaatcatcccaagattcgctctctggttcattattgttttgatcttcgttttcaaagacctcgggttgaacagattaagggtgctatgatgtctattgcatttaaagaaggtttaaagattccccctccagctatgaatgaaataattttgggagccaatcaagatatcagacaggttttacataatctgagtatgtggtgtgcacgaagtaaagcattaacctatgaccaggccaaagctgattctcacagagccaaaaaggatatcaaaatgggcccatttgatgttgcccggaaagtgtttgcagctggagaggagactgctcacatgtcacttgtggacaagtcagatctcttttttcatgattattcaatagcacccctcttcgtccaggaaaattacatacacgtgaagcctgtagcagcagggggtgacatgaaaaagcacctgatgcttttaagcagagcagcagacagcatatgcgatggtgacctagtggacagccagatccggagtaagcaaaactggagtcttctgcctgcgcaggccatttatgccagtgttcttcctggagagttgatgagggggtacatgacccagtttcccaccttcccaagctggctggggaagcactcgtctacaggcaaacatgatcgtattgttcaggacctggccttgcatatgagtctcagaacttactccagcaaaaggactgtaaacatggattatctgtcgcttctaagggatgcacttgtacagcccttgacctcacaaggagtagacggagtacaggatgttgttgcacttatggacacatattatttgatgaaagaagactttgagaatatcatggaaatcagcagctggggtggcaaacctagtcccttttcaaagctggatcccaaggtgaaagcagccttcacaagagcttacaataaggaagcccaccttactccatactcacttcaagctataaaggcatctagacacagcacaagcccatccctggattcggaatacaatgaagaattaaatgaagatgactctcaatctgatgagaaagaccaagatgctatagaaactgatgccatgatcaagaaaaagacaaaatcttcaaagccttcaaaaccagaaaaagataaggagcccagaaaaggaaaaggaaaaagttcgaagaaatgaaaccatttttcactagcgacagccactttttactctccctcctgaccagtccagctggtctagagaaagccttgttttttcccagagcaaccatgttttagcataatgggatgacctggtgtcccattataaataaagggtggtatggctagaagggtatgagcagtaggcttatgtacacctcttatagaggttgataggactgcttgggtcctccactgtcctctgtcaatctagttagacgtgcttctgaatgactgtagaattggaactagaaactacacctgggctttggagtcagattttagttaacaataatgagcctgggagcagtagtactaaggcgtcttttgtaggcttaagaatttatcctaatggcctttataggaccaatgctgattttttttaaaggcagttcctattatgtggtgaaattttgtaaataaatgattatacaaaacagtcaccacctagaactgggtattctttgtacattgtcagatatctttcaaagtataaattaggaataaaaatgttccacatgatatgtgtacaaattctttttaagattgtcatcttgtacagcaaaatattatgttggtatattacttccttattaatttgcaaatgattggattaaaaaagctcactgtattccttactaacctgttgtgtgaaacataacattggcagtcgaggagtcagaactcggattcccagcctcactccctctgtgtgtgttgaccacgtctctgctgtgaataggatttcatgcagtggtctgttatggggctttgcagcgtggggggctgcagaagattctcagacattcttatccttctggagtctcaacccatcaggttcagaccagtaggaaccaggctgggtcaggctcttaatttcactatggtgggggacaaaatgaacactggcttttgttcactttgcccctgagagatctagtcctgtcctgtgatggcttccacaaaccctgttggaagtttgggttattcctataactgtatgtgttgagtggccgtgaggctatggacctagcctggaatttagatgtctagctattttttaatcttgttggtaaatgctcagaggtctgtgctacctctgtgaggtatatactaaaatgaatgtaaaataaggatcgtattccctgctttaaggaactggtagtcttgtttgggtgatgagacaaagttcttgagacatttaaactgtatttaccagtgtgaaaaatgtcatttatggagattaattcattatggaaataaaacattgcctaagcccttgcctgctgagtcacgaccctgtctttgttaaagtccatcttgaaattcttatgcttcaggaaaggttttctcaccagtagggtgaggctggctttcctattcatgttcttccatttctatgccttttggatatgcaagtcacgtctccctaggtcttctgcagcccccaggagagagacttgaatctccatgcagccaggatgcggcatagtgtccttcacttgttcattatgattttgtttgtaattttaaatgttttaaacccaagattgggataatatgtgtgtaaaattaatagcatttcttttagaattagaaattgtaaatatgccctttatgaggatggcata

SEQ ID NO: 3691 - protein, 1147 aa, Homo sapiens; identical to SEQ ID NO: 424

SEQ ID NO: 3692 - DNA, 1892 bp, Homo sapiens
aagtagaaaatttcctttgggcacattgatgtgtacccattaccctcatgctgtggtgctgggctttctaaactacaccagctggctgtcaaataaacttactccagcaaaaggactgtaaacatggattatctgtcgcttctaagggatgcacttgtacagcccttgacctcacaaggagtagacggagtacaggatgttgttgcacttatggacacatattatttgatgaaagaagactttgagaatatcatggaaatcagcagctggggtggcaaacctagtcccttttcaaagctggatcccaaggtgaaagcagccttcacaagagcttacaataaggaagcccaccttactccatactcacttcaagctataaaggcatctagacacagcacaagcccatccctggattcggaatacaatgaagaattaaatgaagatgactctcaatctgatgagaaagaccaagatgctatagaaactgatgccatgatcaagaaaaagacaaaatcttcaaagccttcaaaaccagaaaaagataaggagcccagaaaaggaaaaggaaaaagttcgaagaaatgaaaccatttttcactagcgacagccactttttactctccctcctgaccagtccagctggtctagagaaagccttgttttttcccagagcaaccatgttttagcataatgggatgacctggtgtcccattataaataaagggtggtatggctagaagggtatgagcagtaggcttatgtacacctcttatagaggttgataggactgcttgggtcctccactgtcctctgtcaatctagttagacgtgcttctgaatgactgtagaattggaactagaaactacacctgggctttggagtcagattttagttaacaataatgagcctgggagcagtagtactaaggcgtcttttgtaggcttaagaatttatcctaatggcctttataggaccaatgctgattttttttaaaggcagttcctattatgtggtgaaattttgtaaataaatgattatacaaaacagtcaccacctagaactgggtattctttgtacattgtcagatatctttcaaagtataaattaggaataaaaatgttccacatgatatgtgtacaaattctttttaagattgtcatcttgtacagcaaaatattatgttggtatattacttccttattaatttgcaaatgattggattaaaaaagctcactgtattccttactaacctgttgtgtgaaacataacattggcagtcgaggagtcagaactcggattcccagcctcactccctctgtgtgtgttgaccacgtctctgctgtgaataggatttcatgcagtggtctgttatggggctttgcagcgtggggggctgcagaagattctcagacattcttatccttctggagtctcaacccatcaggttcagaccagtaggaaccaggctgggtcaggctcttaatttcactatggtgggggacaaaatgaacactggcttttgttcactttgcccctgagagatctagtcctgtcctgtgatggcttccacaaaccctgttggaagtttgggttattcctataactgtatgtgttgagtggccgtgaggctatggacctagcctggaatttagatgtctagctattttttaatcttgttggtaaatgctcagaggtctgtgctacctctgtgaggtatatactaaaatgaatgtaaaataaggatcgtattccctgctttaaggaactggtagtcttgtttgggtgatgagacaaagttcttgagacatttaaactgtatttaccagtgtgaaaaatgtcatttatggagattaattcattatggaaataaaacattgcctaagcccttgcc

SEQ ID NO: 3693 - protein, 153 aa, Homo sapiens [sequence omitted]

SEQ ID NO: 3694 - DNA, 1966 bp, Homo sapiens
gaaagggtctgactgccctgtaggccatttatgccagtgttcttcctggagagttgatgagggggtacatgacccagtttcccaccttcccaagctggctggggaagcactcgtctacaggcaaacatgatcgtattgttcaggacctggccttgcatatgagtctcagaacttactccagcaaaaggactgtaaacatggattatctgtcgcttctaagggatgcacttgtacagcccttgacctcacaaggagtagacggagtacaggatgttgttgcacttatggacacatattatttgatgaaagaagactttgagaatatcatggaaatcagcagctggggtggcaaacctagtcccttttcaaagctggatcccaaggtgaaagcagccttcacaagagcttacaataaggaagcccaccttactccatactcacttcaagctataaaggcatctagacacagcacaagcccatccctggattcggaatacaatgaagaattaaatgaagatgactctcaatctgatgagaaagaccaagatgctatagaaactgatgccatgatcaagaaaaagacaaaatcttcaaagccttcaaaaccagaaaaagataaggagcccagaaaaggaaaaggaaaaagttcgaagaaatgaaaccatttttcactagcgacagccactttttactctccctcctgaccagtccagctggtctagagaaagccttgttttttcccagagcaaccatgttttagcataatgggatgacctggtgtcccattataaataaagggtggtatggctagaagggtatgagcagtaggcttatgtacacctcttatagaggttgataggactgcttgggtcctccactgtcctctgtcaatctagttagacgtgcttctgaatgactgtagaattggaactagaaactacacctgggctttggagtcagattttagttaacaataatgagcctgggagcagtagtactaaggcgtcttttgtaggcttaagaatttatcctaatggcctttataggaccaatgctgattttttttaaaggcagttcctattatgtggtgaaattttgtaaataaatgattatacaaaacagtcaccacctagaactgggtattctttgtacattgtcagatatctttcaaagtataaattaggaataaaaatgttccacatgatatgtgtacaaattctttttaagattgtcatcttgtacagcaaaatattatgttggtatattacttccttattaatttgcaaatgattggattaaaaaagctcactgtattccttactaacctgttgtgtgaaacataacattggcagtcgaggagtcagaactcggattcccagcctcactccctctgtgtgtgttgaccacgtctctgctgtgaataggatttcatgcagtggtctgttatggggctttgcagcgtggggggctgcagaagattctcagacattcttatccttctggagtctcaacccatcaggttcagaccagtaggaaccaggctgggtcaggctcttaatttcactatggtgggggacaaaatgaacactggcttttgttcactttgcccctgagagatctagtcctgtcctgtgatggcttccacaaaccctgttggaagtttgggttattcctataactgtatgtgttgagtggccgtgaggctatggacctagcctggaatttagatgtctagctattttttaatcttgttggtaaatgctcagaggtctgtgctacctctgtgaggtatatactaaaatgaatgtaaaataaggatcgtattccctgctttaaggaactggtagtcttgtttgggtgatgagacaaagttcttgagacatttaaactgtatttaccagtgtgaaaaatgtcatttatggagattaattcattatggaaataaaacattgcctaagcccttgcc

SEQ ID NO: 3695 - protein, 200 aa, Homo sapiens; identical to SEQ ID NO: 3689

SEQ ID NO: 3696 - DNA, 4910 bp, Homo sapiens
aaagctcgcgcctcctgacgtcatcaccgcgcgccactgtcttcgccttcttgcacttcgcgggagaagttgttggcgcgaatggatcctgagcctcgataacagattcctcaaccggcccacccgccagccagccagcgccttcatcctggggctgcgatggacattcggaaattctttggagtaataccaagtggaaagaaacttgtaagtgaaacagtaaagaagaatgagaaaacaaagtctgatgaagaaactttaaaagcaaagaaaggaataaaggaaatcaaggtaaatagctcccgtaaagaggatgacttcaaacaaaagcaaccaagcaagaaaaagaggatcatctatgattcagattcagagtcagaggagacgttgcaggtaaaaaatgccaaaaagccaccagaaaaactgccagtatcttctaaacctggtaaaatttcacggcaggatcctgttacatacatttcagaaacagatgaagaagatgactttatgtgtaagaaggcggcctctaaatcaaaagagaatggaagatctacaaatagtcatcttggaacatcaaacatgaaaaagaatgaagaaaacactaagaccaagaataagcctttatcaccaataaaacttacacccacatcagtacttgattattttggaactggaagtgtccaaagatctaataagaagatggtggcaagcaaaagaaaagagctttcacaaaatacagatgagtctggattaaatgatgaagccatcgccaagcaattacagcttgatgaagatgcggagctggagaggcagttgcatgaagatgaagagtttgccagaacattagccatgttggatgaagaacccaagaccaaaaaggctcgaaaggacacagaagcgggagaaacgttttcatctgtccaagccaatttaagtaaagcagaaaaacataaatatcctcataaagtaaaaacagcacaagtttcagatgaaagaaagagctacagtcctaggaagcaaagtaaatatgaaagttcaaaagaatctcagcaacattccaagtcatcagctgacaaaataggagaagtctcttctcccaaggccagttctaagctggcaattatgaaaagaaaagaagagagctcttataaagaaatagagcctgtggcctcaaaaagaaaagaaaatgccattaaattgaaaggagagacaaaaactcctaagaaaaccaaaagttctccagctaaaaaagagtctgtaagtcctgaagattctgaaaagaaacgcactaattatcaagcttatcgaagctacttaaatcgagaaggtcccaaggctctgggctccaaagaaataccaaagggagctgaaaattgcttggaaggccttatatttgtaatcacaggcgtgctggagtctattgaacgagatgaggccaagtctctaattgaacgttatgggggaaaagtaacaggaaatgtcagcaagaaaacaaattatcttgtcatgggtcgtgatagtggacagtccaagagtgataaggccgcagccttggggacaaaaattattgatgaagatggcctgttgaatctgattcggactatgccaggcaagaaatccaagtatgaaatagcagttgaaactgagatgaagaaagagtccaaactggagagaacaccccaaaaaaatgtccaaggaaaaagaaaaattagtccatctaaaaaggaatcagaatctaaaaagagcaggccgacttccaaaagggacagtttggcaaagacaataaaaaaggaaacagatgtgttttggaaaagcctggatttcaaggagcaggtggctgaggagacaagtggtgacagcaaggctaggaatttggctgatgacagcagtgaaaacaaagtggaaaatttgctctgggtggataaatataagccaacctcgctcaagaccataattggacagcaaggtgaccagagctgtgccaacaaactcctacgctggctccgaaactggcaaaagagttcttccgaagataaaaaacacgcaaagtttggtaaattttccggcaaagatgatggctctagttttaaagcagcgttgctgtcaggccctcctggtgttggcaaaaccaccacagcttccctggtgtgtcaggagttgggatacagctacgtggaactgaatgcaagtgacacccggagtaagagcagtttgaaggcgattgttgctgagtcactgaacaataccagcatcaaaggcttttattcaaatggagcagcctcttcagtaagcacgaaacatgctctcatcatggatgaagtagatggcatggcaggcaatgaggataggggaggaattcaggaattaattggcctgataaaacatactaaaattcccattatttgtatgtgcaatgatagaaatcatcccaagattcgctctctggttcattattgttttgatcttcgttttcaaagacctcgggttgaacagattaagggtgctatgatgtctattgcatttaaagaaggtttaaagattccccctccagctatgaatgaaataattttgggagccaatcaagatatcagacaggttttacataatctgagtatgtggtgtgcacgaagtaaagcattaacctatgaccaggccaaagctgattctcacagagccaaaaaggatatcaaaatgggcccatttgatgttgcccggaaagtgtttgcagctggagaggagactgctcacatgtcacttgtggacaagtcagatctcttttttcatgattattcaatagcacccctcttcgtccaggaaaattacatacacgtgaagcctgtagcagcagggggtgacatgaaaaagcacctgatgcttttaagcagagcagcagacagcatatgcgatggtgacctagtggacagccagatccggagtaagcaaaactggagtcttctgcctgcgcaggccatttatgccagtgttcttcctggagagttgatgagggggtacatgacccagtttcccaccttcccaagctggctggggaagcactcgtctacaggcaaacatgatcgtattgttcaggacctggccttgcatatgagtctcagaacttactccagcaaaaggactgtaaacatggattatctgtcgcttctaagggatgcacttgtacagcccttgacctcacaaggagtagacggagtacaggatgttgttgcacttatggacacatattatttgatgaaagaagactttgagaatatcatggaaatcagcagctggggtggcaaacctagtcccttttcaaagctggatcccaaggtgaaagcagccttcacaagagcttacaataaggaagcccaccttactccatactcacttcaagctataaaggcatctagacacagcacaagcccatccctggattcggaatacaatgaagaattaaatgaagatgactctcaatctgatgagaaagaccaagatgctatagaaactgatgccatgatcaagaaaaagacaaaatcttcaaagccttcaaaaccagaaaaagataaggagcccagaaaaggaaaaggaaaaagttcgaagaaatgaaaccatttttcactagcgacagccactttttactctccctcctgaccagtccagctggtctagagaaagccttgttttttcccagagcaaccatgttttagcataatgggatgacctggtgtcccattataaataaagggtggtatggctagaagggtatgagcagtaggcttatgtacacctcttatagaggttgataggactgcttgggtcctccactgtcctctgtcaatctagttagacgtgcttctgaatgactgtagaattggaactagaaactacacctgggctttggagtcagattttagttaacaataatgagcctgggagcagtagtactaaggcgtcttttgtaggcttaagaatttatcctaatggcctttataggaccaatgctgattttttttaaaggcagttcctattatgtggtgaaattttgtaaataaatgattatacaaaacagtcaccacctagaactgggtattctttgtacattgtcagatatctttcaaagtataaattaggaataaaaatgttccacatgatatgtgtacaaattctttttaagattgtcatcttgtacagcaaaatattatgttggtatattacttccttattaatttgcaaatgattggattaaaaaagctcactgtattccttactaacctgttgtgtgaaacataacattggcagtcgaggagtcagaactcggattcccagcctcactccctctgtgtgtgttgaccacgtctctgctgtgaataggatttcatgcagtggtctgttatggggctttgcagcgtggggggctgcagaagattctcagacattcttatccttctggagtctcaacccatcaggttcagaccagtaggaaccaggctgggtcaggctcttaatttcactatggtgggggacaaaatgaacactggcttttgttcactttgcccctgagagatctagtcctgtcctgtgatggcttccacaaaccctgttggaagtttgggttattcctataactgtatgtgttgagtggccgtgaggctatggacctagcctggaatttagatgtctagctattttttaatcttgttggtaaatgctcagaggtctgtgctacctctgtgaggtatatactaaaatgaatgtaaaataaggatcgtattccctgctttaaggaactggtagtcttgtttgggtgatgagacaaagttcttgagacatttaaactgtatttaccagtgtgaaaaatgtcatttatggagattaattcattatggaaataaaacattgcctaagcccttgcc

SEQ ID NO: 3697 - protein, 1147 aa, Homo sapiens; identical to SEQ ID NO: 424

SEQ ID NO: 3698 - DNA, 1130 bp, Homo sapiens
aagtagaaaatttcctttgggcacattgatgtgtacccattaccctcatgctgtggtgctgggctttctaaactacaccagctggctgtcaaataaacttactccagcaaaaggactgtaaacatggattatctgtcgcttctaagggatgcacttgtacagcccttgacctcacaaggagtagacggagtacaggatgttgttgcacttatggacacatattatttgatgaaagaagactttgagaatatcatggaaatcagcagctggggtggcaaacctagtcccttttcaaagctggatcccaaggtgaaagcagccttcacaagagcttacaataaggaagcccaccttactccatactcacttcaagctataaaggcatctagacacagcacaagcccatccctggattcggaatacaatgaagaattaaatgaagatgactctcaatctgatgagaaagaccaagatgctatagaaactgatgccatgatcaagaaaaagacaaaatcttcaaagccttcaaaaccagaaaaagataaggagcccagaaaaggaaaaggaaaaagttcgaagaaatgaaaccatttttcactagcgacagccactttttactctccctcctgaccagtccagctggtctagagaaagccttgttttttcccagagcaaccatgttttagcataatgggatgacctggtgtcccattataaataaagggtggtatggctagaagggtatgagcagtaggcttatgtacacctcttatagaggttgataggactgcttgggtcctccactgtcctctgtcaatctagttagacgtgcttctgaatgactgtagaattggaactagaaactacacctgggctttggagtcagattttagttaacaataatgagcctgggagcagtagtactaaggcgtcttttgtaggcttaagaatttatcctaatggcctttataggaccaatgctgattttttttaaaggcagttcctattatgtggtgaaattttgtaaataaatgattatacaaaacagtcaccacctagaactgggtattctttgtacattgtcagatatctttcaaagtataaattaggaataaaaatgttccacatga

SEQ ID NO: 3699 - protein, 153 aa, Homo sapiens [sequence omitted]

SEQ ID NO: 3700 - DNA, 1204 bp, Homo sapiens
gaaagggtctgactgccctgtaggccatttatgccagtgttcttcctggagagttgatgagggggtacatgacccagtttcccaccttcccaagctggctggggaagcactcgtctacaggcaaacatgatcgtattgttcaggacctggccttgcatatgagtctcagaacttactccagcaaaaggactgtaaacatggattatctgtcgcttctaagggatgcacttgtacagcccttgacctcacaaggagtagacggagtacaggatgttgttgcacttatggacacatattatttgatgaaagaagactttgagaatatcatggaaatcagcagctggggtggcaaacctagtcccttttcaaagctggatcccaaggtgaaagcagccttcacaagagcttacaataaggaagcccaccttactccatactcacttcaagctataaaggcatctagacacagcacaagcccatccctggattcggaatacaatgaagaattaaatgaagatgactctcaatctgatgagaaagaccaagatgctatagaaactgatgccatgatcaagaaaaagacaaaatcttcaaagccttcaaaaccagaaaaagataaggagcccagaaaaggaaaaggaaaaagttcgaagaaatgaaaccatttttcactagcgacagccactttttactctccctcctgaccagtccagctggtctagagaaagccttgttttttcccagagcaaccatgttttagcataatgggatgacctggtgtcccattataaataaagggtggtatggctagaagggtatgagcagtaggcttatgtacacctcttatagaggttgataggactgcttgggtcctccactgtcctctgtcaatctagttagacgtgcttctgaatgactgtagaattggaactagaaactacacctgggctttggagtcagattttagttaacaataatgagcctgggagcagtagtactaaggcgtcttttgtaggcttaagaatttatcctaatggcctttataggaccaatgctgattttttttaaaggcagttcctattatgtggtgaaattttgtaaataaatgattatacaaaacagtcaccacctagaactgggtattctttgtacattgtcagatatctttcaaagtataaattaggaataaaaatgttccacatga

SEQ ID NO: 3701 - protein, 200 aa, Homo sapiens; identical to SEQ ID NO: 3689

SEQ ID NO: 3702 - DNA, 1041 bp, Homo sapiens
aagtagaaaatttcctttgggcacattgatgtgtacccattaccctcatgctgtggtgctgggctttctaaactacaccagctggctgtcaaataaacttactccagcaaaaggactgtaaacatggattatctgtcgcttctaagggatgcacttgtacagcccttgacctcacaaggagtagacggagtacaggatgttgttgcacttatggacacatattatttgatgaaagaagactttgagaatatcatggaaatcagcagctggggtggcaaacctagtcccttttcaaagctggatcccaaggtgaaagcagccttcacaagagcttacaataaggaagcccaccttactccatactcacttcaagctataaaggcatctagacacagcacaagcccatccctggattcggaatacaatgaagaattaaatgaagatgactctcaatctgatgagaaagaccaagatgctatagaaactgatgccatgatcaagaaaaagacaaaatcttcaaagccttcaaaaccagaaaaagataaggagcccagaaaaggaaaaggaaaaagttcgaagaaatgaaaccatttttcactagcgacagccactttttactctccctcctgaccagtccagctggtctagagaaagccttgttttttcccagagcaaccatgttttagcataatgggatgacctggtgtcccattataaataaagggtggtatggctagaagggtatgagcagtaggcttatgtacacctcttatagaggttgataggactgcttgggtcctccactgtcctctgtcaatctagttagacgtgcttctgaatgactgtagaattggaactagaaactacacctgggctttggagtcagattttagttaacaataatgagcctgggagcagtagtactaaggcgtcttttgtaggcttaagaatttatcctaatggcctttataggaccaatgctgattttttttaaaggcagttcctattatgtggtgaaattttgtaaataaatgattatac

SEQ ID NO: 3703 - protein, 153 aa, Homo sapiens [sequence omitted]

SEQ ID NO: 3704 - DNA, 1115 bp, Homo sapiens
gaaagggtctgactgccctgtaggccatttatgccagtgttcttcctggagagttgatgagggggtacatgacccagtttcccaccttcccaagctggctggggaagcactcgtctacaggcaaacatgatcgtattgttcaggacctggccttgcatatgagtctcagaacttactccagcaaaaggactgtaaacatggattatctgtcgcttctaagggatgcacttgtacagcccttgacctcacaaggagtagacggagtacaggatgttgttgcacttatggacacatattatttgatgaaagaagactttgagaatatcatggaaatcagcagctggggtggcaaacctagtcccttttcaaagctggatcccaaggtgaaagcagccttcacaagagcttacaataaggaagcccaccttactccatactcacttcaagctataaaggcatctagacacagcacaagcccatccctggattcggaatacaatgaagaattaaatgaagatgactctcaatctgatgagaaagaccaagatgctatagaaactgatgccatgatcaagaaaaagacaaaatcttcaaagccttcaaaaccagaaaaagataaggagcccagaaaaggaaaaggaaaaagttcgaagaaatgaaaccatttttcactagcgacagccactttttactctccctcctgaccagtccagctggtctagagaaagccttgttttttcccagagcaaccatgttttagcataatgggatgacctggtgtcccattataaataaagggtggtatggctagaagggtatgagcagtaggcttatgtacacctcttatagaggttgataggactgcttgggtcctccactgtcctctgtcaatctagttagacgtgcttctgaatgactgtagaattggaactagaaactacacctgggctttggagtcagattttagttaacaataatgagcctgggagcagtagtactaaggcgtcttttgtaggcttaagaatttatcctaatggcctttataggaccaatgctgattttttttaaaggcagttcctattatgtggtgaaattttgtaaataaatgattatac

SEQ ID NO: 3705 - protein, 200 aa, Homo sapiens; identical to SEQ ID NO: 3689

SEQ ID NO: 3706 - DNA, 939 bp, Homo sapiens
aaagctcgcgcctcctgacgtcatcaccgcgcgccactgtcttcgccttcttgcacttcgcgggagaagttgttggcgcgaatggatcctgagcctcgataacagattcctcaaccggcccacccgccagccagccagcgccttcatcctggggctgcgatggacattcggaaattctttggagtaataccaagtggaaagaaacttgtaagtgaaacagtaaagaagaatgagaaaacaaagtctgatgaagaaactttaaaagcaaagaaaggaataaaggaaatcaaggtaaatagctcccgtaaagaggatgacttcaaacaaaagcaaccaagcaagaaaaagaggatcatctatgattcagattcagagtcagaggagacgttgcaggtaaaaaatgccaaaaagccaccagaaaaactgccagtatcttctaaacctggtaaaatttcacggcaggatcctgttacatacatttcagaaacagatgaagaagatgactttatgtgtaagaaggcggcctctaaatcaaaagagaatggaagatctacaaatagtcatcttggaacatcaaacatgaaaaagaatgaagaaaacactaagaccaagaataagcctttatcaccaataaaacttacacccacatcagtacttgattattttggaactggaagtgtccaaagatctaataagaagatggtggcaagcaaaagaaaagagctggagaggcagttgcatgaagatgaagagtttgccagaacattagccatgttggatgaagaacccaagaccaaaaaggtggcataatgttgggctatttgcgttctgaatatacagtacagatcagtgttcatacttgcgtgttctaggctctagccaaaacatgaataacttttccagaaagaaattaaattattttataaaaatgtttttggg

SEQ ID NO: 3707 - protein, 216 aa, Homo sapiens
MDIRKFFGVIPSGKKLVSETVKKNEKTKSDEETLKAKKGIKEIKVNSSRKEDDFKQKQPSKKKRIIYDSDSESEETLQVKNAKKPPEKLPVSSKPGKISRQDPVTYISETDEEDDFMCKKAASKSKENGRSTNSHLGTSNMKKNEENTKTKNKPLSPIKLTPTSVLDYFGTGSVQRSNKKMVASKRKELERQLHEDEEFARTLAMLDEEPKTKKVA

SEQ ID NO: 3708 - DNA, 1613 bp, Homo sapiens
agatcggaggcggcccgcgccgggccccacattcagggcttgggggttcattcgccgcgccgcccgccgctgcttcaggccctccgcttcggctcggagccccgggacccctaacctccagggccctcaccttggacccgcctccctgcctcccacccgccgcctttacctgcttctggagcgggcagagggcgtcgaagccggtgccgcgtcgtcgaacgcacaacgcggcgccgcagaaagggtctcactcttttgcccaggctggggtgcactggcactatctcggctcactgcaacctctgcctctggaactcgaaggatcatcccacctcagcctcccaggcctgccagacacctgcgccctcctgcagccaccgccacagctgccagcatgtctggcccagacatcaagacgccgaacgccatccagatctgccggattatgcggacgctaatgtggcccgcaatgtctaggcgggaccatcctgaagatgatcaaagaggcgggcgccatcatcagcacccggcattgcaatccgcagaacggggatcgctgtgtggccgctctggctcgggtcgagtgcacccacttcctgtggcccatgtgcatcggtgaggtggcccacgtcagcgcggagatcacctacacctccaagcactctgtggaggtgcaggtcaacatgatgtccgaaaacatcctcacaggtgccaaaaagctgaccaataaggccaccctctggtatgcgcccctgtcgctgacgaacgtggacaaggtcctcgaagagcctcctgttgtgtatttccggcaggagcaggaggaggagggccagaagcggtacaaaacccagaagctggagcgcatggagaccaactggaggaacggggacatcgtccagccagtcctcaacccagagccgaacactgtcagctacagccagtccagcttgatccacctggtggggccttcagactgtaccctgcacagcttcgtgcatgaaggggtgaccatgaaggtcatggacgaggtcgccgggatcttggctgcacgccactgcaagaccaacctcgtcacagcctccatggaggccattaattttgacaacaagatcagaaaaggctgcatcaagaccatctccggacgcatgaccttcacgagcaataagtccgtagagatcgaggtcttggtggatgccgactgtgttgtggacagctctcagaagcgctacagggccgccagtgtcttcacctaagtgtcgctgagccaggaaggcaggtcgctgcccatgccccagctcgtgccggagacccaggacgagaagggctttgaggcctggctcggtggctcacgcctataatcccagcactttaggatgctgaggcaggcggatcacttgacgtcaggagttcaagaccagcctagccaacatggcaaaaccccatctctactaaaaatacaaaacttaactgggcgtggtggcaggcgcctataatcccagctactcaggaggctgaggcaggacaatctcttgaacctgggaggcagaggttgcagtgagccaagatcatgccactgctctccagcctgggcaacaagagcaaaactccgtctc

SEQ ID NO: 3709 - protein, 252 aa, Homo sapiens
MIKEAGAIISTRHCNPQNGDRCVAALARVECTHFLWPMCIGEVAHVSAEITYTSKHSVEVQVNMMSENILTGAKKLTNKATLWYAPLSLTNVDKVLEEPPVVYFRQEQEEEGQKRYKTQKLERMETNWRNGDIVQPVLNPEPNTVSYSQSSLIHLVGPSDCTLHSFVHEGVTMKVMDEVAGILAARHCKTNLVTASMEAINFDNKIRKGCIKTISGRMTFTSNKSVEIEVLVDADCVVDSSQKRYRAASVFT

SEQ ID NO: 3710 - DNA, 6889 bp, Homo sapiens
ttccccggccggacggagagcggcagtgtctccccgccgggcgcgctcgccgtgtctcccccgcggccgcagctgcttgctagccttgcgcggcgcgggagagcgcagtggcgccggcgggaaagggctgcggacctgcggcgccgcgttgtgcgttcgacgacgcggcaccggcttcgacgccctctgcccgctccagaagcagtaagaagacatgttggataacaagaagaggtgtagagtttgcatatatcaactgtggccttaatgagcatgttgacagcatcgatgctagacagacagtctttttactgctggattgtgcaagatatttaaccctattttgtttgaattatgacttaaatgtcaaacatcttaactaagaaaagggaaacattttagttttggaagtcagaatgccaaggagaaggaaaaatcttgggggaaatccttttcggaagactgcaaaccctaaggaagttgtcgtatccagtgttgctagtcgtgaggagccaaccactactctaccttccatgggtgagacaaaagttgatcaggaagaactcttcaccagtatctcagagatattttctgatctggatcctgatgtagtgtatttgatgctttctgaatgtgatttcaaagttgaaaatgctatggattgtctattagaattatctgccactgataccaagatagaagaatcatcttcacaaagtttcgttgcttctgagaaccaagtaggtgcagcagaaagtaaaataatggaaaaacgtcctgaagaagagagtgaagattcaaaaatggattcatttttggacatgcagctaactgaagacctggattccttaatacagaatgcttttgagaaattgaactcttctcctgatgaccaagtatactcatttttgccttcacaagatgttaatagttttaatgactcaagtgagtttataaatcctgattcaagtaatatgactcccattttttctacacaaaatatgaatttgaacggtgaaaatttagagaattctggttctactttaagtttaaacccattaccttcacattcagttttgaacgagtccaagtgttttataaaggataacacattggctttggaaagtaactacccggaagattctcttctcagtagttctttaaatgtagcaagtgactccatcgcaggttgtagcagtctcaatcaaaaacagaaagaacttttagaatctgagtgcgttgaggctcaattctctgaagctcctgtagatttggatgccagtgaacctcaggcttgtttaaaccttccagggcttgatttaccaggtacaggtggggatcagaaatctactcgggtctctgatgtgtttctaccttccgaagggttcaacttcaagccacacaaacatcctgaactgccaactaaggggaaggatgtgagttactgcccggtacttgctcctctcccattgctgttgcctcctccgccacctccaccgatgtggaatccaatgattcctgcttttgacctcttccaaggaaaccatggctttgtagctcctgttgtaaccacagctgcacactggagatctgtcaactacacatttccaccctcagttatttctcacacttccccaacaaaagtatggagaaataaagatggaacaagtgcttatcaagtacaagaaaccccagtttctcaggttgtaagaaagaagacatcttacgttggactagttcttgttcttctcagaggtcttccgggatctggaaaatcttttttggcaaggactttgcaagaggataatccaagtggagtcattcttagtactgatgattatttttatataaatggacagtaccagtttgatgtaaagtacttaggagaagcacatgaatggaaccagaatcgtgcaaaagaagcatttgagaagaagatatctcctataattatagataatacaaacctacaggcatgggaaatgaaaccatatgttgctttgtctcagaaacacaaatataaagtcctttttcgggaaccagacacatggtggaagtttaaaccaaaggaacttgcaaggcgtaacattcatggggtaagcaaagaaaaaataacaagaatgttggaacattatcaacgttttgtttcagtgccaataattatgagttcttcggttccagagaaaattgaacgtattgagttgtgtgcatattcttgtgaggatagaagcactagcccaagagacgatgaagatattatctctgaaaaagaagaaaatattttatctttatctttgaagcatctagagttcactgaagagaagaatcttgatgtaaccaaagaaacaatgttacctgagaatgttgcatatctctctaatgcagatttaaacaaaagaagaaaagaaataagtgatatgaatcctagcattcaaagtgctttaattctggaaactccacacatgtatttttctgactctgaaagcaaactacaggcaacagacaaaagtgaaaacgagcaaatagaaatggtggctgtaaaagggtatagtaaaactgacacagatagttctatggagagagtatcacctagtacttgctgtagtgaaaataatcaagaagactgtgatcttgcaaatagtggaccacttcaaaatgaaaaatcctcacctggtgaaatagtggaagaaagagcaacagtaacgaaaaaagcctttgggaaacaaaaaagcaaatcgactttggaaaagttcccaagacatgagctatcaaattttgttggtgactggccagttgataagactattggtcagaggacaaaaaggaacagaaaaactgaaaaaacttcatccgtacaaagcgacaaaaagtataattaccctcagtcacacaaattagttaacagtgtatctgtgaatacagattgtgtccagcaacgaggatctccacatgaaagtgtagaggatggcagaaagtcacagtgtgatgatgcttcagagccactcaatagctataaatatgatgcttataaaaatattgacaaaaactcattcaacattatgggtgactggccttcatctgattctttagctcagagggaacacagatcaagaatgccaaagactggtttaagtgagcccaacctagaaattggaacaaatgacaaaatgaatgaaatatccttatctacagcacatgaggcctgttggggcacaagctctcaaaaactaaagacattgggtagctccaatctaggaagttctgaaatgctgctcagtgaaatgacctgtgagagtcagacttgtctaagtaaaaagagtcatgggcaacacacatcgttgcctcttacttttaccaatagtgcaccaactgtttctggagtagtagaaccacaaacgttagctgaatgtcaagagcaaatgcctaagagagaccctggaaaagaagtaggcatgtgcacccagactgaaccacaggattttgctcttttatggaaaatagaaaagaataaaattagcatttcagattctatcaaagtattaacaggaagattagatggatttaagccgaaagttttcaatattaacacaaaatcagacgttcaagaagcaattccatatagagtaatgtatgataaaagcacgtttgttgaagaaagtgagcttaccagtgcagatgaatctgaaaatcttaacattctttgtaaactgtttggatccttttcattagaagccctgaaagacttatatgagaggtgcaataaagatattatttgggccacaagccttttgttggattctgaaactaagttatgtgaggatacagagtttgagaatttccaaaaatcgtgtgatggatcacaaattgggcctttttctctggggttgaatttgaaagaaattattagccaaagaggaactttagagaattctaattctcctgtgccagagtttagccatgggattggtattagtaacgctgactcacagtctacttgtgatgcagaaagaggaaactcagagcaggcggaaatgagagctgtcactcctgaaaaccatgaatcgatgacaagtatatttcccagtgctgctgtgggtctaaagaataataatgacatacttcctaacagccaggaagaacttttatatagcagtaagcagtcctttccaggtattctaaaagctactactcctaaagatatgagtgaaacagaaaaaaacctagtagtcacagagactggagacaacatacattctccttcacatttctctgatatttttaactttgtatctagtacttcaaatcttgaattaaatgaagaaatttattttactgattctcttgaaataaagagaaatgaaaattttccaaaggattatgtgaaattttcagatgaagaagaatttatgaatgaagatgagaaggaaatgaaggaaattctaatggcaggaagtagtttatcagctggagttagtggggaagataaaaccgagatattgaatcccactccagcgatggccaaatctctgaccatagactgtctggaattggcattaccccctgaactggcttttcaacttaatgaattatttggtcctgttggtattgattcagggtctctaacagttgaagattgtgtggttcatatagatctgaatctggcgaaagtgattcatgagaaatggaaagaatctgtaatggagcgacaaagacaagaagaggtgtcttgtggcaagtttatgcaagatccttccttggttggacatactgggcttgataatcctgaacaaaaatcatctcagagaacaggcaaaaaattactgaagactttaacagcatctgaaatgctacctttattggatcattggaatactcaaactaaaaaagtatcactcagagaaataatgtcagaagaaattgccttacaggaaaaacataatttgaaaagggagacccttatgtttgaaaaagattgtgccactaaactaaaggagaagcagctctttaagatatttccagccattaaccaaaattttctggtggacattttcaaggaccacaactattcattagaacacacagtgcaatttcttaactgtgttcttgaaggggaccctgtaaaaacagttgtagcccaagagtttgttcaccaaaatgagaatgtcacatctcatactggccagaagtctaaagagaaaaagccaaagaaattaaaagagactgaagaaacaccaagtgaactgtctttccaggactttgagtacccagactatgatgactacagagcagaggctttccttcaccaacagaagaggatggagtgctacagcaaggccaaagaagcttatcggatagggaaaaaaaatgtcgccaccttttatgcccagcagggtactcttcatgagcagaagatgaaagaagccaatcaccttgctgccatagagatctttgagaaagtcaatgcttcgctgctgccacagaatgttttagacctccatgggctgcatgtggatgaagctctagaacatttgatgagagttttagagaagaagactgaagaatttaagcagaacggtgggaagccctatttgtctgtgattacggggagaggaaaccacagccagggaggagttgctcgcatcaaaccagctgtcattaagtacctcataagccatagcttcaggttctctgaaattaaaccagggtgcttgaaagtcatgctaaagtaaaataaacatccttgaattagaagtatgaaggtttgtaggttaaaattacttttatttgcagtaattcagtcaattctaccctaaagatgtgttttattataaataatattcaattatgaaacaaaaaaattatgatgtttttcaaaatgcaagtgaggtttgattttttactgaatcaaatgcaaatgttacctgttaaagatattacagagaaattttattgattacaaaatatgtaagaaaattatcagctacagttttaaagtttaaaatgctctgattgtttctcagaaaaggttacctttgtattaattgttgtatgacatttagtaatgtcctaaaagtcttttgtgagaggtatttaaagtgctttgagacctgattcatgccccccaaagggtggtattaaaagaggaaaaaggacatagtagtggtagtaaagaaaaaaaggagatctaacaaaaacacttgaatattttttattttcaaaactaaacacataaaatgcttttattttgccatatcctacaggaaggaagacatgcttttgccctttcttctgctttgtatatgaccttgatcttttaccttttgttctgttcttctgtgtgcattttatggaaagaaagttgggtctgagattatattgtaattttatactttctatagacagaaaggttttcagagaaaaagaaatggttaaatatcttccagatgttgctgccttatcgaaatgcttctagaactgtctgtataagtcgtatttcagacagtactaaatacttatattttatttttgaggcatgtaattttaaaactgcagtaggttaaaattctattaaacaaatatagaaaatattttgtttataattggcctggtgtggtggcccacgcctgtaatcccagcactttgggaggccgaggtaggtggatcgcctgaggtcagaagttcaagaccagcctggccaacatggtgaatccccgtctctattaaaaatacaaaaattagctgggtgtggtggcgtgtgcctgtaatcccagctacttgggaggctgaggcaggagaaccgcttaaacctgggaggtggaggttgcagtgacccgagatcgagatcacaccactgcactcagcctgggtgacagagcaagactccgtctcc

SEQ ID NO: 3711 - protein, 1770 aa, Homo sapiens; identical to SEQ ID NO: 427

SEQ ID NO: 3712 - DNA, 1257 bp, Homo sapiens
ggcgcgggagagcgcagtggcgccggcgggaaagggctgcggacctgcggcgccgcgttgtgcgttcgacgacgcggcaccggcttcgacgccctctgcccgctccagaagcagtaagaagacatgttggataacaagaagaggtgtagagtttgcatatatcaactgtggccttaatgagcatgttgacagcatcgatgctagacagacaggtaagaactgctttggctcttggaagcatactgctgaattgcctaccaatgagggaacttaattgggtgcttactaggtgccagttcttgtgcacagcactttttcatggattatctcatttaatcctcacagcaacctatgagttgaaaatgctatggattgtctattagaattatctgccactgataccaagatagaagaatcatcttcacaaagtttcgttgcttctgagaaccaagtaggtgcagcagaaagtaaaataatggaaaaacgtcctgaagaagagagtgaagattcaaaaatggattcatttttggacatgcagctaactgaagacctggattccttaatacagaatgcttttgagaaattgaactcttctcctgatgaccaagtatactcatttttgccttcacaagatgttaatagttttaatgactcaagtgagtttataaatcctgattcaagtaatatgactcccattttttctacacaaaatatgaatttgaacggtgaaaatttagagaattctggttctactttaagtttaaacccattaccttcacattcagttttgaacgagtccaagtgttttataaaggataacacattggctttggaaagtaactacccggaagattctcttctcagtagttctttaaatgtagcaagtgactccatcgcaggttgtagcagtctcaatcaaaaacagaaagaacttttagaatctgagtgcgttgaggctcaattctctgaagctcctgtagatttggatgccagtgaacctcaggcttgtttaaaccttccagggcttgatttaccaggtacaggtggggatcagaaatctactcgggtctctgatgtgtttctaccttccgaagggttcaacttcaagccacacaaacatcctgaactgccaactaaggggaaggatgtgagttactgcccggtacttgctcctctcccattgctgttgcctcctccgccacctccaccgatgtggaatccaatgattcctgcttttgacctcttccaaggaaacca

SEQ ID NO: 3713 - protein, 68 aa, Homo sapiens
MSMLTASMLDRQVRTALALGSILLNCLPMRELNWVLTRCQFLCTALFHGLSHLILTATYELKMLWIVY

SEQ ID NO: 3714 - DNA, 1093 bp, Homo sapiens
gcgccggcgggaaagggctgcggacctgcggcgccgcgttgtgcgttcgacgacgcggcaccggcttcgacgccctctgcccgctccagaagcagtaagaagacatgttggataacaagaagaggtgtagagtttgcatatatcaactgtggccttaatgagcatgttgacagcatcgatgctagacagacattgaaaatgctatggattgtctattagaattatctgccactgataccaagatagaagaatcatcttcacaaagtttcgttgcttctgagaaccaagtaggtgcagcagaaagtaaaataatggaaaaacgtcctgaagaagagagtgaagattcaaaaatggattcatttttggacatgcagctaactgaagacctggattccttaatacagaatgcttttgagaaattgaactcttctcctgatgaccaagtatactcatttttgccttcacaagatgttaatagttttaatgactcaagtgagtttataaatcctgattcaagtaatatgactcccattttttctacacaaaatatgaatttgaacggtgaaaatttagagaattctggttctactttaagtttaaacccattaccttcacattcagttttgaacgagtccaagtgttttataaaggataacacattggctttggaaagtaactacccggaagattctcttctcagtagttctttaaatgtagcaagtgactccatcgcaggttgtagcagtctcaatcaaaaacagaaagaacttttagaatctgagtgcgttgaggctcaattctctgaagctcctgtagatttggatgccagtgaacctcaggcttgtttaaaccttccagggcttgatttaccaggtacaggtggggatcagaaatctactcgggtctctgatgtgtttctaccttccgaagggttcaacttcaagccacacaaacatcctgaactgccaactaaggggaaggatgtgagttactgcccggtacttgctcctctcccattgctgttgcctcctccgccacctccaccgatgtggaatccaatgattcctgcttttgacctcttccaaggaaacca

SEQ ID NO: 3715 - protein, 295 aa, Homo sapiens
MDCLLELSATDTKIEESSSQSFVASENQVGAAESKIMEKRPEEESEDSKMDSFLDMQLTEDLDSLIQNAFEKLNSSPDDQVYSFLPSQDVNSFNDSSEFINPDSSNMTPIFSTQNMNLNGENLENSGSTLSLNPLPSHSVLNESKCFIKDNTLALESNYPEDSLLSSSLNVASDSIAGCSSLNQKQKELLESECVEAQFSEAPVDLDASEPQACLNLPGLDLPGTGGDQKSTRVSDVFLPSEGFNFKPHKHPELPTKGKDVSYCPVLAPLPLLLPPPPPPPMWNPMIPAFDLFQG

SEQ ID NO: 3716 - DNA, 435 bp, Homo sapiens
ggtgtgagccaccacgcctggcctacacaggtttctaagcttttacttatatatttgagggactaaaaaaacacctcatgagaaggaaaatataatcacagattttgttactagaattttcaaaagagctttcgtggtataagacatgttgactgaggaagcataaagaactgaattgtggtgttagtttttctatttaatgagtgttttcgtttctctgcttcttaaaggccagtcttgtgctggggttacaggcatgagccactgtgccaggcctacacatcttatttctatattccaccaacttttttttattactgcatagtattccaaaggatgagttctgccataatttatactgttttcctaagtgtttaggatgttataacagatagatacatatttctttttttgtttgtttgtttgagacagggt

SEQ ID NO: 3717 - protein, 41 aa, Homo sapiens [sequence omitted]

SEQ ID NO: 3718 - DNA, 2957 bp, Homo sapiens
ccagggcctaggggttcctacctcgggggatattctgctggtcgtggtatatatagccgatatcatgaagggaaaggaaaggccgcccaataactccagtatacacggtggctccaaacgttcagagaattcctactgccgggatctacggggccagttacgtgccatttgctgctccagctacagccacgatcgccacactacagaagaacgcggcagccgcggccgccatgtatggaggatacgcaggctacatacctcaggccttccctgctgctgccattcaggtccccatccccgacgtctaccagacatactgaggctggtgaccagcacgaagacagaccacacaaacaccactgaaggaacgcttgactatttatgaagaaggaacatgttggattcacacatgcaacctgaaagtgaagaatgttagcagatttatttctgaattattttatatacatgaagttttcactagttttttaagactattttcaacttagcatgcctacgttcatacatttccaaaagacttgcaatggttcgtgccttcattccatcttttaaaaatttgtatgctgtactacatttgtatagaggtttttgttgttgtttttttaaggatatattttcagtatgaaggttattttcttaacttctgcactccagagatttctattttgtagtaccttcaataatatatcaactatatattaaaaaagcacacttgaggagctagggaactattttgaaaaatatatacaatatttaaagatacaaacagtagtgcttaaaaatactacataaagcattattttaaaggttatactggaaagtgcaattttaaaatgagtaaaacctctgtatttctgctggcattaagggttgatggtgttaccatgtatcatcatggcggtactattttttaaaagaaattaaacactggatctctccttaagccaacattgaaaagacttgccgcacttctgagtccaaacactggaaagctctcctttgccaccgttagccggggctcattctccatgtgccttagccttaaacatgcccccactcccacatctctcaccctgtcccctcctccccagattcccaatcccaccgcaatgtttggcaagcctaggactgataagtagctctgatagaggagctggtggcttttatacttcttcctgggtttttgttggggtttgttgtttcgttgttttttgtttttttttttgtttggttggggaagtattgtcttctacgtgtgctattttcagtagcagagtaagcacaaggttttaatcgagttgcataagacacctttgcatagctatttaattgcccaatgtaaaactttaatgccatttctaatgcttttattcatttttgaagtatgagtttgtagggacaaagaatgtatgttatcgtagacaagacccccagagactcttttcagcagaaagttatgcttctagttgccttaccatgtttcttgcaaaactgtccatggtcctcaagggtgttggaaacattatgtttattaaatgggcctctcttcctttgctgtgcacttgatgggtgaactggattggggtgtgcacatccaggaggaggaggagagacctgtagaagtttaaagatagtttgtaaatatcttctaatgcttgtttttagtccttttatgttggagaagttcatggtatgtagtttaatgcaaaatgaaaccattttatttcaatgttattaaaaaggtttgttttattaggaagttaatgtattgttgcagtgttttgtgcctgtttaaaggcttttgtttagcagagtgaatgtaaaatacagtaaaatgttaagattgtcatctactttttaaaaaaaaatatcaacttggaattgttttttaaaggctcaatcaaggaagtgaggtgtgcaataaggtagcaagtaaaacgcagttgcgtttttatgtcatgttagagatccatacaattttccactcacgggatttttgttgatggctgaattcttgtggattcataagaggatcatgcccttagcaagtacttttgttttgttttaaattaagagattcccaaatgcctttttccccctcatcttgaaatgagatgagtttttatgtgtaagcaatatttatttaactattctataaaattattgagtgcctactgaggcctttaagcaccgctaacattcctttccatcattcttttaaatgacataaaataattgtgcaatgttcctgatgatgtaccccacaagctgcattcaaactcaaatctgtgggaatgagtgactcgacaaaatgtaattcggatcagatcctcatcccctgactgtgtgaaaaaagtactctccttctagtgaaggattgtcacagagtttcactggatgaaactatgacccagtattcttactgtattttacatatgcctgtaaattatttgcaaaaaagaagaagaagaggaagaaagaaaagaaagaaaagaaagaaagaaagaaagaaagaaagaaagaaagaaagaaagaaagaaagaaagaaagaaaaagaaagaaagaataaaaaaaaatgataacatggcaaccaccaaactcccttaaaaacaaacattggtgacatggccaattaagtatcagtgagcctcctatctgggacttatctgttcctattgtttcaaaaccatttcatgtacactactgaggtaagtttataacttgaaatgtgaactttttttttttttagtgttaagaacaaactatataaatgtaaaaaaaaagttttagagttctgttttcaaacattgctagtggtttagttaactttagctgctttatatttgaaaagcttttatttagatcttgctccatttacagtacattcttaggatgtatgtagtaaataaagctttctttaaagcaatcgcaagacctta

SEQ ID NO: 3719 - protein, 106 aa, Homo sapiens
MKGKERPPNNSSIHGGSKRSENSYCRDLRGQLRAICCSSYSHDRHTTEERGSRGRHVWRIRRLHTSGLPCCCHSGPHPRRLPDILRLVTSTKTDHTNTTEGTLDYL

SEQ ID NO: 3720 - DNA, 2975 bp, Homo sapiens
cgtggacgaggacgtgatggagaccgtgaagatcctctacgtgcgcaacctcatgatcgagaccaccgaggacaccatcaagaagagcttcggccagttcaaccccggctgcgtggagcgcgtcaagaagatccgcgactacgccttcgtgcacttcaccagccgcgaggatgccgtgcatgccatttgctgctccagctacagccacgatcgccacactacagaagaacgcggcagccgcggccgccatgtatggaggatacgcaggctacatacctcaggccttccctgctgctgccattcaggtccccatccccgacgtctaccagacatactgaggctggtgaccagcacgaagacagaccacacaaacaccactgaaggaacgcttgactatttatgaagaaggaacatgttggattcacacatgcaacctgaaagtgaagaatgttagcagatttatttctgaattattttatatacatgaagttttcactagttttttaagactattttcaacttagcatgcctacgttcatacatttccaaaagacttgcaatggttcgtgccttcattccatcttttaaaaatttgtatgctgtactacatttgtatagaggtttttgttgttgtttttttaaggatatattttcagtatgaaggttattttcttaacttctgcactccagagatttctattttgtagtaccttcaataatatatcaactatatattaaaaaagcacacttgaggagctagggaactattttgaaaaatatatacaatatttaaagatacaaacagtagtgcttaaaaatactacataaagcattattttaaaggttatactggaaagtgcaattttaaaatgagtaaaacctctgtatttctgctggcattaagggttgatggtgttaccatgtatcatcatggcggtactattttttaaaagaaattaaacactggatctctccttaagccaacattgaaaagacttgccgcacttctgagtccaaacactggaaagctctcctttgccaccgttagccggggctcattctccatgtgccttagccttaaacatgcccccactcccacatctctcaccctgtcccctcctccccagattcccaatcccaccgcaatgtttggcaagcctaggactgataagtagctctgatagaggagctggtggcttttatacttcttcctgggtttttgttggggtttgttgtttcgttgttttttgtttttttttttgtttggttggggaagtattgtcttctacgtgtgctattttcagtagcagagtaagcacaaggttttaatcgagttgcataagacacctttgcatagctatttaattgcccaatgtaaaactttaatgccatttctaatgcttttattcatttttgaagtatgagtttgtagggacaaagaatgtatgttatcgtagacaagacccccagagactcttttcagcagaaagttatgcttctagttgccttaccatgtttcttgcaaaactgtccatggtcctcaagggtgttggaaacattatgtttattaaatgggcctctcttcctttgctgtgcacttgatgggtgaactggattggggtgtgcacatccaggaggaggaggagagacctgtagaagtttaaagatagtttgtaaatatcttctaatgcttgtttttagtccttttatgttggagaagttcatggtatgtagtttaatgcaaaatgaaaccattttatttcaatgttattaaaaaggtttgttttattaggaagttaatgtattgttgcagtgttttgtgcctgtttaaaggcttttgtttagcagagtgaatgtaaaatacagtaaaatgttaagattgtcatctactttttaaaaaaaaatatcaacttggaattgttttttaaaggctcaatcaaggaagtgaggtgtgcaataaggtagcaagtaaaacgcagttgcgtttttatgtcatgttagagatccatacaattttccactcacgggatttttgttgatggctgaattcttgtggattcataagaggatcatgcccttagcaagtacttttgttttgttttaaattaagagattcccaaatgcctttttccccctcatcttgaaatgagatgagtttttatgtgtaagcaatatttatttaactattctataaaattattgagtgcctactgaggcctttaagcaccgctaacattcctttccatcattcttttaaatgacataaaataattgtgcaatgttcctgatgatgtaccccacaagctgcattcaaactcaaatctgtgggaatgagtgactcgacaaaatgtaattcggatcagatcctcatcccctgactgtgtgaaaaaagtactctccttctagtgaaggattgtcacagagtttcactggatgaaactatgacccagtattcttactgtattttacatatgcctgtaaattatttgcaaaaaagaagaagaagaggaagaaagaaaagaaagaaaagaaagaaagaaagaaagaaagaaagaaagaaagaaagaaagaaagaaagaaagaaagaaaaagaaagaaagaataaaaaaaaatgataacatggcaaccaccaaactcccttaaaaacaaacattggtgacatggccaattaagtatcagtgagcctcctatctgggacttatctgttcctattgtttcaaaaccatttcatgtacactactgaggtaagtttataacttgaaatgtgaactttttttttttttagtgttaagaacaaactatataaatgtaaaaaaaaagttttagagttctgttttcaaacattgctagtggtttagttaactttagctgctttatatttgaaaagcttttatttagatcttgctccatttacagtacattcttaggatgtatgtagtaaataaagctttctttaaagcaatcgcaagacctta

SEQ ID NO: 3721 - protein, 128 aa, Homo sapiens
METVKILYVRNLMIETTEDTIKKSFGQFNPGCVERVKKIRDYAFVHFTSREDAVHAICCSSYSHDRHTTEERGSRGRHVWRIRRLHTSGLPCCCHSGPHPRRLPDILRLVTSTKTDHTNTTEGTLDYL

SEQ ID NO: 3722 - DNA, 3346 bp, Homo sapiens
cctttgacattatgaccgcagaggattccaccgcagccatgagcagtgactcggccgccgggtcctccgccaaggtgcccgagggcgtggcgggcgcgcccaacgaggcagcactgctggcgctgatggagcgcacgggctacagcatggtgcaagagaacgggcagcgcaagtacggcggcccaccgcccggctgggagggcccgcacccgcagcgtggctgcgaggtcttcgtgggcaagatcccgcgcgacgtgtacgaggacgagctggtgcccgtgttcgaggccgtgggccgcatctacgagctgcgcctcatgatggactttgacggcaagaaccgcggctacgccttcgtcatgtactgccacaagcacgaggccaagcgcgcagtgcgtgagctcaacaactacgagatccgcccgggccgcctgtcattcccactgtgtcgacgccaccacctttccagggccgcccaataactccagtatacacggtggctccaaacgttcagagaattcctactgccgggatctacggggccagttacgtgccatttgctgctccagctacagccacgatcgccacactacagaagaacgcggcagccgcggccgccatgtatggaggatacgcaggctacatacctcaggccttccctgctgctgccattcaggtccccatccccgacgtctaccagacatactgaggctggtgaccagcacgaagacagaccacacaaacaccactgaaggaacgcttgactatttatgaagaaggaacatgttggattcacacatgcaacctgaaagtgaagaatgttagcagatttatttctgaattattttatatacatgaagttttcactagttttttaagactattttcaacttagcatgcctacgttcatacatttccaaaagacttgcaatggttcgtgccttcattccatcttttaaaaatttgtatgctgtactacatttgtatagaggtttttgttgttgtttttttaaggatatattttcagtatgaaggttattttcttaacttctgcactccagagatttctattttgtagtaccttcaataatatatcaactatatattaaaaaagcacacttgaggagctagggaactattttgaaaaatatatacaatatttaaagatacaaacagtagtgcttaaaaatactacataaagcattattttaaaggttatactggaaagtgcaattttaaaatgagtaaaacctctgtatttctgctggcattaagggttgatggtgttaccatgtatcatcatggcggtactattttttaaaagaaattaaacactggatctctccttaagccaacattgaaaagacttgccgcacttctgagtccaaacactggaaagctctcctttgccaccgttagccggggctcattctccatgtgccttagccttaaacatgcccccactcccacatctctcaccctgtcccctcctccccagattcccaatcccaccgcaatgtttggcaagcctaggactgataagtagctctgatagaggagctggtggcttttatacttcttcctgggtttttgttggggtttgttgtttcgttgttttttgtttttttttttgtttggttggggaagtattgtcttctacgtgtgctattttcagtagcagagtaagcacaaggttttaatcgagttgcataagacacctttgcatagctatttaattgcccaatgtaaaactttaatgccatttctaatgcttttattcatttttgaagtatgagtttgtagggacaaagaatgtatgttatcgtagacaagacccccagagactcttttcagcagaaagttatgcttctagttgccttaccatgtttcttgcaaaactgtccatggtcctcaagggtgttggaaacattatgtttattaaatgggcctctcttcctttgctgtgcacttgatgggtgaactggattggggtgtgcacatccaggaggaggaggagagacctgtagaagtttaaagatagtttgtaaatatcttctaatgcttgtttttagtccttttatgttggagaagttcatggtatgtagtttaatgcaaaatgaaaccattttatttcaatgttattaaaaaggtttgttttattaggaagttaatgtattgttgcagtgttttgtgcctgtttaaaggcttttgtttagcagagtgaatgtaaaatacagtaaaatgttaagattgtcatctactttttaaaaaaaaatatcaacttggaattgttttttaaaggctcaatcaaggaagtgaggtgtgcaataaggtagcaagtaaaacgcagttgcgtttttatgtcatgttagagatccatacaattttccactcacgggatttttgttgatggctgaattcttgtggattcataagaggatcatgcccttagcaagtacttttgttttgttttaaattaagagattcccaaatgcctttttccccctcatcttgaaatgagatgagtttttatgtgtaagcaatatttatttaactattctataaaattattgagtgcctactgaggcctttaagcaccgctaacattcctttccatcattcttttaaatgacataaaataattgtgcaatgttcctgatgatgtaccccacaagctgcattcaaactcaaatctgtgggaatgagtgactcgacaaaatgtaattcggatcagatcctcatcccctgactgtgtgaaaaaagtactctccttctagtgaaggattgtcacagagtttcactggatgaaactatgacccagtattcttactgtattttacatatgcctgtaaattatttgcaaaaaagaagaagaagaggaagaaagaaaagaaagaaaagaaagaaagaaagaaagaaagaaagaaagaaagaaagaaagaaagaaagaaagaaagaaaaagaaagaaagaataaaaaaaaatgataacatggcaaccaccaaactcccttaaaaacaaacattggtgacatggccaattaagtatcagtgagcctcctatctgggacttatctgttcctattgtttcaaaaccatttcatgtacactactgaggtaagtttataacttgaaatgtgaactttttttttttttagtgttaagaacaaactatataaatgtaaaaaaaaagttttagagttctgttttcaaacattgctagtggtttagttaactttagctgctttatatttgaaaagcttttatttagatcttgctccatttacagtacattcttaggatgtatgtagtaaataaagctttctttaaagcaatcgcaagacctta

SEQ ID NO: 3723 - protein, 156 aa, Homo sapiens
MTAEDSTAAMSSDSAAGSSAKVPEGVAGAPNEAALLALMERTGYSMVQENGQRKYGGPPPGWEGPHPQRGCEVFVGKIPRDVYEDELVPVFEAVGRIYELRLMMDFDGKNRGYAFVMYCHKHEAKRAVRELNNYEIRPGRLSFPLCRRHHLSRAAQ

SEQ ID NO: 3724 - DNA, 4633 bp, Homo sapiens
cgttgccagagtgtgggaggagagagcaagcagggaaagagagcgccaggtgcttagcaggatttgcctcaaagggcactgcaaaaattgaacagaggaatcccaaggaagctgcctgaatttgcctgtatactctcgttctgcgacttataaaggaccagacaaatcaaattagtggttttggtttccgccagctgtggatgcctttgacattatgaccgcagaggattccaccgcagccatgagcagtgactcggccgccgggtcctccgccaaggtgcccgagggcgtggcgggcgcgcccaacgaggcagcactgctggcgctgatggagcgcacgggctacagcatggtgcaagagaacgggcagcgcaagtacggcggcccaccgcccggctgggagggcccgcacccgcagcgtggctgcgaggtcttcgtgggcaagatcccgcgcgacgtgtacgaggacgagctggtgcccgtgttcgaggccgtgggccgcatctacgagctgcgcctcatgatggactttgacggcaagaaccgcggctacgccttcgtcatgtactgccacaagcacgaggccaagcgcgcagtgcgtgagctcaacaactacgagatccgcccgggccgcctgctcggcgtgtgctgcagcgtggacaactgccgcctcttcatcggcgggatccccaagatgaagaagcgcgaggaaatcctggaggagattgccaaggtcaccgagggcgtgctggacgtgatcgtctacgccagcgcggccgacaagatgaagaaccgcggcttcgccttcgtggagtacgagagccaccgcgcggctgccatggctcgccgcaagctcatgcctggccgcatccagctgtggggccaccagatcgccgtggactgggccgaacctgagatcgacgtggacgaggacgtgatggagaccgtgaagatcctctacgtgcgcaacctcatgatcgagaccaccgaggacaccatcaagaagagcttcggccagttcaaccccggctgcgtggagcgcgtcaagaagatccgcgactacgccttcgtgcacttcaccagccgcgaggatgccgtgcatgccatgaacaacctcaacggcactgagctggagggctcgtgcctggaggtcacgctggccaagcccgtggacaaggagcagtactcgcgctaccagaaggcagccaggggcggcggcgcggctgaggcagcgcagcagcccagctacgtgtactcctgcgacccctacacactggcctactacggctacccctacaacgcgctcattgggcccaacagggactactttgtgaaagcaggcagcataagaggccgagggcgaggtgcagctggcaacagagccccagggcctaggggttcctacctcgggggatattctgctggtcgtggtatatatagccgatatcatgaagggaaaggaaagcagcaagaaaaaggatatgaactggtgccgaatttggaaatccctaccgtcaacccagttgccattaaacctggtacagtagccatccctgccattggggctcagtattccatgtttccagcagctccagcccctaaaatgattgaagatggcaaaatccacacagtggagcacatgatcagccccattgctgtgcagccagacccagccagtgctgctgccgccgcagccgcggccgcagccgccgcagccgctgtcattcccactgtgtcgacgccaccacctttccagggccgcccaataactccagtatacacggtggctccaaacgttcagagaattcctactgccgggatctacggggccagttacgtgccatttgctgctccagctacagccacgatcgccacactacagaagaacgcggcagccgcggccgccatgtatggaggatacgcaggctacatacctcaggccttccctgctgctgccattcaggtccccatccccgacgtctaccagacatactgaggctggtgaccagcacgaagacagaccacacaaacaccactgaaggaacgcttgactatttatgaagaaggaacatgttggattcacacatgcaacctgaaagtgaagaatgttagcagatttatttctgaattattttatatacatgaagttttcactagttttttaagactattttcaacttagcatgcctacgttcatacatttccaaaagacttgcaatggttcgtgccttcattccatcttttaaaaatttgtatgctgtactacatttgtatagaggtttttgttgttgtttttttaaggatatattttcagtatgaaggttattttcttaacttctgcactccagagatttctattttgtagtaccttcaataatatatcaactatatattaaaaaagcacacttgaggagctagggaactattttgaaaaatatatacaatatttaaagatacaaacagtagtgcttaaaaatactacataaagcattattttaaaggttatactggaaagtgcaattttaaaatgagtaaaacctctgtatttctgctggcattaagggttgatggtgttaccatgtatcatcatggcggtactattttttaaaagaaattaaacactggatctctccttaagccaacattgaaaagacttgccgcacttctgagtccaaacactggaaagctctcctttgccaccgttagccggggctcattctccatgtgccttagccttaaacatgcccccactcccacatctctcaccctgtcccctcctccccagattcccaatcccaccgcaatgtttggcaagcctaggactgataagtagctctgatagaggagctggtggcttttatacttcttcctgggtttttgttggggtttgttgtttcgttgttttttgtttttttttttgtttggttggggaagtattgtcttctacgtgtgctattttcagtagcagagtaagcacaaggttttaatcgagttgcataagacacctttgcatagctatttaattgcccaatgtaaaactttaatgccatttctaatgcttttattcatttttgaagtatgagtttgtagggacaaagaatgtatgttatcgtagacaagacccccagagactcttttcagcagaaagttatgcttctagttgccttaccatgtttcttgcaaaactgtccatggtcctcaagggtgttggaaacattatgtttattaaatgggcctctcttcctttgctgtgcacttgatgggtgaactggattggggtgtgcacatccaggaggaggaggagagacctgtagaagtttaaagatagtttgtaaatatcttctaatgcttgtttttagtccttttatgttggagaagttcatggtatgtagtttaatgcaaaatgaaaccattttatttcaatgttattaaaaaggtttgttttattaggaagttaatgtattgttgcagtgttttgtgcctgtttaaaggcttttgtttagcagagtgaatgtaaaatacagtaaaatgttaagattgtcatctactttttaaaaaaaaatatcaacttggaattgttttttaaaggctcaatcaaggaagtgaggtgtgcaataaggtagcaagtaaaacgcagttgcgtttttatgtcatgttagagatccatacaattttccactcacgggatttttgttgatggctgaattcttgtggattcataagaggatcatgcccttagcaagtacttttgttttgttttaaattaagagattcccaaatgcctttttccccctcatcttgaaatgagatgagtttttatgtgtaagcaatatttatttaactattctataaaattattgagtgcctactgaggcctttaagcaccgctaacattcctttccatcattcttttaaatgacataaaataattgtgcaatgttcctgatgatgtaccccacaagctgcattcaaactcaaatctgtgggaatgagtgactcgacaaaatgtaattcggatcagatcctcatcccctgactgtgtgaaaaaagtactctccttctagtgaaggattgtcacagagtttcactggatgaaactatgacccagtattcttactgtattttacatatgcctgtaaattatttgcaaaaaagaagaagaagaggaagaaagaaaagaaagaaaagaaagaaagaaagaaagaaagaaagaaagaaagaaagaaagaaagaaagaaagaaagaaaaagaaagaaagaataaaaaaaaatgataacatggcaaccaccaaactcccttaaaaacaaacattggtgacatggccaattaagtatcagtgagcctcctatctgggacttatctgttcctattgtttcaaaaccatttcatgtacactactgaggtaagtttataacttgaaatgtgaactttttttttttttagtgttaagaacaaactatataaatgtaaaaaaaaagttttagagttctgttttcaaacattgctagtggtttagttaactttagctgctttatatttgaaaagcttttatttagatcttgctccatttacagtacattcttaggatgtatgtagtaaataaagctttctttaaagcaatcgcaagacctta

SEQ ID NO: 3725 - protein, 593 aa, Homo sapiens
MTAEDSTAAMSSDSAAGSSAKVPEGVAGAPNEAALLALMERTGYSMVQENGQRKYGGPPPGWEGPHPQRGCEVFVGKIPRDVYEDELVPVFEAVGRIYELRLMMDFDGKNRGYAFVMYCHKHEAKRAVRELNNYEIRPGRLLGVCCSVDNCRLFIGGIPKMKKREEILEEIAKVTEGVLDVIVYASAADKMKNRGFAFVEYESHRAAAMARRKLMPGRIQLWGHQIAVDWAEPEIDVDEDVMETVKILYVRNLMIETTEDTIKKSFGQFNPGCVERVKKIRDYAFVHFTSREDAVHAMNNLNGTELEGSCLEVTLAKPVDKEQYSRYQKAARGGGAAEAAQQPSYVYSCDPYTLAYYGYPYNALIGPNRDYFVKAGSIRGRGRGAAGNRAPGPRGSYLGGYSAGRGIYSRYHEGKGKQQEKGYELVPNLEIPTVNPVAIKPGTVAIPAIGAQYSMFPAAPAPKMIEDGKIHTVEHMISPIAVQPDPASAAAAAAAAAAAAAAVIPTVSTPPPFQGRPITPVYTVAPNVQRIPTAGIYGASYVPFAAPATATIATLQKNAAAAAAMYGGYAGYIPQAFPAAAIQVPIPDVYQTY

SEQ ID NO: 3726 - DNA, 4473 bp, Homo sapiens
agtcagacccaggaggagtgaggtcaattgccctttagtcccaggactaaccggaagcttctgcaacaggaggacattgaaaataagatggaacccatccacataaggatttgcctcaaagggcactgcaaaaattgaacagaggaatcccaaggaagctgcctgaatttgcctgtatactctcgttctgcgacttataaaggaccagacaaatcaaattagtggttttggtttccgccagctgtggatgcctttgacattatgaccgcagaggattccaccgcagccatgagcagtgactcggccgccgggtcctccgccaaggtgcccgagggcgtggcgggcgcgcccaacgaggcagcactgctggcgctgatggagcgcacgggctacagcatggtgcaagagaacgggcagcgcaagtacggcggcccaccgcccggctgggagggcccgcacccgcagcgtggctgcgaggtcttcgtgggcaagatcccgcgcgacgtgtacgaggacgagctggtgcccgtgttcgaggccgtgggccgcatctacgagctgcgcctcatgatggactttgacggcaagaaccgcggctacgccttcgtcatgtactgccacaagcacgaggccaagcgcgcagtgcgtgagctcaacaactacgagatccgcccgggccgcctgctcggcgtgtgctgcagcgtggacaactgccgcctcttcatcggcgggatccccaagatgaagaagcgcgaggaaatcctggaggagattgccaaggtcaccgagggcgtgctggacgtgatcgtctacgccagcgcggccgacaagatgaagaaccgcggcttcgccttcgtggagtacgagagccaccgcgcggctgccatggctcgccgcaagctcatgcctggccgcatccagctgtggggccaccagatcgccgtggactgggccgaacctgagatcgacgtggacgaggacgtgatggagaccgtgaagatcctctacgtgcgcaacctcatgatcgagaccaccgaggacaccatcaagaagagcttcggccagttcaaccccggctgcgtggagcgcgtcaagaagatccgcgactacgccttcgtgcacttcaccagccgcgaggatgccgtgcatgccatgaacaacctcaacggcactgagctggagggctcgtgcctggaggtcacgctggccaagcccgtggacaaggagcagtactcgcgctaccagaaggcagccaggggcggcggcgcggctgaggcagcgcagcagcccagctacgtgtactcctgcgacccctacacactggcctactacggctacccctacaacgcgctcattgggcccaacagggactactttgtgaaagtagccatccctgccattggggctcagtattccatgtttccagcagctccagcccctaaaatgattgaagatggcaaaatccacacagtggagcacatgatcagccccattgctgtgcagccagacccagccagtgctgctgccgccgcagccgcggccgcagccgccgcagccgctgtcattcccactgtgtcgacgccaccacctttccagggccgcccaataactccagtatacacggtggctccaaacgttcagagaattcctactgccgggatctacggggccagttacgtgccatttgctgctccagctacagccacgatcgccacactacagaagaacgcggcagccgcggccgccatgtatggaggatacgcaggctacatacctcaggccttccctgctgctgccattcaggtccccatccccgacgtctaccagacatactgaggctggtgaccagcacgaagacagaccacacaaacaccactgaaggaacgcttgactatttatgaagaaggaacatgttggattcacacatgcaacctgaaagtgaagaatgttagcagatttatttctgaattattttatatacatgaagttttcactagttttttaagactattttcaacttagcatgcctacgttcatacatttccaaaagacttgcaatggttcgtgccttcattccatcttttaaaaatttgtatgctgtactacatttgtatagaggtttttgttgttgtttttttaaggatatattttcagtatgaaggttattttcttaacttctgcactccagagatttctattttgtagtaccttcaataatatatcaactatatattaaaaaagcacacttgaggagctagggaactattttgaaaaatatatacaatatttaaagatacaaacagtagtgcttaaaaatactacataaagcattattttaaaggttatactggaaagtgcaattttaaaatgagtaaaacctctgtatttctgctggcattaagggttgatggtgttaccatgtatcatcatggcggtactattttttaaaagaaattaaacactggatctctccttaagccaacattgaaaagacttgccgcacttctgagtccaaacactggaaagctctcctttgccaccgttagccggggctcattctccatgtgccttagccttaaacatgcccccactcccacatctctcaccctgtcccctcctccccagattcccaatcccaccgcaatgtttggcaagcctaggactgataagtagctctgatagaggagctggtggcttttatacttcttcctgggtttttgttggggtttgttgtttcgttgttttttgtttttttttttgtttggttggggaagtattgtcttctacgtgtgctattttcagtagcagagtaagcacaaggttttaatcgagttgcataagacacctttgcatagctatttaattgcccaatgtaaaactttaatgccatttctaatgcttttattcatttttgaagtatgagtttgtagggacaaagaatgtatgttatcgtagacaagacccccagagactcttttcagcagaaagttatgcttctagttgccttaccatgtttcttgcaaaactgtccatggtcctcaagggtgttggaaacattatgtttattaaatgggcctctcttcctttgctgtgcacttgatgggtgaactggattggggtgtgcacatccaggaggaggaggagagacctgtagaagtttaaagatagtttgtaaatatcttctaatgcttgtttttagtccttttatgttggagaagttcatggtatgtagtttaatgcaaaatgaaaccattttatttcaatgttattaaaaaggtttgttttattaggaagttaatgtattgttgcagtgttttgtgcctgtttaaaggcttttgtttagcagagtgaatgtaaaatacagtaaaatgttaagattgtcatctactttttaaaaaaaaatatcaacttggaattgttttttaaaggctcaatcaaggaagtgaggtgtgcaataaggtagcaagtaaaacgcagttgcgtttttatgtcatgttagagatccatacaattttccactcacgggatttttgttgatggctgaattcttgtggattcataagaggatcatgcccttagcaagtacttttgttttgttttaaattaagagattcccaaatgcctttttccccctcatcttgaaatgagatgagtttttatgtgtaagcaatatttatttaactattctataaaattattgagtgcctactgaggcctttaagcaccgctaacattcctttccatcattcttttaaatgacataaaataattgtgcaatgttcctgatgatgtaccccacaagctgcattcaaactcaaatctgtgggaatgagtgactcgacaaaatgtaattcggatcagatcctcatcccctgactgtgtgaaaaaagtactctccttctagtgaaggattgtcacagagtttcactggatgaaactatgacccagtattcttactgtattttacatatgcctgtaaattatttgcaaaaaagaagaagaagaggaagaaagaaaagaaagaaaagaaagaaagaaagaaagaaagaaagaaagaaagaaagaaagaaagaaagaaagaaagaaaaagaaagaaagaataaaaaaaaatgataacatggcaaccaccaaactcccttaaaaacaaacattggtgacatggccaattaagtatcagtgagcctcctatctgggacttatctgttcctattgtttcaaaaccatttcatgtacactactgaggtaagtttataacttgaaatgtgaactttttttttttttagtgttaagaacaaactatataaatgtaaaaaaaaagttttagagttctgttttcaaacattgctagtggtttagttaactttagctgctttatatttgaaaagcttttatttagatcttgctccatttacagtacattcttaggatgtatgtagtaaataaagctttctttaaagcaatcgcaagacctta

SEQ ID NO: 3727 - protein, 524 aa, Homo sapiens; identical to SEQ ID NO: 429

SEQ ID NO: 3728 - DNA, 5367 bp, Homo sapiens
gcagactagacgctgagcgctcccgtgcgcagcgccccacgcagccgggacgcggcgccgctctgcgggtggaaccgccgcgcgctcccggcctcgggagctgagcccgagagaacttcgctgccttcgggtcgccgctcccgctttccactgtggaatgtgcagcttgggatagagagaaaccagggtttggggagcggtcctcctggagactttctctctgcaagtctccaaggttaagcaattctgacccactggaattcccagagcctgggagttaagcctaaaacgctctgttgctttaagcggcgcggtggggagtcgctggacactccttattttggttttacattaaaaagaaggcggacgagaagatgttgtaggtgacttcctagctgtgttaagttgctcctgggctgtgaatggtgttaatttctgaagtgggcggctccaaaaacttaacaaggaaagctcaggtaacggaggccttggaaagagactctgcgtcaggtcacccagcagagatcagcaatccttggctcactgaggaggtttggatttgcctcaaagggcactgcaaaaattgaacagaggaatcccaaggaagctgcctgaatttgcctgtatactctcgttctgcgacttataaaggaccagacaaatcaaattagtggttttggtttccgccagctgtggatgcctttgacattatgaccgcagaggattccaccgcagccatgagcagtgactcggccgccgggtcctccgccaaggtgcccgagggcgtggcgggcgcgcccaacgaggcagcactgctggcgctgatggagcgcacgggctacagcatggtgcaagagaacgggcagcgcaagtacggcggcccaccgcccggctgggagggcccgcacccgcagcgtggctgcgaggtcttcgtgggcaagatcccgcgcgacgtgtacgaggacgagctggtgcccgtgttcgaggccgtgggccgcatctacgagctgcgcctcatgatggactttgacggcaagaaccgcggctacgccttcgtcatgtactgccacaagcacgaggccaagcgcgcagtgcgtgagctcaacaactacgagatccgcccgggccgcctgctcggcgtgtgctgcagcgtggacaactgccgcctcttcatcggcgggatccccaagatgaagaagcgcgaggaaatcctggaggagattgccaaggtcaccgagggcgtgctggacgtgatcgtctacgccagcgcggccgacaagatgaagaaccgcggcttcgccttcgtggagtacgagagccaccgcgcggctgccatggctcgccgcaagctcatgcctggccgcatccagctgtggggccaccagatcgccgtggactgggccgaacctgagatcgacgtggacgaggacgtgatggagaccgtgaagatcctctacgtgcgcaacctcatgatcgagaccaccgaggacaccatcaagaagagcttcggccagttcaaccccggctgcgtggagcgcgtcaagaagatccgcgactacgccttcgtgcacttcaccagccgcgaggatgccgtgcatgccatgaacaacctcaacggcactgagctggagggctcgtgcctggaggtcacgctggccaagcccgtggacaaggagcagtactcgcgctaccagaaggcagccaggggcggcggcgcggctgaggcagcgcagcagcccagctacgtgtactcctgcgacccctacacactggcctactacggctacccctacaacgcgctcattgggcccaacagggactactttgtgaaagatacaatcctagaaactcaccctgcaagtttgcctcttgtactaagaagacatgcttaggatgcaaatctaggctgaaatagaatgttggaagcatctttaccagcctattaaagagcaaaggtgtagccacctgcaattaagactggggcagttaaatgccgagaaccgagggctgaggtctgcctccagcaccgtcactgttggttgctgatcatcttttgtgttgttattacaagcaggcagcataagaggccgagggcgaggtgcagctggcaacagagccccagggcctaggggttcctacctcgggggatattctgctggtcgtggtatatatagccgatatcatgaagggaaaggaaagcagcaagaaaaaggatatgaactggtgccgaatttggaaatccctaccgtcaacccagttgccattaaacctggtacagtagccatccctgccattggggctcagtattccatgtttccagcagctccagcccctaaaatgattgaagatggcaaaatccacacagtggagcacatgatcagccccattgctgtgcagccagacccagccagtgctgctgccgccgcagccgcggccgcagccgccgcagccgctgtcattcccactgtgtcgacgccaccacctttccagggccgcccaataactccagtatacacggtggctccaaacgttcagagaattcctactgccgggatctacggggccagttacgtgccatttgctgctccagctacagccacgatcgccacactacagaagaacgcggcagccgcggccgccatgtatggaggatacgcaggctacatacctcaggccttccctgctgctgccattcaggtccccatccccgacgtctaccagacatactgaggctggtgaccagcacgaagacagaccacacaaacaccactgaaggaacgcttgactatttatgaagaaggaacatgttggattcacacatgcaacctgaaagtgaagaatgttagcagatttatttctgaattattttatatacatgaagttttcactagttttttaagactattttcaacttagcatgcctacgttcatacatttccaaaagacttgcaatggttcgtgccttcattccatcttttaaaaatttgtatgctgtactacatttgtatagaggtttttgttgttgtttttttaaggatatattttcagtatgaaggttattttcttaacttctgcactccagagatttctattttgtagtaccttcaataatatatcaactatatattaaaaaagcacacttgaggagctagggaactattttgaaaaatatatacaatatttaaagatacaaacagtagtgcttaaaaatactacataaagcattattttaaaggttatactggaaagtgcaattttaaaatgagtaaaacctctgtatttctgctggcattaagggttgatggtgttaccatgtatcatcatggcggtactattttttaaaagaaattaaacactggatctctccttaagccaacattgaaaagacttgccgcacttctgagtccaaacactggaaagctctcctttgccaccgttagccggggctcattctccatgtgccttagccttaaacatgcccccactcccacatctctcaccctgtcccctcctccccagattcccaatcccaccgcaatgtttggcaagcctaggactgataagtagctctgatagaggagctggtggcttttatacttcttcctgggtttttgttggggtttgttgtttcgttgttttttgtttttttttttgtttggttggggaagtattgtcttctacgtgtgctattttcagtagcagagtaagcacaaggttttaatcgagttgcataagacacctttgcatagctatttaattgcccaatgtaaaactttaatgccatttctaatgcttttattcatttttgaagtatgagtttgtagggacaaagaatgtatgttatcgtagacaagacccccagagactcttttcagcagaaagttatgcttctagttgccttaccatgtttcttgcaaaactgtccatggtcctcaagggtgttggaaacattatgtttattaaatgggcctctcttcctttgctgtgcacttgatgggtgaactggattggggtgtgcacatccaggaggaggaggagagacctgtagaagtttaaagatagtttgtaaatatcttctaatgcttgtttttagtccttttatgttggagaagttcatggtatgtagtttaatgcaaaatgaaaccattttatttcaatgttattaaaaaggtttgttttattaggaagttaatgtattgttgcagtgttttgtgcctgtttaaaggcttttgtttagcagagtgaatgtaaaatacagtaaaatgttaagattgtcatctactttttaaaaaaaaatatcaacttggaattgttttttaaaggctcaatcaaggaagtgaggtgtgcaataaggtagcaagtaaaacgcagttgcgtttttatgtcatgttagagatccatacaattttccactcacgggatttttgttgatggctgaattcttgtggattcataagaggatcatgcccttagcaagtacttttgttttgttttaaattaagagattcccaaatgcctttttccccctcatcttgaaatgagatgagtttttatgtgtaagcaatatttatttaactattctataaaattattgagtgcctactgaggcctttaagcaccgctaacattcctttccatcattcttttaaatgacataaaataattgtgcaatgttcctgatgatgtaccccacaagctgcattcaaactcaaatctgtgggaatgagtgactcgacaaaatgtaattcggatcagatcctcatcccctgactgtgtgaaaaaagtactctccttctagtgaaggattgtcacagagtttcactggatgaaactatgacccagtattcttactgtattttacatatgcctgtaaattatttgcaaaaaagaagaagaagaggaagaaagaaaagaaagaaaagaaagaaagaaagaaagaaagaaagaaagaaagaaagaaagaaagaaagaaagaaagaaaaagaaagaaagaataaaaaaaaatgataacatggcaaccaccaaactcccttaaaaacaaacattggtgacatggccaattaagtatcagtgagcctcctatctgggacttatctgttcctattgtttcaaaaccatttcatgtacactactgaggtaagtttataacttgaaatgtgaactttttttttttttagtgttaagaacaaactatataaatgtaaaaaaaaagttttagagttctgttttcaaacattgctagtggtttagttaactttagctgctttatatttgaaaagcttttatttagatcttgctccatttacagtacattcttaggatgtatgtagtaaataaagctttctttaaagcaatcgcaagacctta

SEQ ID NO: 3729 - protein, 393 aa, Homo sapiens
MTAEDSTAAMSSDSAAGSSAKVPEGVAGAPNEAALLALMERTGYSMVQENGQRKYGGPPPGWEGPHPQRGCEVFVGKIPRDVYEDELVPVFEAVGRIYELRLMMDFDGKNRGYAFVMYCHKHEAKRAVRELNNYEIRPGRLLGVCCSVDNCRLFIGGIPKMKKREEILEEIAKVTEGVLDVIVYASAADKMKNRGFAFVEYESHRAAAMARRKLMPGRIQLWGHQIAVDWAEPEIDVDEDVMETVKILYVRNLMIETTEDTIKKSFGQFNPGCVERVKKIRDYAFVHFTSREDAVHAMNNLNGTELEGSCLEVTLAKPVDKEQYSRYQKAARGGGAAEAAQQPSYVYSCDPYTLAYYGYPYNALIGPNRDYFVKDTILETHPASLPLVLRRHA

SEQ ID NO: 3730 - DNA, 1780 bp, Homo sapiens
ccagggcctaggggttcctacctcgggggatattctgctggtcgtggtatatatagccgatatcatgaagggaaaggaaaggccgcccaataactccagtatacacggtggctccaaacgttcagagaattcctactgccgggatctacggggccagttacgtgccatttgctgctccagctacagccacgatcgccacactacagaagaacgcggcagccgcggccgccatgtatggaggatacgcaggctacatacctcaggccttccctgctgctgccattcaggtccccatccccgacgtctaccagacatactgaggctggtgaccagcacgaagacagaccacacaaacaccactgaaggaacgcttgactatttatgaagaaggaacatgttggattcacacatgcaacctgaaagtgaagaatgttagcagatttatttctgaattattttatatacatgaagttttcactagttttttaagactattttcaacttagcatgcctacgttcatacatttccaaaagacttgcaatggttcgtgccttcattccatcttttaaaaatttgtatgctgtactacatttgtatagaggtttttgttgttgtttttttaaggatatattttcagtatgaaggttattttcttaacttctgcactccagagatttctattttgtagtaccttcaataatatatcaactatatattaaaaaagcacacttgaggagctagggaactattttgaaaaatatatacaatatttaaagatacaaacagtagtgcttaaaaatactacataaagcattattttaaaggttatactggaaagtgcaattttaaaatgagtaaaacctctgtatttctgctggcattaagggttgatggtgttaccatgtatcatcatggcggtactattttttaaaagaaattaaacactggatctctccttaagccaacattgaaaagacttgccgcacttctgagtccaaacactggaaagctctcctttgccaccgttagccggggctcattctccatgtgccttagccttaaacatgcccccactcccacatctctcaccctgtcccctcctccccagattcccaatcccaccgcaatgtttggcaagcctaggactgataagtagctctgatagaggagctggtggcttttatacttcttcctgggtttttgttggggtttgttgtttcgttgttttttgtttttttttttgtttggttggggaagtattgtcttctacgtgtgctattttcagtagcagagtaagcacaaggttttaatcgagttgcataagacacctttgcatagctatttaattgcccaatgtaaaactttaatgccatttctaatgcttttattcatttttgaagtatgagtttgtagggacaaagaatgtatgttatcgtagacaagacccccagagactcttttcagcagaaagttatgcttctagttgccttaccatgtttcttgcaaaactgtccatggtcctcaagggtgttggaaacattatgtttattaaatgggcctctcttcctttgctgtgcacttgatgggtgaactggattggggtgtgcacatccaggaggaggaggagagacctgtagaagtttaaagatagtttgtaaatatcttctaatgcttgtttttagtccttttatgttggagaagttcatggtatgtagtttaatgcaaaatgaaaccattttatttcaatgttattaaaaaggtttgttttattaggaagtt

SEQ ID NO: 3731 - protein, 106 aa, Homo sapiens; identical to SEQ ID NO: 3719

SEQ ID NO: 3732 - DNA, 1798 bp, Homo sapiens
cgtggacgaggacgtgatggagaccgtgaagatcctctacgtgcgcaacctcatgatcgagaccaccgaggacaccatcaagaagagcttcggccagttcaaccccggctgcgtggagcgcgtcaagaagatccgcgactacgccttcgtgcacttcaccagccgcgaggatgccgtgcatgccatttgctgctccagctacagccacgatcgccacactacagaagaacgcggcagccgcggccgccatgtatggaggatacgcaggctacatacctcaggccttccctgctgctgccattcaggtccccatccccgacgtctaccagacatactgaggctggtgaccagcacgaagacagaccacacaaacaccactgaaggaacgcttgactatttatgaagaaggaacatgttggattcacacatgcaacctgaaagtgaagaatgttagcagatttatttctgaattattttatatacatgaagttttcactagttttttaagactattttcaacttagcatgcctacgttcatacatttccaaaagacttgcaatggttcgtgccttcattccatcttttaaaaatttgtatgctgtactacatttgtatagaggtttttgttgttgtttttttaaggatatattttcagtatgaaggttattttcttaacttctgcactccagagatttctattttgtagtaccttcaataatatatcaactatatattaaaaaagcacacttgaggagctagggaactattttgaaaaatatatacaatatttaaagatacaaacagtagtgcttaaaaatactacataaagcattattttaaaggttatactggaaagtgcaattttaaaatgagtaaaacctctgtatttctgctggcattaagggttgatggtgttaccatgtatcatcatggcggtactattttttaaaagaaattaaacactggatctctccttaagccaacattgaaaagacttgccgcacttctgagtccaaacactggaaagctctcctttgccaccgttagccggggctcattctccatgtgccttagccttaaacatgcccccactcccacatctctcaccctgtcccctcctccccagattcccaatcccaccgcaatgtttggcaagcctaggactgataagtagctctgatagaggagctggtggcttttatacttcttcctgggtttttgttggggtttgttgtttcgttgttttttgtttttttttttgtttggttggggaagtattgtcttctacgtgtgctattttcagtagcagagtaagcacaaggttttaatcgagttgcataagacacctttgcatagctatttaattgcccaatgtaaaactttaatgccatttctaatgcttttattcatttttgaagtatgagtttgtagggacaaagaatgtatgttatcgtagacaagacccccagagactcttttcagcagaaagttatgcttctagttgccttaccatgtttcttgcaaaactgtccatggtcctcaagggtgttggaaacattatgtttattaaatgggcctctcttcctttgctgtgcacttgatgggtgaactggattggggtgtgcacatccaggaggaggaggagagacctgtagaagtttaaagatagtttgtaaatatcttctaatgcttgtttttagtccttttatgttggagaagttcatggtatgtagtttaatgcaaaatgaaaccattttatttcaatgttattaaaaaggtttgttttattaggaagtt

SEQ ID NO: 3733 - protein, 128 aa, Homo sapiens; identical to SEQ ID NO: 3721

SEQ ID NO: 3734 - DNA, 2169 bp, Homo sapiens
cctttgacattatgaccgcagaggattccaccgcagccatgagcagtgactcggccgccgggtcctccgccaaggtgcccgagggcgtggcgggcgcgcccaacgaggcagcactgctggcgctgatggagcgcacgggctacagcatggtgcaagagaacgggcagcgcaagtacggcggcccaccgcccggctgggagggcccgcacccgcagcgtggctgcgaggtcttcgtgggcaagatcccgcgcgacgtgtacgaggacgagctggtgcccgtgttcgaggccgtgggccgcatctacgagctgcgcctcatgatggactttgacggcaagaaccgcggctacgccttcgtcatgtactgccacaagcacgaggccaagcgcgcagtgcgtgagctcaacaactacgagatccgcccgggccgcctgtcattcccactgtgtcgacgccaccacctttccagggccgcccaataactccagtatacacggtggctccaaacgttcagagaattcctactgccgggatctacggggccagttacgtgccatttgctgctccagctacagccacgatcgccacactacagaagaacgcggcagccgcggccgccatgtatggaggatacgcaggctacatacctcaggccttccctgctgctgccattcaggtccccatccccgacgtctaccagacatactgaggctggtgaccagcacgaagacagaccacacaaacaccactgaaggaacgcttgactatttatgaagaaggaacatgttggattcacacatgcaacctgaaagtgaagaatgttagcagatttatttctgaattattttatatacatgaagttttcactagttttttaagactattttcaacttagcatgcctacgttcatacatttccaaaagacttgcaatggttcgtgccttcattccatcttttaaaaatttgtatgctgtactacatttgtatagaggtttttgttgttgtttttttaaggatatattttcagtatgaaggttattttcttaacttctgcactccagagatttctattttgtagtaccttcaataatatatcaactatatattaaaaaagcacacttgaggagctagggaactattttgaaaaatatatacaatatttaaagatacaaacagtagtgcttaaaaatactacataaagcattattttaaaggttatactggaaagtgcaattttaaaatgagtaaaacctctgtatttctgctggcattaagggttgatggtgttaccatgtatcatcatggcggtactattttttaaaagaaattaaacactggatctctccttaagccaacattgaaaagacttgccgcacttctgagtccaaacactggaaagctctcctttgccaccgttagccggggctcattctccatgtgccttagccttaaacatgcccccactcccacatctctcaccctgtcccctcctccccagattcccaatcccaccgcaatgtttggcaagcctaggactgataagtagctctgatagaggagctggtggcttttatacttcttcctgggtttttgttggggtttgttgtttcgttgttttttgtttttttttttgtttggttggggaagtattgtcttctacgtgtgctattttcagtagcagagtaagcacaaggttttaatcgagttgcataagacacctttgcatagctatttaattgcccaatgtaaaactttaatgccatttctaatgcttttattcatttttgaagtatgagtttgtagggacaaagaatgtatgttatcgtagacaagacccccagagactcttttcagcagaaagttatgcttctagttgccttaccatgtttcttgcaaaactgtccatggtcctcaagggtgttggaaacattatgtttattaaatgggcctctcttcctttgctgtgcacttgatgggtgaactggattggggtgtgcacatccaggaggaggaggagagacctgtagaagtttaaagatagtttgtaaatatcttctaatgcttgtttttagtccttttatgttggagaagttcatggtatgtagtttaatgcaaaatgaaaccattttatttcaatgttattaaaaaggtttgttttattaggaagtt

SEQ ID NO: 3735 - protein, 156 aa, Homo sapiens; identical to SEQ ID NO: 3723

SEQ ID NO: 3736 - DNA, 1976 bp, Homo sapiens
agagtgtgggaggagagagcaagcagggaaagagagcgccaggtgcttagcaggatttgcctcaaagggcactgcaaaaattgaacagaggaatcccaaggaagctgcctgaatttgcctgtatactctcgttctgcgacttataaaggaccagacaaatcaaattagtggttttggtttccgccagctgtggatgcctttgacattatgaccgcagaggattccaccgcagccatgagcatcattcccactgtgtcgacgccaccacctttccagggccgcccaataactccagtatacacggtggctccaaacgttcagagaattcctactgccgggatctacggggccagttacgtgccatttgctgctccagctacagccacgatcgccacactacagaagaacgcggcagccgcggccgccatgtatggaggatacgcaggctacatacctcaggccttccctgctgctgccattcaggtccccatccccgacgtctaccagacatactgaggctggtgaccagcacgaagacagaccacacaaacaccactgaaggaacgcttgactatttatgaagaaggaacatgttggattcacacatgcaacctgaaagtgaagaatgttagcagatttatttctgaattattttatatacatgaagttttcactagttttttaagactattttcaacttagcatgcctacgttcatacatttccaaaagacttgcaatggttcgtgccttcattccatcttttaaaaatttgtatgctgtactacatttgtatagaggtttttgttgttgtttttttaaggatatattttcagtatgaaggttattttcttaacttctgcactccagagatttctattttgtagtaccttcaataatatatcaactatatattaaaaaagcacacttgaggagctagggaactattttgaaaaatatatacaatatttaaagatacaaacagtagtgcttaaaaatactacataaagcattattttaaaggttatactggaaagtgcaattttaaaatgagtaaaacctctgtatttctgctggcattaagggttgatggtgttaccatgtatcatcatggcggtactattttttaaaagaaattaaacactggatctctccttaagccaacattgaaaagacttgccgcacttctgagtccaaacactggaaagctctcctttgccaccgttagccggggctcattctccatgtgccttagccttaaacatgcccccactcccacatctctcaccctgtcccctcctccccagattcccaatcccaccgcaatgtttggcaagcctaggactgataagtagctctgatagaggagctggtggcttttatacttcttcctgggtttttgttggggtttgttgtttcgttgttttttgtttttttttttgtttggttggggaagtattgtcttctacgtgtgctattttcagtagcagagtaagcacaaggttttaatcgagttgcataagacacctttgcatagctatttaattgcccaatgtaaaactttaatgccatttctaatgcttttattcatttttgaagtatgagtttgtagggacaaagaatgtatgttatcgtagacaagacccccagagactcttttcagcagaaagttatgcttctagttgccttaccatgtttcttgcaaaactgtccatggtcctcaagggtgttggaaacattatgtttattaaatgggcctctcttcctttgctgtgcacttgatgggtgaactggattggggtgtgcacatccaggaggaggaggagagacctgtagaagtttaaagatagtttgtaaatatcttctaatgcttgtttttagtccttttatgttggagaagttcatggtatgtagtttaatgcaaaatgaaaccattttatttcaatgttattaaaaaggtttgttttattaggaagtt

SEQ ID NO: 3737 - protein, 102 aa, Homo sapiens
MTAEDSTAAMSIIPTVSTPPPFQGRPITPVYTVAPNVQRIPTAGIYGASYVPFAAPATATIATLQKNAAAAAAMYGGYAGYIPQAFPAAAIQVPIPDVYQTY

SEQ ID NO: 3738 - DNA, 3456 bp, Homo sapiens
cgttgccagagtgtgggaggagagagcaagcagggaaagagagcgccaggtgcttagcaggatttgcctcaaagggcactgcaaaaattgaacagaggaatcccaaggaagctgcctgaatttgcctgtatactctcgttctgcgacttataaaggaccagacaaatcaaattagtggttttggtttccgccagctgtggatgcctttgacattatgaccgcagaggattccaccgcagccatgagcagtgactcggccgccgggtcctccgccaaggtgcccgagggcgtggcgggcgcgcccaacgaggcagcactgctggcgctgatggagcgcacgggctacagcatggtgcaagagaacgggcagcgcaagtacggcggcccaccgcccggctgggagggcccgcacccgcagcgtggctgcgaggtcttcgtgggcaagatcccgcgcgacgtgtacgaggacgagctggtgcccgtgttcgaggccgtgggccgcatctacgagctgcgcctcatgatggactttgacggcaagaaccgcggctacgccttcgtcatgtactgccacaagcacgaggccaagcgcgcagtgcgtgagctcaacaactacgagatccgcccgggccgcctgctcggcgtgtgctgcagcgtggacaactgccgcctcttcatcggcgggatccccaagatgaagaagcgcgaggaaatcctggaggagattgccaaggtcaccgagggcgtgctggacgtgatcgtctacgccagcgcggccgacaagatgaagaaccgcggcttcgccttcgtggagtacgagagccaccgcgcggctgccatggctcgccgcaagctcatgcctggccgcatccagctgtggggccaccagatcgccgtggactgggccgaacctgagatcgacgtggacgaggacgtgatggagaccgtgaagatcctctacgtgcgcaacctcatgatcgagaccaccgaggacaccatcaagaagagcttcggccagttcaaccccggctgcgtggagcgcgtcaagaagatccgcgactacgccttcgtgcacttcaccagccgcgaggatgccgtgcatgccatgaacaacctcaacggcactgagctggagggctcgtgcctggaggtcacgctggccaagcccgtggacaaggagcagtactcgcgctaccagaaggcagccaggggcggcggcgcggctgaggcagcgcagcagcccagctacgtgtactcctgcgacccctacacactggcctactacggctacccctacaacgcgctcattgggcccaacagggactactttgtgaaagcaggcagcataagaggccgagggcgaggtgcagctggcaacagagccccagggcctaggggttcctacctcgggggatattctgctggtcgtggtatatatagccgatatcatgaagggaaaggaaagcagcaagaaaaaggatatgaactggtgccgaatttggaaatccctaccgtcaacccagttgccattaaacctggtacagtagccatccctgccattggggctcagtattccatgtttccagcagctccagcccctaaaatgattgaagatggcaaaatccacacagtggagcacatgatcagccccattgctgtgcagccagacccagccagtgctgctgccgccgcagccgcggccgcagccgccgcagccgctgtcattcccactgtgtcgacgccaccacctttccagggccgcccaataactccagtatacacggtggctccaaacgttcagagaattcctactgccgggatctacggggccagttacgtgccatttgctgctccagctacagccacgatcgccacactacagaagaacgcggcagccgcggccgccatgtatggaggatacgcaggctacatacctcaggccttccctgctgctgccattcaggtccccatccccgacgtctaccagacatactgaggctggtgaccagcacgaagacagaccacacaaacaccactgaaggaacgcttgactatttatgaagaaggaacatgttggattcacacatgcaacctgaaagtgaagaatgttagcagatttatttctgaattattttatatacatgaagttttcactagttttttaagactattttcaacttagcatgcctacgttcatacatttccaaaagacttgcaatggttcgtgccttcattccatcttttaaaaatttgtatgctgtactacatttgtatagaggtttttgttgttgtttttttaaggatatattttcagtatgaaggttattttcttaacttctgcactccagagatttctattttgtagtaccttcaataatatatcaactatatattaaaaaagcacacttgaggagctagggaactattttgaaaaatatatacaatatttaaagatacaaacagtagtgcttaaaaatactacataaagcattattttaaaggttatactggaaagtgcaattttaaaatgagtaaaacctctgtatttctgctggcattaagggttgatggtgttaccatgtatcatcatggcggtactattttttaaaagaaattaaacactggatctctccttaagccaacattgaaaagacttgccgcacttctgagtccaaacactggaaagctctcctttgccaccgttagccggggctcattctccatgtgccttagccttaaacatgcccccactcccacatctctcaccctgtcccctcctccccagattcccaatcccaccgcaatgtttggcaagcctaggactgataagtagctctgatagaggagctggtggcttttatacttcttcctgggtttttgttggggtttgttgtttcgttgttttttgtttttttttttgtttggttggggaagtattgtcttctacgtgtgctattttcagtagcagagtaagcacaaggttttaatcgagttgcataagacacctttgcatagctatttaattgcccaatgtaaaactttaatgccatttctaatgcttttattcatttttgaagtatgagtttgtagggacaaagaatgtatgttatcgtagacaagacccccagagactcttttcagcagaaagttatgcttctagttgccttaccatgtttcttgcaaaactgtccatggtcctcaagggtgttggaaacattatgtttattaaatgggcctctcttcctttgctgtgcacttgatgggtgaactggattggggtgtgcacatccaggaggaggaggagagacctgtagaagtttaaagatagtttgtaaatatcttctaatgcttgtttttagtccttttatgttggagaagttcatggtatgtagtttaatgcaaaatgaaaccattttatttcaatgttattaaaaaggtttgttttattaggaagtt

SEQ ID NO: 3739 - protein, 593 aa, Homo sapiens; identical to SEQ ID NO: 3725

SEQ ID NO: 3740 - DNA, 1046 bp, Homo sapiens
gcagactagacgctgagcgctcccgtgcgcagcgccccacgcagccgggacgcggcgccgctctgcgggtggaaccgccgcgcgctcccggcctcgggagctgagcccgagagaacttcgctgccttcgggtcgccgctcccgctttccactgtggaatgtgcagcttgggatagagagaaaccagggtttggggagcggtcctcctggagactttctctctgcaagtctccaaggttaagcaattctgacccactggaattcccagagcctgggagttaagcctaaaacgctctgttgctttaagcggcgcggtggggagtcgctggacactccttattttggttttacattaaaaagaaggcggacgagaagatgttgtaggtgacttcctagctgtgttaagttgctcctgggctgtgaatggtgttaatttctgaagtgggcggctccaaaaacttaacaaggaaagctcaggtaacggaggccttggaaagagactctgcgtcaggtcacccagcagagatcagcaatccttggctcactgaggaggtttggatttgcctcaaagggcactgcaaaaattgaacagaggaatcccaaggaagctgcctgaatttgcctgtatactctcgttctgcgacttataaaggaccagacaaatcaaattagtggttttggtttccgccagctgtggatgcctttgacattatgaccgcagaggattccaccgcagccatgagcagtgactcggccgccgggtcctccgccaaggtgcccgagggcgtggcgggcgcgcccaacgaggcagcactgctggcgctgatggagcgcacgggctacagcatggtgcaagagaacgggcagcgcaagtacggcggcccaccgcccggctgggagggcccgcacccgcagcgtggctgcgaggtcttcgtgggcaagatcccgcgcgacgtgtacgaggacgagctggtgcccgtgttcgaggccgtgggccgcatctacgagctgcgcctcatgatggactttgacggcaagaaccgcggc

SEQ ID NO: 3741 - protein, 54 aa, Homo sapiens
MVLISEVGGSKNLTRKAQVTEALERDSASGHPAEISNPWLTEEVWICLKGHCKN

SEQ ID NO: 3742 - DNA, 899 bp, Homo sapiens
ataaacaggtaaggcggagggggtggggcgcggattgcggacatctgggtttcttgggaattgggatggggtgggggttcgagccaactccccagagagcaggcaaggtgaagcgagggcttggctgctgtttctaaatgcagtgtttttttgttccctttctagaaaccctccgtaactctaggtcagagcgcactaaaatgagccacttctgaacgagcagcgcccaggccccaggccctgctgcgaaggccccggcaaaggtcagggccccgtccgcgtgacgctcctgcctgcgcgcggccaagccatgctcggccccagctcaggtaacggaggccttggaaagagactctgcgtcaggtcacccagcagagatcagcaatccttggctcactgaggaggtttggatttgcctcaaagggcactgcaaaaattgaacagaggaatcccaaggaagctgcctgaatttgcctgtatactctcgttctgcgacttataaaggaccagacaaatcaaattagtggttttggtttccgccagctgtggatgcctttgacattatgaccgcagaggattccaccgcagccatgagcagtgactcggccgccgggtcctccgccaaggtgcccgagggcgtggcgggcgcgcccaacgaggcagcactgctggcgctgatggagcgcacgggctacagcatggtgcaagagaacgggcagcgcaagtacggcggcccaccgcccggctgggagggcccgcacccgcagcgtggctgcgaggtcttcgtgggcaagatcccgcgcgacgtgtacgaggacgagctggtgcccgtgttcgaggccgtgggccgcatctacgagctgcgcctcatgatggactttgacggcaagaaccgcggc

SEQ ID NO: 3743 - protein, 111 aa, Homo sapiens
MTAEDSTAAMSSDSAAGSSAKVPEGVAGAPNEAALLALMERTGYSMVQENGQRKYGGPPPGWEGPHPQRGCEVFVGKIPRDVYEDELVPVFEAVGRIYELRLMMDFDGKNR

SEQ ID NO: 3744 - DNA, 6170 bp, Homo sapiens
ggatcgggagaccattatgggatggggaagcctttaccatacctaggcctgggaggttgagtgggacaagaggagatgaggaaccttctggaaaccccctaaccacctgcaggaagggacgagataaataaatgcacgtctctcttcagctcactgaccatctgcctacctcccgttaatggaaccgcgactcacagcaagtaactggcagaagttttggtgataaagattttcggacaggtttagaaaatggaatcctcctctgcgagttgctgaatgctataaagccaggacttgttaaaaagatcaatagattgcctacccccattgcaggactggacaatattatcttattcttgagaggttgtaaagagctcggccttaaagaatctcaactttttgacccgagtgacctccaggatacatccaacagagtaacagtcaagagccttgattatagtaggaagctgaaaaatgtattagttaccatttactggctgggaaaagcagcaaacagctgcacatcctacagcggaacgacactaaacctgaaggagtttgaaggattgttggctcagatgcgaaaggacactgatgacattgaaagtcctaaacgcagtatccgagacagtggctacatcgactgctgggattccgagcgcagcgactccctctctcctcctcgccacggcagagatgattccttcgacagcctggattcctttggctctcgctctcggcagacgccttcaccagatgtagtcctcaggggaagcagcgatgggagaggaagcgactctgaatccgacttgcctcatcggaagctgccagatgtgaagaaggatgacatgtctgcacggcggacttcccatggtgagccgaaatcagcagtgccttttaaccagtacctcccgaacaaaagcaatcagacggcctacgtccccgcgcctctgagaaagaagaaagcagagagagaggaataccgcaagagctggagtaccgccacctccccgctgggtggggagaggcccttcaggagcaccagcatgtttgacatgcggtgtgaggaggaggccgcggtgcagccgcacagcagggcccgccaggagcagctgcagctgataaataaccagctgagggaagaggacgacaaatggcaagatgacctggctcgttggaagagtcgtagaagaagtgtttctcaggacttaatcaagaaagaggaagaaaggaaaaaaatggagaagttactggctggagaagatgggacaagtgaacgaaggaaaagcatcaaaacctacagagaaattgttcaagaaaaagagcggagagagagagagctgcatgaagcatataagaacgctcggtcccaggaggaggcagaggggatccttcaacagtacattgagaggttcaccatcagtgaggctgttctcgaacgcttggagatgccaaaaattctggaaagaagccattcaacagagccaaatttatcctccttcctgaatgaccccaatcccatgaaatacctgcggcaacagtcactgcctccacccaaattcactgccactgttgaaaccaccattgctcgtgccagtgttctggataccagcatgtcagcaggcagtgggtctccaagcaaaactgtcactcccaaagcagtgcctatgctgacacccaagccttactcccagcccaaaaattctcaagatgttctgaagacctttaaggtagacgggaaagtcagtgtgaatggagagacggttcatagagaggaggagaaggaaagagagtgtcccacggtggcacctgcccactccttaaccaaatcccagatgtttgaaggtgtggccagagtgcacgggtctccactggagctgaaacaagacaacggtagcatcgagatcaacataaagaagccaaactctgttccccaagagctcgcagcaaccactgagaaaacggaaccgaatagtcaagaggacaagaatgatggtggaaaatcaagaaaagggaatatagaacttgcctcatcagaaccacagcattttacaacaactgtgactcgatgcagcccgaccgtggcctttgtggaatttccctccagcccccagctgaagaatgatgtgtcggaagaaaaagaccagaagaaaccagaaaatgaaatgagtggaaaggtggagttggtgctgtcacaaaaggtggtaaagccaaaatctccagaacccgaagcaacgctgacatttccatttctggacaaaatgcctgaagccaaccaactacatttgccaaatctcaattctcaagagtcgcctggcactgccagtgttccgcttagagttcagaactcttggcgacgatcccagtttttctcccagtcagtggattctccaagcagtgagaagtcacctgttatgacaccttttaagttctgggcatgggacccagaagaggagcgcaggcgacaggaaaaatggcaacaggaacaggaacgtttgctccaggagagataccagaaggagcaggacaagctgaaagaagagtgggaaaaggcccaaaaggaggtggaagaggaagaacgcagatactatgaggaggagcgtaagataattgaagacactgtggttccatttactgtttcttcaagttccgctgaccagctgtctacctcttcctccatgactgaaggcagtgggacaatgaataagatagacctgggaaactgtcaagatgaaaaacaagacagaagatggaagaaatcattccagggagatgacagtgacttattgctgaagactagggaaagtgatcgactggaggagaagggcagcctaactgaaggggccttggctcattctgggaaccctgtatcaaaaggagtccatgaagaccatcagctggataccgaggctggggccccacactgtggaacaaacccacagcttgctcaggatccatcccagaatcagcagacatcaaatccaacgcacagttcagaagatgtgaagccaaaaaccctcccgctggataaaagcattaaccatcagatcgagtctcccagtgaaaggcggaagtctataagtggaaagaagctgtgctcttcctgtgggcttcctttgggtaaaggagctgcaatgatcatcgagaccctcaatctctattttcacatccagtgtttcaggtgtggaatttgtaaaggccagcttggagatgcagtgagtgggacggatgttaggattcgaaatggtctcctgaactgtaatgattgctacatgcgatccagaagtgccgggcagcctacaacattgtgacacggctttcaagcttccggatcactcaccatttctttactgagagtgtcccctggcaactgcttaacaaaatcccaagctcaggggcttctcagcatttacctaatttctgaaaggctcttctgaaaggtggtatctgttctttcgtagcacagtgtttatgtttttcctgtttattgttttggttttttttttttttttgcatttgcacagtatacacaaaagaatatggggttgtaatgatcctgaatagctcaaaaaaggttttagcatggtcaaacaggcttatggtttaaaatgtgttattctcttctttgggaattagctaaatgatgcaataaacctgttttgttttagaatgtctaggaattaaacactttatgtttacagaattgagctgcagaaagtgcaagacatgccaatttgagacacacggtcttctaagactgaaggataaatttaatgcatttcagaaactaaacatcacagcaagctctatctctgagctataatttgtttttaatgcaaagacactagtttgataatatatactgtaatcctgaaacatttgtgttacttacctttggaggtagaaattataccaataaattattgcaccgttagtattagattctgtgtaccttggaagttatgtcattaatataggctggttcatcaaataaagcaaaaccttgcaatatcagctagatttacactccgggacgttgcccaaaggtaggaagaaagcagagggaaatatttcagtcatcatttccaaagtcattatcaaaatctgtgaggaagtttaatcttccaaagagtcaatgtcagacatcaggcctctgttgcctgcttctctcgaggcactagattaggagtcttcaataagagacttaacatgaggtatatggaagatgaggcaccgagataagttcatcattaggtgtgagcactgctcacccttgctggcaagttctccttaagggcctgaagcacaggtgtccaaagaaaagcgttaagtccatcttaatagaatctatgtggtatatgatgtggtcagcccctggtctgtgatcagcaagaacctacagcacagattatgccctgcccacttcaatgaatacctactctcctccattctccatcactttttttgctatcaagaactccggaccttgcccatggagaagtttagagaggaactcttgtggagagctggtttattttctgccctgtgcgacgagtttcagctggccaagaaaggagtcaagttattaaaaagcatcacaatgtagatctccaggctggttttttgttttttgttgttaagactggggaaagggggactatttattctgccttaaatcaatggcaaataagtcaagatgacattttgtgaatgtagactatggatacactcctaatagattgatgtagtcataaaagggggtcaagtagatgtttttctgttatgtaagcaataatttttccgtgtcttattgagtatggctagcgattatttattacatgctagatgggttctttgcatgtgggttccatataggtgcagaaatttcctcagccactggagggatttcgaccatatttgtcatttggatgagctgttattagattgaaatctacacatcatttcattaaaaattgtgccttagaaaacgcaaagctgttgcacatggcgataaattatggatgcagtacattgaagagagatgaagtcacttccaagtttccaagacttctcatggaggtgtttgctgttttacaggaaaaaataaaaataaaaaaagaaaaaaagaaaaaattaaaaagaaaaattgttttgaaaatgtacagatcaagtccaatattttgattatccacctgcatgttttattaaatattttgataatgtggatgtttacactttgcatgatattagcagagtaccactagtaatgcacaaacatgtacaatatggtcattcataaccgatttttatagaatactttttacatgtgcaactccatccgttatgtaaggattacatgaatattgcacattcccttctggtttcacaaacccatttatacatatttcttagtgaggctcattgtacatgtattgaagctagaatcgagtcaagaaaaataaagccccattctccaactgcaaaatgtgctttcccataatgaacactagtcaccagcacagaataatctccaacattttctaaattctaattgccaactgtttctatttatatttgatttatatttcatttggagtctgttacatggcagcttaggcagactagatcttgttttttccaatgcagcataatgagtatgatctatttcttttcaaataatctttgagatcccaggaaaaaaaaaatgctctgctccattgagctataatgtaaatgtgtttgtttaaaaaacaggtgaggcaagtgagtgatttattgttcctgaggaagtatatctgattttttttctcatactccaaaagctagtccctactctttaataaaaataatgggtaactttttgtttttcactagcgaacttccatgacatttcctttctatgtagtgtgattaatgcaatacatattatagttatctatacacagtgtaagatttaacaaactgaaatgatccacctcatatgtgagtccgtccaaaagatgttactgctctgggtgggccagtgttctatatcggttatactaactttcatttaaagtatttattctaaaatgcctctgagaaacagtaaaaaataaaaacaacaagttgtctaaaatgcaacagcttttatagtaaatgtacatttataaataaaatactcaaatcaa

SEQ ID NO: 3745 - protein, 910 aa, Homo sapiens
MRKDTDDIESPKRSIRDSGYIDCWDSERSDSLSPPRHGRDDSFDSLDSFGSRSRQTPSPDVVLRGSSDGRGSDSESDLPHRKLPDVKKDDMSARRTSHGEPKSAVPFNQYLPNKSNQTAYVPAPLRKKKAEREEYRKSWSTATSPLGGERPFRSTSMFDMRCEEEAAVQPHSRARQEQLQLINNQLREEDDKWQDDLARWKSRRRSVSQDLIKKEEERKKMEKLLAGEDGTSERRKSIKTYREIVQEKERRERELHEAYKNARSQEEAEGILQQYIERFTISEAVLERLEMPKILERSHSTEPNLSSFLNDPNPMKYLRQQSLPPPKFTATVETTIARASVLDTSMSAGSGSPSKTVTPKAVPMLTPKPYSQPKNSQDVLKTFKVDGKVSVNGETVHREEEKERECPTVAPAHSLTKSQMFEGVARVHGSPLELKQDNGSIEINIKKPNSVPQELAATTEKTEPNSQEDKNDGGKSRKGNIELASSEPQHFTTTVTRCSPTVAFVEFPSSPQLKNDVSEEKDQKKPENEMSGKVELVLSQKVVKPKSPEPEATLTFPFLDKMPEANQLHLPNLNSQESPGTASVPLRVQNSWRRSQFFSQSVDSPSSEKSPVMTPFKFWAWDPEEERRRQEKWQQEQERLLQERYQKEQDKLKEEWEKAQKEVEEEERRYYEEERKIIEDTVVPFTVSSSSADQLSTSSSMTEGSGTMNKIDLGNCQDEKQDRRWKKSFQGDDSDLLLKTRESDRLEEKGSLTEGALAHSGNPVSKGVHEDHQLDTEAGAPHCGTNPQLAQDPSQNQQTSNPTHSSEDVKPKTLPLDKSINHQIESPSERRKSISGKKLCSSCGLPLGKGAAMIIETLNLYFHIQCFRCGICKGQLGDAVSGTDVRIRNGLLNCNDCYMRSRSAGQPTTL

SEQ ID NO: 3746 - DNA, 6125 bp, Homo sapiens
ggcgacggcggcggccgtcctcatcccggcgcttgagaggacgcggggctgcgcaaatggcttgtcccgctctcggtctggaagctcttcagcccctgcagcccgagccgccccccgagcccgccttctccgaggcgcagaagtggattgagcaagtaactggcagaagttttggtgataaagattttcggacaggtttagaaaatggaatcctcctctgcgagttgctgaatgctataaagccaggacttgttaaaaagatcaatagattgcctacccccattgcaggactggacaatattatcttattcttgagaggttgtaaagagctcggccttaaagaatctcaactttttgacccgagtgacctccaggatacatccaacagagtaacagtcaagagccttgattatagtaggaagctgaaaaatgtattagttaccatttactggctgggaaaagcagcaaacagctgcacatcctacagcggaacgacactaaacctgaaggagtttgaaggattgttggctcagatgcgaaaggacactgatgacattgaaagtcctaaacgcagtatccgagacagtggctacatcgactgctgggattccgagcgcagcgactccctctctcctcctcgccacggcagagatgattccttcgacagcctggattcctttggctctcgctctcggcagacgccttcaccagatgtagtcctcaggggaagcagcgatgggagaggaagcgactctgaatccgacttgcctcatcggaagctgccagatgtgaagaaggatgacatgtctgcacggcggacttcccatggtgagccgaaatcagcagtgccttttaaccagtacctcccgaacaaaagcaatcagacggcctacgtccccgcgcctctgagaaagaagaaagcagagagagaggaataccgcaagagctggagtaccgccacctccccgctgggtggggagaggcccttcaggagcaccagcatgtttgacatgcggtgtgaggaggaggccgcggtgcagccgcacagcagggcccgccaggagcagctgcagctgataaataaccagctgagggaagaggacgacaaatggcaagatgacctggctcgttggaagagtcgtagaagaagtgtttctcaggacttaatcaagaaagaggaagaaaggaaaaaaatggagaagttactggctggagaagatgggacaagtgaacgaaggaaaagcatcaaaacctacagagaaattgttcaagaaaaagagcggagagagagagagctgcatgaagcatataagaacgctcggtcccaggaggaggcagaggggatccttcaacagtacattgagaggttcaccatcagtgaggctgttctcgaacgcttggagatgccaaaaattctggaaagaagccattcaacagagccaaatttatcctccttcctgaatgaccccaatcccatgaaatacctgcggcaacagtcactgcctccacccaaattcactgccactgttgaaaccaccattgctcgtgccagtgttctggataccagcatgtcagcaggcagtgggtctccaagcaaaactgtcactcccaaagcagtgcctatgctgacacccaagccttactcccagcccaaaaattctcaagatgttctgaagacctttaaggtagacgggaaagtcagtgtgaatggagagacggttcatagagaggaggagaaggaaagagagtgtcccacggtggcacctgcccactccttaaccaaatcccagatgtttgaaggtgtggccagagtgcacgggtctccactggagctgaaacaagacaacggtagcatcgagatcaacataaagaagccaaactctgttccccaagagctcgcagcaaccactgagaaaacggaaccgaatagtcaagaggacaagaatgatggtggaaaatcaagaaaagggaatatagaacttgcctcatcagaaccacagcattttacaacaactgtgactcgatgcagcccgaccgtggcctttgtggaatttccctccagcccccagctgaagaatgatgtgtcggaagaaaaagaccagaagaaaccagaaaatgaaatgagtggaaaggtggagttggtgctgtcacaaaaggtggtaaagccaaaatctccagaacccgaagcaacgctgacatttccatttctggacaaaatgcctgaagccaaccaactacatttgccaaatctcaattctcaagagtcgcctggcactgccagtgttccgcttagagttcagaactcttggcgacgatcccagtttttctcccagtcagtggattctccaagcagtgagaagtcacctgttatgacaccttttaagttctgggcatgggacccagaagaggagcgcaggcgacaggaaaaatggcaacaggaacaggaacgtttgctccaggagagataccagaaggagcaggacaagctgaaagaagagtgggaaaaggcccaaaaggaggtggaagaggaagaacgcagatactatgaggaggagcgtaagataattgaagacactgtggttccatttactgtttcttcaagttccgctgaccagctgtctacctcttcctccatgactgaaggcagtgggacaatgaataagatagacctgggaaactgtcaagatgaaaaacaagacagaagatggaagaaatcattccagggagatgacagtgacttattgctgaagactagggaaagtgatcgactggaggagaagggcagcctaactgaaggggccttggctcattctgggaaccctgtatcaaaaggagtccatgaagaccatcagctggataccgaggctggggccccacactgtggaacaaacccacagcttgctcaggatccatcccagaatcagcagacatcaaatccaacgcacagttcagaagatgtgaagccaaaaaccctcccgctggataaaagcattaaccatcagatcgagtctcccagtgaaaggcggaagtctataagtggaaagaagctgtgctcttcctgtgggcttcctttgggtaaaggagctgcaatgatcatcgagaccctcaatctctattttcacatccagtgtttcaggtgtggaatttgtaaaggccagcttggagatgcagtgagtgggacggatgttaggattcgaaatggtctcctgaactgtaatgattgctacatgcgatccagaagtgccgggcagcctacaacattgtgacacggctttcaagcttccggatcactcaccatttctttactgagagtgtcccctggcaactgcttaacaaaatcccaagctcaggggcttctcagcatttacctaatttctgaaaggctcttctgaaaggtggtatctgttctttcgtagcacagtgtttatgtttttcctgtttattgttttggttttttttttttttttgcatttgcacagtatacacaaaagaatatggggttgtaatgatcctgaatagctcaaaaaaggttttagcatggtcaaacaggcttatggtttaaaatgtgttattctcttctttgggaattagctaaatgatgcaataaacctgttttgttttagaatgtctaggaattaaacactttatgtttacagaattgagctgcagaaagtgcaagacatgccaatttgagacacacggtcttctaagactgaaggataaatttaatgcatttcagaaactaaacatcacagcaagctctatctctgagctataatttgtttttaatgcaaagacactagtttgataatatatactgtaatcctgaaacatttgtgttacttacctttggaggtagaaattataccaataaattattgcaccgttagtattagattctgtgtaccttggaagttatgtcattaatataggctggttcatcaaataaagcaaaaccttgcaatatcagctagatttacactccgggacgttgcccaaaggtaggaagaaagcagagggaaatatttcagtcatcatttccaaagtcattatcaaaatctgtgaggaagtttaatcttccaaagagtcaatgtcagacatcaggcctctgttgcctgcttctctcgaggcactagattaggagtcttcaataagagacttaacatgaggtatatggaagatgaggcaccgagataagttcatcattaggtgtgagcactgctcacccttgctggcaagttctccttaagggcctgaagcacaggtgtccaaagaaaagcgttaagtccatcttaatagaatctatgtggtatatgatgtggtcagcccctggtctgtgatcagcaagaacctacagcacagattatgccctgcccacttcaatgaatacctactctcctccattctccatcactttttttgctatcaagaactccggaccttgcccatggagaagtttagagaggaactcttgtggagagctggtttattttctgccctgtgcgacgagtttcagctggccaagaaaggagtcaagttattaaaaagcatcacaatgtagatctccaggctggttttttgttttttgttgttaagactggggaaagggggactatttattctgccttaaatcaatggcaaataagtcaagatgacattttgtgaatgtagactatggatacactcctaatagattgatgtagtcataaaagggggtcaagtagatgtttttctgttatgtaagcaataatttttccgtgtcttattgagtatggctagcgattatttattacatgctagatgggttctttgcatgtgggttccatataggtgcagaaatttcctcagccactggagggatttcgaccatatttgtcatttggatgagctgttattagattgaaatctacacatcatttcattaaaaattgtgccttagaaaacgcaaagctgttgcacatggcgataaattatggatgcagtacattgaagagagatgaagtcacttccaagtttccaagacttctcatggaggtgtttgctgttttacaggaaaaaataaaaataaaaaaagaaaaaaagaaaaaattaaaaagaaaaattgttttgaaaatgtacagatcaagtccaatattttgattatccacctgcatgttttattaaatattttgataatgtggatgtttacactttgcatgatattagcagagtaccactagtaatgcacaaacatgtacaatatggtcattcataaccgatttttatagaatactttttacatgtgcaactccatccgttatgtaaggattacatgaatattgcacattcccttctggtttcacaaacccatttatacatatttcttagtgaggctcattgtacatgtattgaagctagaatcgagtcaagaaaaataaagccccattctccaactgcaaaatgtgctttcccataatgaacactagtcaccagcacagaataatctccaacattttctaaattctaattgccaactgtttctatttatatttgatttatatttcatttggagtctgttacatggcagcttaggcagactagatcttgttttttccaatgcagcataatgagtatgatctatttcttttcaaataatctttgagatcccaggaaaaaaaaaatgctctgctccattgagctataatgtaaatgtgtttgtttaaaaaacaggtgaggcaagtgagtgatttattgttcctgaggaagtatatctgattttttttctcatactccaaaagctagtccctactctttaataaaaataatgggtaactttttgtttttcactagcgaacttccatgacatttcctttctatgtagtgtgattaatgcaatacatattatagttatctatacacagtgtaagatttaacaaactgaaatgatccacctcatatgtgagtccgtccaaaagatgttactgctctgggtgggccagtgttctatatcggttatactaactttcatttaaagtatttattctaaaatgcctctgagaaacagtaaaaaataaaaacaacaagttgtctaaaatgcaacagcttttatagtaaatgtacatttataaataaaatactcaaatcaa

SEQ ID NO: 3747 - protein, 1069 aa, Homo sapiens
MACPALGLEALQPLQPEPPPEPAFSEAQKWIEQVTGRSFGDKDFRTGLENGILLCELLNAIKPGLVKKINRLPTPIAGLDNIILFLRGCKELGLKESQLFDPSDLQDTSNRVTVKSLDYSRKLKNVLVTIYWLGKAANSCTSYSGTTLNLKEFEGLLAQMRKDTDDIESPKRSIRDSGYIDCWDSERSDSLSPPRHGRDDSFDSLDSFGSRSRQTPSPDVVLRGSSDGRGSDSESDLPHRKLPDVKKDDMSARRTSHGEPKSAVPFNQYLPNKSNQTAYVPAPLRKKKAEREEYRKSWSTATSPLGGERPFRSTSMFDMRCEEEAAVQPHSRARQEQLQLINNQLREEDDKWQDDLARWKSRRRSVSQDLIKKEEERKKMEKLLAGEDGTSERRKSIKTYREIVQEKERRERELHEAYKNARSQEEAEGILQQYIERFTISEAVLERLEMPKILERSHSTEPNLSSFLNDPNPMKYLRQQSLPPPKFTATVETTIARASVLDTSMSAGSGSPSKTVTPKAVPMLTPKPYSQPKNSQDVLKTFKVDGKVSVNGETVHREEEKERECPTVAPAHSLTKSQMFEGVARVHGSPLELKQDNGSIEINIKKPNSVPQELAATTEKTEPNSQEDKNDGGKSRKGNIELASSEPQHFTTTVTRCSPTVAFVEFPSSPQLKNDVSEEKDQKKPENEMSGKVELVLSQKVVKPKSPEPEATLTFPFLDKMPEANQLHLPNLNSQESPGTASVPLRVQNSWRRSQFFSQSVDSPSSEKSPVMTPFKFWAWDPEEERRRQEKWQQEQERLLQERYQKEQDKLKEEWEKAQKEVEEEERRYYEEERKIIEDTVVPFTVSSSSADQLSTSSSMTEGSGTMNKIDLGNCQDEKQDRRWKKSFQGDDSDLLLKTRESDRLEEKGSLTEGALAHSGNPVSKGVHEDHQLDTEAGAPHCGTNPQLAQDPSQNQQTSNPTHSSEDVKPKTLPLDKSINHQIESPSERRKSISGKKLCSSCGLPLGKGAAMIIETLNLYFHIQCFRCGICKGQLGDAVSGTDVRIRNGLLNCNDCYMRSRSAGQPTTL

SEQ ID NO: 3748 - DNA, 5858 bp, Homo sapiens
ggcgacggcggcggccgtcctcatcccggcgcttgagaggacgcggggctgcgcaaatggcttgtcccgctctcggtctggaagctcttcagcccctgcagcccgagccgccccccgagcccgccttctccgaggcgcagaagtggattgagcaagtaactggcagaagttttggtgataaagattttcggacaggtttagaaaatggaatcctcctctgcgagttgctgaatgctataaagccaggacttgttaaaaagatcaatagattgcctacccccattgcaggactggacaatattatcttattcttgagaggttgtaaagagctcggccttaaagaatctcaactttttgacccgagtgacctccaggatacatccaacagagtaacagtcaagagccttgattatagtaggaagctgaaaaatgtattagttaccatttactggctgggaaaagcagcaaacagctgcacatcctacagcggaacgacactaaacctgaaggagtttgaaggattgttggctcagatgcgaaaggacactgatgacattgaaagtcctaaacgcagtatccgagacagtggctacatcgactgctgggattccgagcgcagcgactccctctctcctcctcgccacggcagagatgattccttcgacagcctggattcctttggctctcgctctcggcagacgccttcaccagatgtagtcctcaggggaagcagcgatgggagaggaagcgactctgaatccgacttgcctcatcggaagctgccagatgtgaagaaggatgacatgtctgcacggcggacttcccatggtgagccgaaatcagcagtgccttttaaccagtacctcccgaacaaaagcaatcagacggcctacgtccccgcgcctctgagaaagaagaaagcagagagagaggaataccgcaagagctggagtaccgccacctccccgctgggtggggagaggcccttcagatacggtccgagaactcctgtgtctgatgacgcagagagcaccagcatgtttgacatgcggtgtgaggaggaggccgcggtgcagccgcacagcagggcccgccaggagcagctgcagctgataaataaccagctgagggaagaggacgacaaatggcaagatgacctggctcgttggaagagtcgtagaagaagtgtttctcaggacttaatcaagaaagaggaagaaaggaaaaaaatggagaagttactggctggagaagatgggacaagtgaacgaaggaaaagcatcaaaacctacagagaaattgttcaagaaaaagagcggagagagagagagctgcatgaagcatataagaacgctcggtcccaggaggaggcagaggggatccttcaacagtacattgagaggttcaccatcagtgaggctgttctcgaacgcttggagatgccaaaaattctggaaagaagccattcaacagagccaaatttatcctccttcctgaatgaccccaatcccatgaaatacctgcggcaacagtcactgcctccacccaaattcactgccactgttgaaaccaccattgctcgtgccagtgttctggataccagcatgtcagcaggcagtgggtctccaagcaaaactgtcactcccaaagcagtgcctatgctgacacccaagccttactcccagcccaaaaattctcaagatgttctgaagacctttaaggtagacgggaaagtcagtgtgaatggagagacggttcatagagaggaggagaaggaaagagagtgtcccacggtggcacctgcccactccttaaccaaatcccagatgtttgaaggtgtggccagagtgcacgggtctccactggagctgaaacaagacaacggtagcatcgagatcaacataaagaagccaaactctgttccccaagagctcgcagcaaccactgagaaaacggaaccgaatagtcaagaggacaagaatgatggtggaaaatcaagaaaagggaatatagaacttgcctcatcagaaccacagcattttacaacaactgtgactcgatgcagcccgaccgtggcctttgtggaatttccctccagcccccagctgaagaatgatgtgtcggaagaaaaagaccagaagaaaccagaaaatgaaatgagtggaaaggtggagttggtgctgtcacaaaaggagagataccagaaggagcaggacaagctgaaagaagagtgggaaaaggcccaaaaggaggtggaagaggaagaacgcagatactatgaggaggagcgtaagataattgaagacactgtggttccatttactgtttcttcaagttccgctgaccagctgtctacctcttcctccatgactgaaggcagtgggacaatgaataagatagacctgggaaactgtcaagatgaaaaacaagacagaagatggaagaaatcattccagggagatgacagtgacttattgctgaagactagggaaagtgatcgactggaggagaagggcagcctaactgaaggggccttggctcattctgggaaccctgtatcaaaaggagtccatgaagaccatcagctggataccgaggctggggccccacactgtggaacaaacccacagcttgctcaggatccatcccagaatcagcagacatcaaatccaacgcacagttcagaagatgtgaagccaaaaaccctcccgctggataaaagcattaaccatcagatcgagtctcccagtgaaaggcggaagtctataagtggaaagaagctgtgctcttcctgtgggcttcctttgggtaaaggagctgcaatgatcatcgagaccctcaatctctattttcacatccagtgtttcaggtgtggaatttgtaaaggccagcttggagatgcagtgagtgggacggatgttaggattcgaaatggtctcctgaactgtaatgattgctacatgcgatccagaagtgccgggcagcctacaacattgtgacacggctttcaagcttccggatcactcaccatttctttactgagagtgtcccctggcaactgcttaacaaaatcccaagctcaggggcttctcagcatttacctaatttctgaaaggctcttctgaaaggtggtatctgttctttcgtagcacagtgtttatgtttttcctgtttattgttttggttttttttttttttttgcatttgcacagtatacacaaaagaatatggggttgtaatgatcctgaatagctcaaaaaaggttttagcatggtcaaacaggcttatggtttaaaatgtgttattctcttctttgggaattagctaaatgatgcaataaacctgttttgttttagaatgtctaggaattaaacactttatgtttacagaattgagctgcagaaagtgcaagacatgccaatttgagacacacggtcttctaagactgaaggataaatttaatgcatttcagaaactaaacatcacagcaagctctatctctgagctataatttgtttttaatgcaaagacactagtttgataatatatactgtaatcctgaaacatttgtgttacttacctttggaggtagaaattataccaataaattattgcaccgttagtattagattctgtgtaccttggaagttatgtcattaatataggctggttcatcaaataaagcaaaaccttgcaatatcagctagatttacactccgggacgttgcccaaaggtaggaagaaagcagagggaaatatttcagtcatcatttccaaagtcattatcaaaatctgtgaggaagtttaatcttccaaagagtcaatgtcagacatcaggcctctgttgcctgcttctctcgaggcactagattaggagtcttcaataagagacttaacatgaggtatatggaagatgaggcaccgagataagttcatcattaggtgtgagcactgctcacccttgctggcaagttctccttaagggcctgaagcacaggtgtccaaagaaaagcgttaagtccatcttaatagaatctatgtggtatatgatgtggtcagcccctggtctgtgatcagcaagaacctacagcacagattatgccctgcccacttcaatgaatacctactctcctccattctccatcactttttttgctatcaagaactccggaccttgcccatggagaagtttagagaggaactcttgtggagagctggtttattttctgccctgtgcgacgagtttcagctggccaagaaaggagtcaagttattaaaaagcatcacaatgtagatctccaggctggttttttgttttttgttgttaagactggggaaagggggactatttattctgccttaaatcaatggcaaataagtcaagatgacattttgtgaatgtagactatggatacactcctaatagattgatgtagtcataaaagggggtcaagtagatgtttttctgttatgtaagcaataatttttccgtgtcttattgagtatggctagcgattatttattacatgctagatgggttctttgcatgtgggttccatataggtgcagaaatttcctcagccactggagggatttcgaccatatttgtcatttggatgagctgttattagattgaaatctacacatcatttcattaaaaattgtgccttagaaaacgcaaagctgttgcacatggcgataaattatggatgcagtacattgaagagagatgaagtcacttccaagtttccaagacttctcatggaggtgtttgctgttttacaggaaaaaataaaaataaaaaaagaaaaaaagaaaaaattaaaaagaaaaattgttttgaaaatgtacagatcaagtccaatattttgattatccacctgcatgttttattaaatattttgataatgtggatgtttacactttgcatgatattagcagagtaccactagtaatgcacaaacatgtacaatatggtcattcataaccgatttttatagaatactttttacatgtgcaactccatccgttatgtaaggattacatgaatattgcacattcccttctggtttcacaaacccatttatacatatttcttagtgaggctcattgtacatgtattgaagctagaatcgagtcaagaaaaataaagccccattctccaactgcaaaatgtgctttcccataatgaacactagtcaccagcacagaataatctccaacattttctaaattctaattgccaactgtttctatttatatttgatttatatttcatttggagtctgttacatggcagcttaggcagactagatcttgttttttccaatgcagcataatgagtatgatctatttcttttcaaataatctttgagatcccaggaaaaaaaaaatgctctgctccattgagctataatgtaaatgtgtttgtttaaaaaacaggtgaggcaagtgagtgatttattgttcctgaggaagtatatctgattttttttctcatactccaaaagctagtccctactctttaataaaaataatgggtaactttttgtttttcactagcgaacttccatgacatttcctttctatgtagtgtgattaatgcaatacatattatagttatctatacacagtgtaagatttaacaaactgaaatgatccacctcatatgtgagtccgtccaaaagatgttactgctctgggtgggccagtgttctatatcggttatactaactttcatttaaagtatttattctaaaatgcctctgagaaacagtaaaaaataaaaacaacaagttgtctaaaatgcaacagcttttatagtaaatgtacatttataaataaaatactcaaatcaa

SEQ ID NO: 3749 - protein, 980 aa, Homo sapiens
MACPALGLEALQPLQPEPPPEPAFSEAQKWIEQVTGRSFGDKDFRTGLENGILLCELLNAIKPGLVKKINRLPTPIAGLDNIILFLRGCKELGLKESQLFDPSDLQDTSNRVTVKSLDYSRKLKNVLVTIYWLGKAANSCTSYSGTTLNLKEFEGLLAQMRKDTDDIESPKRSIRDSGYIDCWDSERSDSLSPPRHGRDDSFDSLDSFGSRSRQTPSPDVVLRGSSDGRGSDSESDLPHRKLPDVKKDDMSARRTSHGEPKSAVPFNQYLPNKSNQTAYVPAPLRKKKAEREEYRKSWSTATSPLGGERPFRYGPRTPVSDDAESTSMFDMRCEEEAAVQPHSRARQEQLQLINNQLREEDDKWQDDLARWKSRRRSVSQDLIKKEEERKKMEKLLAGEDGTSERRKSIKTYREIVQEKERRERELHEAYKNARSQEEAEGILQQYIERFTISEAVLERLEMPKILERSHSTEPNLSSFLNDPNPMKYLRQQSLPPPKFTATVETTIARASVLDTSMSAGSGSPSKTVTPKAVPMLTPKPYSQPKNSQDVLKTFKVDGKVSVNGETVHREEEKERECPTVAPAHSLTKSQMFEGVARVHGSPLELKQDNGSIEINIKKPNSVPQELAATTEKTEPNSQEDKNDGGKSRKGNIELASSEPQHFTTTVTRCSPTVAFVEFPSSPQLKNDVSEEKDQKKPENEMSGKVELVLSQKERYQKEQDKLKEEWEKAQKEVEEEERRYYEEERKIIEDTVVPFTVSSSSADQLSTSSSMTEGSGTMNKIDLGNCQDEKQDRRWKKSFQGDDSDLLLKTRESDRLEEKGSLTEGALAHSGNPVSKGVHEDHQLDTEAGAPHCGTNPQLAQDPSQNQQTSNPTHSSEDVKPKTLPLDKSINHQIESPSERRKSISGKKLCSSCGLPLGKGAAMIIETLNLYFHIQCFRCGICKGQLGDAVSGTDVRIRNGLLNCNDCYMRSRSAGQPTTL

SEQ ID NO: 3750 - DNA, 6164 bp, Homo sapiens
ggcgacggcggcggccgtcctcatcccggcgcttgagaggacgcggggctgcgcaaatggcttgtcccgctctcggtctggaagctcttcagcccctgcagcccgagccgccccccgagcccgccttctccgaggcgcagaagtggattgagcaagtaactggcagaagttttggtgataaagattttcggacaggtttagaaaatggaatcctcctctgcgagttgctgaatgctataaagccaggacttgttaaaaagatcaatagattgcctacccccattgcaggactggacaatattatcttattcttgagaggttgtaaagagctcggccttaaagaatctcaactttttgacccgagtgacctccaggatacatccaacagagtaacagtcaagagccttgattatagtaggaagctgaaaaatgtattagttaccatttactggctgggaaaagcagcaaacagctgcacatcctacagcggaacgacactaaacctgaaggagtttgaaggattgttggctcagatgcgaaaggacactgatgacattgaaagtcctaaacgcagtatccgagacagtggctacatcgactgctgggattccgagcgcagcgactccctctctcctcctcgccacggcagagatgattccttcgacagcctggattcctttggctctcgctctcggcagacgccttcaccagatgtagtcctcaggggaagcagcgatgggagaggaagcgactctgaatccgacttgcctcatcggaagctgccagatgtgaagaaggatgacatgtctgcacggcggacttcccatggtgagccgaaatcagcagtgccttttaaccagtacctcccgaacaaaagcaatcagacggcctacgtccccgcgcctctgagaaagaagaaagcagagagagaggaataccgcaagagctggagtaccgccacctccccgctgggtggggagaggcccttcagatacggtccgagaactcctgtgtctgatgacgcagagagcaccagcatgtttgacatgcggtgtgaggaggaggccgcggtgcagccgcacagcagggcccgccaggagcagctgcagctgataaataaccagctgagggaagaggacgacaaatggcaagatgacctggctcgttggaagagtcgtagaagaagtgtttctcaggacttaatcaagaaagaggaagaaaggaaaaaaatggagaagttactggctggagaagatgggacaagtgaacgaaggaaaagcatcaaaacctacagagaaattgttcaagaaaaagagcggagagagagagagctgcatgaagcatataagaacgctcggtcccaggaggaggcagaggggatccttcaacagtacattgagaggttcaccatcagtgaggctgttctcgaacgcttggagatgccaaaaattctggaaagaagccattcaacagagccaaatttatcctccttcctgaatgaccccaatcccatgaaatacctgcggcaacagtcactgcctccacccaaattcactgccactgttgaaaccaccattgctcgtgccagtgttctggataccagcatgtcagcaggcagtgggtctccaagcaaaactgtcactcccaaagcagtgcctatgctgacacccaagccttactcccagcccaaaaattctcaagatgttctgaagacctttaaggtagacgggaaagtcagtgtgaatggagagacggttcatagagaggaggagaaggaaagagagtgtcccacggtggcacctgcccactccttaaccaaatcccagatgtttgaaggtgtggccagagtgcacgggtctccactggagctgaaacaagacaacggtagcatcgagatcaacataaagaagccaaactctgttccccaagagctcgcagcaaccactgagaaaacggaaccgaatagtcaagaggacaagaatgatggtggaaaatcaagaaaagggaatatagaacttgcctcatcagaaccacagcattttacaacaactgtgactcgatgcagcccgaccgtggcctttgtggaatttccctccagcccccagctgaagaatgatgtgtcggaagaaaaagaccagaagaaaccagaaaatgaaatgagtggaaaggtggagttggtgctgtcacaaaaggtggtaaagccaaaatctccagaacccgaagcaacgctgacatttccatttctggacaaaatgcctgaagccaaccaactacatttgccaaatctcaattctcaagtggattctccaagcagtgagaagtcacctgttatgacaccttttaagttctgggcatgggacccagaagaggagcgcaggcgacaggaaaaatggcaacaggaacaggaacgtttgctccaggagagataccagaaggagcaggacaagctgaaagaagagtgggaaaaggcccaaaaggaggtggaagaggaagaacgcagatactatgaggaggagcgtaagataattgaagacactgtggttccatttactgtttcttcaagttccgctgaccagctgtctacctcttcctccatgactgaaggcagtgggacaatgaataagatagacctgggaaactgtcaagatgaaaaacaagacagaagatggaagaaatcattccagggagatgacagtgacttattgctgaagactagggaaagtgatcgactggaggagaagggcagcctaactgaaggggccttggctcattctgggaaccctgtatcaaaaggagtccatgaagaccatcagctggataccgaggctggggccccacactgtggaacaaacccacagcttgctcaggatccatcccagaatcagcagacatcaaatccaacgcacagttcagaagatgtgaagccaaaaaccctcccgctggataaaagcattaaccatcagatcgagtctcccagtgaaaggcggaagaaaagtccccgagagcacttccaggctgggcctttctctccctgttctcccacccctcccggtcagtcaccaaacaggtctataagtggaaagaagctgtgctcttcctgtgggcttcctttgggtaaaggagctgcaatgatcatcgagaccctcaatctctattttcacatccagtgtttcaggtgtggaatttgtaaaggccagcttggagatgcagtgagtgggacggatgttaggattcgaaatggtctcctgaactgtaatgattgctacatgcgatccagaagtgccgggcagcctacaacattgtgacacggctttcaagcttccggatcactcaccatttctttactgagagtgtcccctggcaactgcttaacaaaatcccaagctcaggggcttctcagcatttacctaatttctgaaaggctcttctgaaaggtggtatctgttctttcgtagcacagtgtttatgtttttcctgtttattgttttggttttttttttttttttgcatttgcacagtatacacaaaagaatatggggttgtaatgatcctgaatagctcaaaaaaggttttagcatggtcaaacaggcttatggtttaaaatgtgttattctcttctttgggaattagctaaatgatgcaataaacctgttttgttttagaatgtctaggaattaaacactttatgtttacagaattgagctgcagaaagtgcaagacatgccaatttgagacacacggtcttctaagactgaaggataaatttaatgcatttcagaaactaaacatcacagcaagctctatctctgagctataatttgtttttaatgcaaagacactagtttgataatatatactgtaatcctgaaacatttgtgttacttacctttggaggtagaaattataccaataaattattgcaccgttagtattagattctgtgtaccttggaagttatgtcattaatataggctggttcatcaaataaagcaaaaccttgcaatatcagctagatttacactccgggacgttgcccaaaggtaggaagaaagcagagggaaatatttcagtcatcatttccaaagtcattatcaaaatctgtgaggaagtttaatcttccaaagagtcaatgtcagacatcaggcctctgttgcctgcttctctcgaggcactagattaggagtcttcaataagagacttaacatgaggtatatggaagatgaggcaccgagataagttcatcattaggtgtgagcactgctcacccttgctggcaagttctccttaagggcctgaagcacaggtgtccaaagaaaagcgttaagtccatcttaatagaatctatgtggtatatgatgtggtcagcccctggtctgtgatcagcaagaacctacagcacagattatgccctgcccacttcaatgaatacctactctcctccattctccatcactttttttgctatcaagaactccggaccttgcccatggagaagtttagagaggaactcttgtggagagctggtttattttctgccctgtgcgacgagtttcagctggccaagaaaggagtcaagttattaaaaagcatcacaatgtagatctccaggctggttttttgttttttgttgttaagactggggaaagggggactatttattctgccttaaatcaatggcaaataagtcaagatgacattttgtgaatgtagactatggatacactcctaatagattgatgtagtcataaaagggggtcaagtagatgtttttctgttatgtaagcaataatttttccgtgtcttattgagtatggctagcgattatttattacatgctagatgggttctttgcatgtgggttccatataggtgcagaaatttcctcagccactggagggatttcgaccatatttgtcatttggatgagctgttattagattgaaatctacacatcatttcattaaaaattgtgccttagaaaacgcaaagctgttgcacatggcgataaattatggatgcagtacattgaagagagatgaagtcacttccaagtttccaagacttctcatggaggtgtttgctgttttacaggaaaaaataaaaataaaaaaagaaaaaaagaaaaaattaaaaagaaaaattgttttgaaaatgtacagatcaagtccaatattttgattatccacctgcatgttttattaaatattttgataatgtggatgtttacactttgcatgatattagcagagtaccactagtaatgcacaaacatgtacaatatggtcattcataaccgatttttatagaatactttttacatgtgcaactccatccgttatgtaaggattacatgaatattgcacattcccttctggtttcacaaacccatttatacatatttcttagtgaggctcattgtacatgtattgaagctagaatcgagtcaagaaaaataaagccccattctccaactgcaaaatgtgctttcccataatgaacactagtcaccagcacagaataatctccaacattttctaaattctaattgccaactgtttctatttatatttgatttatatttcatttggagtctgttacatggcagcttaggcagactagatcttgttttttccaatgcagcataatgagtatgatctatttcttttcaaataatctttgagatcccaggaaaaaaaaaatgctctgctccattgagctataatgtaaatgtgtttgtttaaaaaacaggtgaggcaagtgagtgatttattgttcctgaggaagtatatctgattttttttctcatactccaaaagctagtccctactctttaataaaaataatgggtaactttttgtttttcactagcgaacttccatgacatttcctttctatgtagtgtgattaatgcaatacatattatagttatctatacacagtgtaagatttaacaaactgaaatgatccacctcatatgtgagtccgtccaaaagatgttactgctctgggtgggccagtgttctatatcggttatactaactttcatttaaagtatttattctaaaatgcctctgagaaacagtaaaaaataaaaacaacaagttgtctaaaatgcaacagcttttatagtaaatgtacatttataaataaaatactcaaatcaa

SEQ ID NO: 3751 - protein, 1082 aa, Homo sapiens
MACPALGLEALQPLQPEPPPEPAFSEAQKWIEQVTGRSFGDKDFRTGLENGILLCELLNAIKPGLVKKINRLPTPIAGLDNIILFLRGCKELGLKESQLFDPSDLQDTSNRVTVKSLDYSRKLKNVLVTIYWLGKAANSCTSYSGTTLNLKEFEGLLAQMRKDTDDIESPKRSIRDSGYIDCWDSERSDSLSPPRHGRDDSFDSLDSFGSRSRQTPSPDVVLRGSSDGRGSDSESDLPHRKLPDVKKDDMSARRTSHGEPKSAVPFNQYLPNKSNQTAYVPAPLRKKKAEREEYRKSWSTATSPLGGERPFRYGPRTPVSDDAESTSMFDMRCEEEAAVQPHSRARQEQLQLINNQLREEDDKWQDDLARWKSRRRSVSQDLIKKEEERKKMEKLLAGEDGTSERRKSIKTYREIVQEKERRERELHEAYKNARSQEEAEGILQQYIERFTISEAVLERLEMPKILERSHSTEPNLSSFLNDPNPMKYLRQQSLPPPKFTATVETTIARASVLDTSMSAGSGSPSKTVTPKAVPMLTPKPYSQPKNSQDVLKTFKVDGKVSVNGETVHREEEKERECPTVAPAHSLTKSQMFEGVARVHGSPLELKQDNGSIEINIKKPNSVPQELAATTEKTEPNSQEDKNDGGKSRKGNIELASSEPQHFTTTVTRCSPTVAFVEFPSSPQLKNDVSEEKDQKKPENEMSGKVELVLSQKVVKPKSPEPEATLTFPFLDKMPEANQLHLPNLNSQVDSPSSEKSPVMTPFKFWAWDPEEERRRQEKWQQEQERLLQERYQKEQDKLKEEWEKAQKEVEEEERRYYEEERKIIEDTVVPFTVSSSSADQLSTSSSMTEGSGTMNKIDLGNCQDEKQDRRWKKSFQGDDSDLLLKTRESDRLEEKGSLTEGALAHSGNPVSKGVHEDHQLDTEAGAPHCGTNPQLAQDPSQNQQTSNPTHSSEDVKPKTLPLDKSINHQIESPSERRKKSPREHFQAGPFSPCSPTPPGQSPNRSISGKKLCSSCGLPLGKGAAMIIETLNLYFHIQCFRCGICKGQLGDAVSGTDVRIRNGLLNCNDCYMRSRSAGQPTTL

SEQ ID NO: 3752 - DNA, 6086 bp, Homo sapiens
ggcgacggcggcggccgtcctcatcccggcgcttgagaggacgcggggctgcgcaaatggcttgtcccgctctcggtctggaagctcttcagcccctgcagcccgagccgccccccgagcccgccttctccgaggcgcagaagtggattgagcaagtaactggcagaagttttggtgataaagattttcggacaggtttagaaaatggaatcctcctctgcgagttgctgaatgctataaagccaggacttgttaaaaagatcaatagattgcctacccccattgcaggactggacaatattatcttattcttgagaggttgtaaagagctcggccttaaagaatctcaactttttgacccgagtgacctccaggatacatccaacagagtaacagtcaagagccttgattatagtaggaagctgaaaaatgtattagttaccatttactggctgggaaaagcagcaaacagctgcacatcctacagcggaacgacactaaacctgaaggagtttgaaggattgttggctcagatgcgaaaggacactgatgacattgaaagtcctaaacgcagtatccgagacagtggctacatcgactgctgggattccgagcgcagcgactccctctctcctcctcgccacggcagagatgattccttcgacagcctggattcctttggctctcgctctcggcagacgccttcaccagatgtagtcctcaggggaagcagcgatgggagaggaagcgactctgaatccgacttgcctcatcggaagctgccagatgtgaagaaggatgacatgtctgcacggcggacttcccatggtgagccgaaatcagcagtgccttttaaccagtacctcccgaacaaaagcaatcagacggcctacgtccccgcgcctctgagaaagaagaaagcagagagagaggaataccgcaagagctggagtaccgccacctccccgctgggtggggagaggcccttcagatacggtccgagaactcctgtgtctgatgacgcagagagcaccagcatgtttgacatgcggtgtgaggaggaggccgcggtgcagccgcacagcagggcccgccaggagcagctgcagctgataaataaccagctgagggaagaggacgacaaatggcaagatgacctggctcgttggaagagtcgtagaagaagtgtttctcaggacttaatcaagaaagaggaagaaaggaaaaaaatggagaagttactggctggagaagatgggacaagtgaacgaaggaaaagcatcaaaacctacagagaaattgttcaagaaaaagagcggagagagagagagctgcatgaagcatataagaacgctcggtcccaggaggaggcagaggggatccttcaacagtacattgagaggttcaccatcagtgaggctgttctcgaacgcttggagatgccaaaaattctggaaagaagccattcaacagagccaaatttatcctccttcctgaatgaccccaatcccatgaaatacctgcggcaacagtcactgcctccacccaaattcactgccactgttgaaaccaccattgctcgtgccagtgttctggataccagcatgtcagcaggcagtgggtctccaagcaaaactgtcactcccaaagcagtgcctatgctgacacccaagccttactcccagcccaaaaattctcaagatgttctgaagacctttaaggtagacgggaaagtcagtgtgaatggagagacggttcatagagaggaggagaaggaaagagagtgtcccacggtggcacctgcccactccttaaccaaatcccagatgtttgaaggtgtggccagagtgcacgggtctccactggagctgaaacaagacaacggtagcatcgagatcaacataaagaagccaaactctgttccccaagagctcgcagcaaccactgagaaaacggaaccgaatagtcaagaggacaagaatgatggtggaaaatcaagaaaagggaatatagaacttgcctcatcagaaccacagcattttacaacaactgtgactcgatgcagcccgaccgtggcctttgtggaatttccctccagcccccagctgaagaatgatgtgtcggaagaaaaagaccagaagaaaccagaaaatgaaatgagtggaaaggtggagttggtgctgtcacaaaaggtggtaaagccaaaatctccagaacccgaagcaacgctgacatttccatttctggacaaaatgcctgaagccaaccaactacatttgccaaatctcaattctcaagtggattctccaagcagtgagaagtcacctgttatgacaccttttaagttctgggcatgggacccagaagaggagcgcaggcgacaggaaaaatggcaacaggaacaggaacgtttgctccaggagagataccagaaggagcaggacaagctgaaagaagagtgggaaaaggcccaaaaggaggtggaagaggaagaacgcagatactatgaggaggagcgtaagataattgaagacactgtggttccatttactgtttcttcaagttccgctgaccagctgtctacctcttcctccatgactgaaggcagtgggacaatgaataagatagacctgggaaactgtcaagatgaaaaacaagacagaagatggaagaaatcattccagggagatgacagtgacttattgctgaagactagggaaagtgatcgactggaggagaagggcagcctaactgaaggggccttggctcattctgggaaccctgtatcaaaaggagtccatgaagaccatcagctggataccgaggctggggccccacactgtggaacaaacccacagcttgctcaggatccatcccagaatcagcagacatcaaatccaacgcacagttcagaagatgtgaagccaaaaaccctcccgctggataaaagcattaaccatcagatcgagtctcccagtgaaaggcggaagtctataagtggaaagaagctgtgctcttcctgtgggcttcctttgggtaaaggagctgcaatgatcatcgagaccctcaatctctattttcacatccagtgtttcaggtgtggaatttgtaaaggccagcttggagatgcagtgagtgggacggatgttaggattcgaaatggtctcctgaactgtaatgattgctacatgcgatccagaagtgccgggcagcctacaacattgtgacacggctttcaagcttccggatcactcaccatttctttactgagagtgtcccctggcaactgcttaacaaaatcccaagctcaggggcttctcagcatttacctaatttctgaaaggctcttctgaaaggtggtatctgttctttcgtagcacagtgtttatgtttttcctgtttattgttttggttttttttttttttttgcatttgcacagtatacacaaaagaatatggggttgtaatgatcctgaatagctcaaaaaaggttttagcatggtcaaacaggcttatggtttaaaatgtgttattctcttctttgggaattagctaaatgatgcaataaacctgttttgttttagaatgtctaggaattaaacactttatgtttacagaattgagctgcagaaagtgcaagacatgccaatttgagacacacggtcttctaagactgaaggataaatttaatgcatttcagaaactaaacatcacagcaagctctatctctgagctataatttgtttttaatgcaaagacactagtttgataatatatactgtaatcctgaaacatttgtgttacttacctttggaggtagaaattataccaataaattattgcaccgttagtattagattctgtgtaccttggaagttatgtcattaatataggctggttcatcaaataaagcaaaaccttgcaatatcagctagatttacactccgggacgttgcccaaaggtaggaagaaagcagagggaaatatttcagtcatcatttccaaagtcattatcaaaatctgtgaggaagtttaatcttccaaagagtcaatgtcagacatcaggcctctgttgcctgcttctctcgaggcactagattaggagtcttcaataagagacttaacatgaggtatatggaagatgaggcaccgagataagttcatcattaggtgtgagcactgctcacccttgctggcaagttctccttaagggcctgaagcacaggtgtccaaagaaaagcgttaagtccatcttaatagaatctatgtggtatatgatgtggtcagcccctggtctgtgatcagcaagaacctacagcacagattatgccctgcccacttcaatgaatacctactctcctccattctccatcactttttttgctatcaagaactccggaccttgcccatggagaagtttagagaggaactcttgtggagagctggtttattttctgccctgtgcgacgagtttcagctggccaagaaaggagtcaagttattaaaaagcatcacaatgtagatctccaggctggttttttgttttttgttgttaagactggggaaagggggactatttattctgccttaaatcaatggcaaataagtcaagatgacattttgtgaatgtagactatggatacactcctaatagattgatgtagtcataaaagggggtcaagtagatgtttttctgttatgtaagcaataatttttccgtgtcttattgagtatggctagcgattatttattacatgctagatgggttctttgcatgtgggttccatataggtgcagaaatttcctcagccactggagggatttcgaccatatttgtcatttggatgagctgttattagattgaaatctacacatcatttcattaaaaattgtgccttagaaaacgcaaagctgttgcacatggcgataaattatggatgcagtacattgaagagagatgaagtcacttccaagtttccaagacttctcatggaggtgtttgctgttttacaggaaaaaataaaaataaaaaaagaaaaaaagaaaaaattaaaaagaaaaattgttttgaaaatgtacagatcaagtccaatattttgattatccacctgcatgttttattaaatattttgataatgtggatgtttacactttgcatgatattagcagagtaccactagtaatgcacaaacatgtacaatatggtcattcataaccgatttttatagaatactttttacatgtgcaactccatccgttatgtaaggattacatgaatattgcacattcccttctggtttcacaaacccatttatacatatttcttagtgaggctcattgtacatgtattgaagctagaatcgagtcaagaaaaataaagccccattctccaactgcaaaatgtgctttcccataatgaacactagtcaccagcacagaataatctccaacattttctaaattctaattgccaactgtttctatttatatttgatttatatttcatttggagtctgttacatggcagcttaggcagactagatcttgttttttccaatgcagcataatgagtatgatctatttcttttcaaataatctttgagatcccaggaaaaaaaaaatgctctgctccattgagctataatgtaaatgtgtttgtttaaaaaacaggtgaggcaagtgagtgatttattgttcctgaggaagtatatctgattttttttctcatactccaaaagctagtccctactctttaataaaaataatgggtaactttttgtttttcactagcgaacttccatgacatttcctttctatgtagtgtgattaatgcaatacatattatagttatctatacacagtgtaagatttaacaaactgaaatgatccacctcatatgtgagtccgtccaaaagatgttactgctctgggtgggccagtgttctatatcggttatactaactttcatttaaagtatttattctaaaatgcctctgagaaacagtaaaaaataaaaacaacaagttgtctaaaatgcaacagcttttatagtaaatgtacatttataaataaaatactcaaatcaa

SEQ ID NO: 3753 - protein, 1056 aa, Homo sapiens
MACPALGLEALQPLQPEPPPEPAFSEAQKWIEQVTGRSFGDKDFRTGLENGILLCELLNAIKPGLVKKINRLPTPIAGLDNIILFLRGCKELGLKESQLFDPSDLQDTSNRVTVKSLDYSRKLKNVLVTIYWLGKAANSCTSYSGTTLNLKEFEGLLAQMRKDTDDIESPKRSIRDSGYIDCWDSERSDSLSPPRHGRDDSFDSLDSFGSRSRQTPSPDVVLRGSSDGRGSDSESDLPHRKLPDVKKDDMSARRTSHGEPKSAVPFNQYLPNKSNQTAYVPAPLRKKKAEREEYRKSWSTATSPLGGERPFRYGPRTPVSDDAESTSMFDMRCEEEAAVQPHSRARQEQLQLINNQLREEDDKWQDDLARWKSRRRSVSQDLIKKEEERKKMEKLLAGEDGTSERRKSIKTYREIVQEKERRERELHEAYKNARSQEEAEGILQQYIERFTISEAVLERLEMPKILERSHSTEPNLSSFLNDPNPMKYLRQQSLPPPKFTATVETTIARASVLDTSMSAGSGSPSKTVTPKAVPMLTPKPYSQPKNSQDVLKTFKVDGKVSVNGETVHREEEKERECPTVAPAHSLTKSQMFEGVARVHGSPLELKQDNGSIEINIKKPNSVPQELAATTEKTEPNSQEDKNDGGKSRKGNIELASSEPQHFTTTVTRCSPTVAFVEFPSSPQLKNDVSEEKDQKKPENEMSGKVELVLSQKVVKPKSPEPEATLTFPFLDKMPEANQLHLPNLNSQVDSPSSEKSPVMTPFKFWAWDPEEERRRQEKWQQEQERLLQERYQKEQDKLKEEWEKAQKEVEEEERRYYEEERKIIEDTVVPFTVSSSSADQLSTSSSMTEGSGTMNKIDLGNCQDEKQDRRWKKSFQGDDSDLLLKTRESDRLEEKGSLTEGALAHSGNPVSKGVHEDHQLDTEAGAPHCGTNPQLAQDPSQNQQTSNPTHSSEDVKPKTLPLDKSINHQIESPSERRKSISGKKLCSSCGLPLGKGAAMIIETLNLYFHIQCFRCGICKGQLGDAVSGTDVRIRNGLLNCNDCYMRSRSAGQPTTL

SEQ ID NO: 3754 - DNA, 3770 bp, Homo sapiens
aaaaaggtggcgtatatattgacactactaaaacagatctgccaaagagcctgttgaatttttctttgtaatgcaactttttggagccaactcaagtaactggcagaagttttggtgataaagattttcggacaggtttagaaaatggaatcctcctctgcgagttgctgaatgctataaagccaggacttgttaaaaagatcaatagattgcctacccccattgcaggactggacaatattatcttattcttgagaggttgtaaagagctcggccttaaagaatctcaactttttgacccgagtgacctccaggatacatccaacagagtaacagtcaagagccttgattatagtaggaagctgaaaaatgtattagttaccatttactggctgggaaaagcagcaaacagctgcacatcctacagcggaacgacactaaacctgaaggagtttgaaggattgttggctcagatgcgaaaggacactgatgacattgaaagtcctaaacgcagtatccgagacagtggctacatcgactgctgggattccgagcgcagcgactccctctctcctcctcgccacggcagagatgattccttcgacagcctggattcctttggctctcgctctcggcagacgccttcaccagatgtagtcctcaggggaagcagcgatgggagaggaagcgactctgaatccgacttgcctcatcggaagctgccagatgtgaagaaggatgacatgtctgcacggcggacttcccatggtgagccgaaatcagcagtgccttttaaccagtacctcccgaacaaaagcaatcagacggcctacgtccccgcgcctctgagaaagaagaaagcagagagagaggaataccgcaagagctggagtaccgccacctccccgctgggtggggagaggcccttcaggagcaccagcatgtttgacatgcggtgtgaggaggaggccgcggtgcagccgcacagcagggcccgccaggagcagctgcagctgataaataaccagctgagggaagaggacgacaaatggcaagatgacctggctcgttggaagagtcgtagaagaagtgtttctcaggacttaatcaagaaagaggaagaaaggaaaaaaatggagaagttactggctggagaagatgggacaagtgaacgaaggaaaagcatcaaaacctacagagaaattgttcaagaaaaagagcggagagagagagagctgcatgaagcatataagaacgctcggtcccaggaggaggcagaggggatccttcaacagtacattgagaggttcaccatcagtgaggctgttctcgaacgcttggagatgccaaaaattctggaaagaagccattcaacagagccaaatttatcctccttcctgaatgaccccaatcccatgaaatacctgcggcaacagtcactgcctccacccaaattcactgccactgttgaaaccaccattgctcgtgccagtgttctggataccagcatgtcagcaggcagtgggtctccaagcaaaactgtcactcccaaagcagtgcctatgctgacacccaagccttactcccagcccaaaaattctcaagatgttctgaagacctttaaggtagacgggaaagtcagtgtgaatggagagacggttcatagagaggaggagaaggaaagagagtgtcccacggtggcacctgcccactccttaaccaaatcccagatgtttgaaggtgtggccagagtgcacgggtctccactggagctgaaacaagacaacggtagcatcgagatcaacataaagaagccaaactctgttccccaagagctcgcagcaaccactgagaaaacggaaccgaatagtcaagaggacaagaatgatggtggaaaatcaagaaaagggaatatagaacttgcctcatcagaaccacagcattttacaacaactgtgactcgatgcagcccgaccgtggcctttgtggaatttccctccagcccccagctgaagaatgatgtgtcggaagaaaaagaccagaagaaaccagaaaatgaaatgagtggaaaggtggagttggtgctgtcacaaaaggtggtaaagccaaaatctccagaacccgaagcaacgctgacatttccatttctggacaaaatgcctgaagccaaccaactacatttgccaaatctcaattctcaagtggattctccaagcagtgagaagtcacctgttatgacaccttttaagttctgggcatgggacccagaagaggagcgcaggcgacaggaaaaatggcaacaggaacaggaacgtttgctccaggagagataccagaaggagcaggacaagctgaaagaagagtgggaaaaggcccaaaaggaggtggaagaggaagaacgcagatactatgaggaggagcgtaagataattgaagacactgtggttccatttactgtttcttcaagttccgctgaccagctgtctacctcttcctccatgactgaaggcagtgggacaatgaataagatagacctgggaaactgtcaagatgaaaaacaagacagaagatggaagaaatcattccagggagatgacagtgacttattgctgaagactagggaaagtgatcgactggaggagaagggcagcctaactgaaggggccttggctcattctgggaaccctgtatcaaaaggagtccatgaagaccatcagctggataccgaggctggggccccacactgtggaacaaacccacagcttgctcaggatccatcccagaatcagcagacatcaaatccaacgcacagttcagaagatgtgaagccaaaaaccctcccgctggataaaagcattaaccatcagatcgagtctcccagtgaaaggcggaagtctataagtggaaagaagctgtgctcttcctgtgggcttcctttgggtaaaggagctgcaatgatcatcgagaccctcaatctctattttcacatccagtgtttcaggtgtggaatttgtaaaggccagcttggagatgcagtgagtgggacggatgttaggattcgaaatggtctcctgaactgtaatgattgctacatgcgatccagaagtgccgggcagcctacaacattgtgacacggctttcaagcttccggatcactcaccatttctttactgagagtgtcccctggcaactgcttaacaaaatcccaagctcaggggcttctcagcatttacctaatttctgaaaggctcttctgaaaggtggtatctgttctttcgtagcacagtgtttatgtttttcctgtttattgttttggttttttttttttttttgcatttgcacagtatacacaaaagaatatggggttgtaatgatcctgaatagctcaaaaaaggttttagcatggtcaaacaggcttatggtttaaaatgtgttattctcttctttgggaattagctaaatgatgcaataaacctgttttgttttagaatgtctaggaattaaacactttatgtttacagaattgagctgcagaaagtgcaagacatgccaatttgagacacacggtcttctaagactgaaggataaatttaatgcatttcagaaactaaacatcacagcaagctctatctctgagctataatttgtttttaatgcaaagacactagtttgataatatatactgtaatcctgaaacatttgtgttacttacctttggaggtagaaattataccaataaattattgcaccgttagtattagattctgtgt

SEQ ID NO: 3755 - protein, 885 aa, Homo sapiens
MRKDTDDIESPKRSIRDSGYIDCWDSERSDSLSPPRHGRDDSFDSLDSFGSRSRQTPSPDVVLRGSSDGRGSDSESDLPHRKLPDVKKDDMSARRTSHGEPKSAVPFNQYLPNKSNQTAYVPAPLRKKKAEREEYRKSWSTATSPLGGERPFRSTSMFDMRCEEEAAVQPHSRARQEQLQLINNQLREEDDKWQDDLARWKSRRRSVSQDLIKKEEERKKMEKLLAGEDGTSERRKSIKTYREIVQEKERRERELHEAYKNARSQEEAEGILQQYIERFTISEAVLERLEMPKILERSHSTEPNLSSFLNDPNPMKYLRQQSLPPPKFTATVETTIARASVLDTSMSAGSGSPSKTVTPKAVPMLTPKPYSQPKNSQDVLKTFKVDGKVSVNGETVHREEEKERECPTVAPAHSLTKSQMFEGVARVHGSPLELKQDNGSIEINIKKPNSVPQELAATTEKTEPNSQEDKNDGGKSRKGNIELASSEPQHFTTTVTRCSPTVAFVEFPSSPQLKNDVSEEKDQKKPENEMSGKVELVLSQKVVKPKSPEPEATLTFPFLDKMPEANQLHLPNLNSQVDSPSSEKSPVMTPFKFWAWDPEEERRRQEKWQQEQERLLQERYQKEQDKLKEEWEKAQKEVEEEERRYYEEERKIIEDTVVPFTVSSSSADQLSTSSSMTEGSGTMNKIDLGNCQDEKQDRRWKKSFQGDDSDLLLKTRESDRLEEKGSLTEGALAHSGNPVSKGVHEDHQLDTEAGAPHCGTNPQLAQDPSQNQQTSNPTHSSEDVKPKTLPLDKSINHQIESPSERRKSISGKKLCSSCGLPLGKGAAMIIETLNLYFHIQCFRCGICKGQLGDAVSGTDVRIRNGLLNCNDCYMRSRSAGQPTTL

SEQ ID NO: 3756 - DNA, 5470 bp, Homo sapiens
cagccgcagcagcctgcttgtggacagagcaggggttggcagtggtgacgactgttttgggaaaggaaatgtaagggcatttcggctgctgtgctggggctgacgaggagcacacaggagagatgcccctcccatctcccagagtgggttggctggagttcattgcggagcatgaggacgtgtgggggacaatattatcttattcttgagaggttgtaaagagctcggccttaaagaatctcaactttttgacccgagtgacctccaggatacatccaacagagtaacagtcaagagccttgattatagtaggaagctgaaaaatgtattagttaccatttactggctgggaaaagcagcaaacagctgcacatcctacagcggaacgacactaaacctgaaggagtttgaaggattgttggctcagatgcgaaaggacactgatgacattgaaagtcctaaacgcagtatccgagacagtggctacatcgactgctgggattccgagcgcagcgactccctctctcctcctcgccacggcagagatgattccttcgacagcctggattcctttggctctcgctctcggcagacgccttcaccagatgtagtcctcaggggaagcagcgatgggagaggaagcgactctgaatccgacttgcctcatcggaagctgccagatgtgaagaaggatgacatgtctgcacggcggacttcccatggtgagccgaaatcagcagtgccttttaaccagtacctcccgaacaaaagcaatcagacggcctacgtccccgcgcctctgagaaagaagaaagcagagagagaggaataccgcaagagctggagtaccgccacctccccgctgggtggggagaggcccttcagctttcctgaaacgatagaggaagaggggagtgaagtggggtctgctggtgaagacaacccagctggccaaatgaatcctggttggaagccttccgatggtgggtgtgaattacctgacggcagtggtaaggagcacccttcttcagacggggctgtggtggcaccagctcccaagtctgaagaaaaagatgctgctgagatccaaaagcgcaaaaggctagagcaagctggaatcaaggtcatgccagcagcacagcgctttgccagtcaaaaacaattaagtgaagagaaagaagctattcgtgatattgtccttcgcaaagaaaactctttcctgacccaccaacatggcaacgattcagaggcagaaggtgaagttgtgtgtcgactgcctgatcttgagaaggatgactttgctgcaaggagagcaaggatgaaccaaaccaagccaatggtgccattaaatcaactcctctatggcccttatccaaagaaaggggcagagaaatcagatggcagcaaacagctctcaaagggaatctcaaaaaaaagaagtctagaatataaaagaaaccagggccacacagaagaggtgaagttgatagtgacctgtaacatgagggctcaggaaagtgaacctgtggaaggaggactcaggaaggtgccagatcttcacaaggatgacctggcccagcagagaattcagggcagccttgcccctcaccgcgagcccccgagcttcattacgctctccaacataacagaagctgacttggagacgtgggagagactcaaagtgtcagaaaaggcgagggatggagatgttcagcacatctgtgcttctgagccttccccagaaattaaagcagaaactgccattcgtgatgactttgccaaccgcaaagcaagggcctctaagaaagcttccagccccaggcaaaagtttgtgcactttgggccagtgacggagctagatcagcagaaatggaagcggcttagcattggcaaggctgggcctagagaggatgaagaagaagtcatctgtcatggcagcaagattcaaatggactctgtgtctcctgtctcagcggccacttccagcttaaagggccaccaaatatttaatcgacaaaatgactgcagaacaatgaattgtggccgaggtgactattgcagaagggcctcgtggctggctcctgtgccggagtctcaggaagagtgggtctgcagtttgggcgagtgcccgagggggacagaggaagttacatccaaacagctgccacaggatggcaaagaagaaacagaaagcgctccaagagattctgagaggctgtcaaaggcagaaagatcagaggacagcagccagccactggtgtgtcctctggcctctgagtgtgaggcttcagggacagaagagaagttggagaagatgacagctcctgcctggagtggcagtggactgaaaggccagcgaaagttggatgattcacgaaaagatgacatgatggccaggagaactgggatgtcccttagacacactggatccaacccaaaccagttccttccagttccatttgcaaagcaacaggatgtggaagaatcttctaaaggtctacccatgaaagatcagagatacggtccgagaactcctgtgtctgatgacgcagagagcaccagcatgtttgacatgcggtgtgaggaggaggccgcggtgcagccgcacagcagggcccgccaggagcagctgcagctgataaataaccagctgagggaagaggacgacaaatggcaagatgacctggctcgttggaagagtcgtagaagaagtgtttctcaggacttaatcaagaaagaggaagaaaggaaaaaaatggagaagttactggctggagaagatgggacaagtgaacgaaggaaaagcatcaaaacctacagagaaattgttcaagaaaaagagcggagagagagagagctgcatgaagcatataagaacgctcggtcccaggaggaggcagaggggatccttcaacagtacattgagaggttcaccatcagtgaggctgttctcgaacgcttggagatgccaaaaattctggaaagaagccattcaacagagccaaatttatcctccttcctgaatgaccccaatcccatgaaatacctgcggcaacagtcactgcctccacccaaattcactgccactgttgaaaccaccattgctcgtgccagtgttctggataccagcatgtcagcaggcagtgggtctccaagcaaaactgtcactcccaaagcagtgcctatgctgacacccaagccttactcccagcccaaaaattctcaagatgttctgaagacctttaaggtagacgggaaagtcagtgtgaatggagagacggttcatagagaggaggagaaggaaagagagtgtcccacggtggcacctgcccactccttaaccaaatcccagatgtttgaaggtgtggccagagtgcacgggtctccactggagctgaaacaagacaacggtagcatcgagatcaacataaagaagccaaactctgttccccaagagctcgcagcaaccactgagaaaacggaaccgaatagtcaagaggacaagaatgatggtggaaaatcaagaaaagggaatatagaacttgcctcatcagaaccacagcattttacaacaactgtgactcgatgcagcccgaccgtggcctttgtggaatttccctccagcccccagctgaagaatgatgtgtcggaagaaaaagaccagaagaaaccagaaaatgaaatgagtggaaaggtggagttggtgctgtcacaaaaggtggtaaagccaaaatctccagaacccgaagcaacgctgacatttccatttctggacaaaatgcctgaagccaaccaactacatttgccaaatctcaattctcaagtggattctccaagcagtgagaagtcacctgttatgacaccttttaagttctgggcatgggacccagaagaggagcgcaggcgacaggaaaaatggcaacaggaacaggaacgtttgctccaggagagataccagaaggagcaggacaagctgaaagaagagtgggaaaaggcccaaaaggaggtggaagaggaagaacgcagatactatgaggaggagcgtaagataattgaagacactgtggttccatttactgtttcttcaagttccgctgaccagctgtctacctcttcctccatgactgaaggcagtgggacaatgaataagatagacctgggaaactgtcaagatgaaaaacaagacagaagatggaagaaatcattccagggagatgacagtgacttattgctgaagactagggaaagtgatcgactggaggagaagggcagcctaactgaaggggccttggctcattctgggaaccctgtatcaaaaggagtccatgaagaccatcagctggataccgaggctggggccccacactgtggaacaaacccacagcttgctcaggatccatcccagaatcagcagacatcaaatccaacgcacagttcagaagatgtgaagccaaaaaccctcccgctggataaaagcattaaccatcagatcgagtctcccagtgaaaggcggaagaaaagtccccgagagcacttccaggctgggcctttctctccctgttctcccacccctcccggtcagtcaccaaacaggtctataagtggaaagaagctgtgctcttcctgtgggcttcctttgggtaaaggagctgcaatgatcatcgagaccctcaatctctattttcacatccagtgtttcaggtgtggaatttgtaaaggccagcttggagatgcagtgagtgggacggatgttaggattcgaaatggtctcctgaactgtaatgattgctacatgcgatccagaagtgccgggcagcctacaacattgtgacacggctttcaagcttccggatcactcaccatttctttactgagagtgtcccctggcaactgcttaacaaaatcccaagctcaggggcttctcagcatttacctaatttctgaaaggctcttctgaaaggtggtatctgttctttcgtagcacagtgtttatgtttttcctgtttattgttttggttttttttttttttttgcatttgcacagtatacacaaaagaatatggggttgtaatgatcctgaatagctcaaaaaaggttttagcatggtcaaacaggcttatggtttaaaatgtgttattctcttctttgggaattagctaaatgatgcaataaacctgttttgttttagaatgtctaggaattaaacactttatgtttacagaattgagctgcagaaagtgcaagacatgccaatttgagacacacggtcttctaagactgaaggataaatttaatgcatttcagaaactaaacatcacagcaagctctatctctgagctataatttgtttttaatgcaaagacactagtttgataatatatactgtaatcctgaaacatttgtgttacttacctttggaggtagaaattataccaataaattattgcaccgttagtattagattctgtgt

SEQ ID NO: 3757 - protein, 1467 aa, Homo sapiens
MRKDTDDIESPKRSIRDSGYIDCWDSERSDSLSPPRHGRDDSFDSLDSFGSRSRQTPSPDVVLRGSSDGRGSDSESDLPHRKLPDVKKDDMSARRTSHGEPKSAVPFNQYLPNKSNQTAYVPAPLRKKKAEREEYRKSWSTATSPLGGERPFSFPETIEEEGSEVGSAGEDNPAGQMNPGWKPSDGGCELPDGSGKEHPSSDGAVVAPAPKSEEKDAAEIQKRKRLEQAGIKVMPAAQRFASQKQLSEEKEAIRDIVLRKENSFLTHQHGNDSEAEGEVVCRLPDLEKDDFAARRARMNQTKPMVPLNQLLYGPYPKKGAEKSDGSKQLSKGISKKRSLEYKRNQGHTEEVKLIVTCNMRAQESEPVEGGLRKVPDLHKDDLAQQRIQGSLAPHREPPSFITLSNITEADLETWERLKVSEKARDGDVQHICASEPSPEIKAETAIRDDFANRKARASKKASSPRQKFVHFGPVTELDQQKWKRLSIGKAGPREDEEEVICHGSKIQMDSVSPVSAATSSLKGHQIFNRQNDCRTMNCGRGDYCRRASWLAPVPESQEEWVCSLGECPRGTEEVTSKQLPQDGKEETESAPRDSERLSKAERSEDSSQPLVCPLASECEASGTEEKLEKMTAPAWSGSGLKGQRKLDDSRKDDMMARRTGMSLRHTGSNPNQFLPVPFAKQQDVEESSKGLPMKDQRYGPRTPVSDDAESTSMFDMRCEEEAAVQPHSRARQEQLQLINNQLREEDDKWQDDLARWKSRRRSVSQDLIKKEEERKKMEKLLAGEDGTSERRKSIKTYREIVQEKERRERELHEAYKNARSQEEAEGILQQYIERFTISEAVLERLEMPKILERSHSTEPNLSSFLNDPNPMKYLRQQSLPPPKFTATVETTIARASVLDTSMSAGSGSPSKTVTPKAVPMLTPKPYSQPKNSQDVLKTFKVDGKVSVNGETVHREEEKERECPTVAPAHSLTKSQMFEGVARVHGSPLELKQDNGSIEINIKKPNSVPQELAATTEKTEPNSQEDKNDGGKSRKGNIELASSEPQHFTTTVTRCSPTVAFVEFPSSPQLKNDVSEEKDQKKPENEMSGKVELVLSQKVVKPKSPEPEATLTFPFLDKMPEANQLHLPNLNSQVDSPSSEKSPVMTPFKFWAWDPEEERRRQEKWQQEQERLLQERYQKEQDKLKEEWEKAQKEVEEEERRYYEEERKIIEDTVVPFTVSSSSADQLSTSSSMTEGSGTMNKIDLGNCQDEKQDRRWKKSFQGDDSDLLLKTRESDRLEEKGSLTEGALAHSGNPVSKGVHEDHQLDTEAGAPHCGTNPQLAQDPSQNQQTSNPTHSSEDVKPKTLPLDKSINHQIESPSERRKKSPREHFQAGPFSPCSPTPPGQSPNRSISGKKLCSSCGLPLGKGAAMIIETLNLYFHIQCFRCGICKGQLGDAVSGTDVRIRNGLLNCNDCYMRSRSAGQPTTL

SEQ ID NO: 3758 - DNA, 3451 bp, Homo sapiens
agcctgcttgtggacagagcaggggttggcagtggtgacgactgttttgggaaaggaaatgtaagggcatttcggctgctgtgctggggctgacgaggagcacacaggagagatgcccctcccatctcccagagtgggttggctggagttcattgcggagcatgaggacgtgtgggggacaatattatcttattcttgagaggttgtaaagagctcggccttaaagaatctcaactttttgacccgagtgacctccaggatacatccaacagagtaacagtcaagtattagttaccatttactggctgggaaaagcagcaaacagctgcacatcctacagcggaacgacactaaacctgaaggagtttgaaggattgttggctcagatgcgaaaggacactgatgacattgaaagtcctaaacgcagtatccgagacagtggctacatcgactgctgggattccgagcgcagcgactccctctctcctcctcgccacggcagagatgattccttcgacagcctggattcctttggctctcgctctcggcagacgccttcaccagatgtagtcctcaggggaagcagcgatgggagaggaagcgactctgaatccgacttgcctcatcggaagctgccagatgtgaagaaggatgacatgtctgcacggcggacttcccatggtgagccgaaatcagcagtgccttttaaccagtacctcccgaacaaaagcaatcagacggcctacgtccccgcgcctctgagaaagaagaaagcagagagagaggaataccgcaagagctggagtaccgccacctccccgctgggtggggagaggcccttcagatacggtccgagaactcctgtgtctgatgacgcagagagcaccagcatgtttgacatgcggtgtgaggaggaggccgcggtgcagccgcacagcagggcccgccaggagcagctgcagctgataaataaccagctgagggaagaggacgacaaatggcaagatgacctggctcgttggaagagtcgtagaagaagtgtttctcaggacttaatcaagaaagaggaagaaaggaaaaaaatggagaagttactggctggagaagatgggacaagtgaacgaaggaaaagcatcaaaacctacagagaaattgttcaagaaaaagagcggagagagagagagctgcatgaagcatataagaacgctcggtcccaggaggaggcagaggggatccttcaacagtacattgagaggttcaccatcagtgaggctgttctcgaacgcttggagatgccaaaaattctggaaagaagccattcaacagagccaaatttatcctccttcctgaatgaccccaatcccatgaaatacctgcggcaacagtcactgcctccacccaaattcactgccactgttgaaaccaccattgctcgtgccagtgttctggataccagcatgtcagcaggcagtgggtctccaagcaaaactgtcactcccaaagcagtgcctatgctgacacccaagccttactcccagcccaaaaattctcaagatgttctgaagacctttaaggtagacgggaaagtcagtgtgaatggagagacggttcatagagaggaggagaaggaaagagagtgtcccacggtggcacctgcccactccttaaccaaatcccagatgtttgaaggtgtggccagagtgcacgggtctccactggagctgaaacaagacaacggtagcatcgagatcaacataaagaagccaaactctgttccccaagagctcgcagcaaccactgagaaaacggaaccgaatagtcaagaggacaagaatgatggtggaaaatcaagaaaagggaatatagaacttgcctcatcagaaccacagcattttacaacaactgtgactcgatgcagcccgaccgtggcctttgtggaatttccctccagcccccagctgaagaatgatgtgtcggaagaaaaagaccagaagaaaccagaaaatgaaatgagtggaaaggtggagttggtgctgtcacaaaaggtggtaaagccaaaatctccagaacccgaagcaacgctgacatttccatttctggacaaaatgcctgaagccaaccaactacatttgccaaatctcaattctcaagtggattctccaagcagtgagaagtcacctgttatgacaccttttaagttctgggcatgggacccagaagaggagcgcaggcgacaggaaaaatggcaacaggaacaggaacgtttgctccaggagagataccagaaggagcaggacaagctgaaagaagagtgggaaaaggcccaaaaggaggtggaagaggaagaacgcagatactatgaggaggagcgtaagataattgaagacactgtggttccatttactgtttcttcaagttccgctgaccagctgtctacctcttcctccatgactgaaggcagtgggacaatgaataagatagacctgggaaactgtcaagatgaaaaacaagacagaagatggaagaaatcattccagggagatgacagtgacttattgctgaagactagggaaagtgatcgactggaggagaagggcagcctaactgaaggggccttggctcattctgggaaccctgtatcaaaaggagtccatgaagaccatcagctggataccgaggctggggccccacactgtggaacaaacccacagcttgctcaggatccatcccagaatcagcagacatcaaatccaacgcacagttcagaagatgtgaagccaaaaaccctcccgctggataaaagcattaaccatcagatcgagtctcccagtgaaaggcggaagtctataagtggaaagaagctgtgctcttcctgtgggcttcctttgggtaaaggagctgcaatgatcatcgagaccctcaatctctattttcacatccagtgtttcaggtgtggaatttgtaaaggccagcttggagatgcagtgagtgggacggatgttaggattcgaaatggtctcctgaactgtaatgattgctacatgcgatccagaagtgccgggcagcctacaacattgtgacacggctttcaagcttccggatcactcaccatttctttactgagagtgtcccctggcaactgcttaacaaaatcccaagctcaggggcttctcagcatttacctaatttctgaaaggctcttctgaaaggtggtatctgttctttcgtagcacagtgtttatgtttttcctgtttattgttttggttttttttttttttttgcatttgcacagtatacacaaaagaatatggggttgtaatgatcctgaatagctcaaaaaaggttttagcatggtcaaacaggcttatggtttaaaatgtgttattctcttctttgggaattagctaaatgatgcaataaacctgttttgttttagaatgtctaggaatt

SEQ ID NO: 3759 - protein, 897 aa, Homo sapiens
MRKDTDDIESPKRSIRDSGYIDCWDSERSDSLSPPRHGRDDSFDSLDSFGSRSRQTPSPDVVLRGSSDGRGSDSESDLPHRKLPDVKKDDMSARRTSHGEPKSAVPFNQYLPNKSNQTAYVPAPLRKKKAEREEYRKSWSTATSPLGGERPFRYGPRTPVSDDAESTSMFDMRCEEEAAVQPHSRARQEQLQLINNQLREEDDKWQDDLARWKSRRRSVSQDLIKKEEERKKMEKLLAGEDGTSERRKSIKTYREIVQEKERRERELHEAYKNARSQEEAEGILQQYIERFTISEAVLERLEMPKILERSHSTEPNLSSFLNDPNPMKYLRQQSLPPPKFTATVETTIARASVLDTSMSAGSGSPSKTVTPKAVPMLTPKPYSQPKNSQDVLKTFKVDGKVSVNGETVHREEEKERECPTVAPAHSLTKSQMFEGVARVHGSPLELKQDNGSIEINIKKPNSVPQELAATTEKTEPNSQEDKNDGGKSRKGNIELASSEPQHFTTTVTRCSPTVAFVEFPSSPQLKNDVSEEKDQKKPENEMSGKVELVLSQKVVKPKSPEPEATLTFPFLDKMPEANQLHLPNLNSQVDSPSSEKSPVMTPFKFWAWDPEEERRRQEKWQQEQERLLQERYQKEQDKLKEEWEKAQKEVEEEERRYYEEERKIIEDTVVPFTVSSSSADQLSTSSSMTEGSGTMNKIDLGNCQDEKQDRRWKKSFQGDDSDLLLKTRESDRLEEKGSLTEGALAHSGNPVSKGVHEDHQLDTEAGAPHCGTNPQLAQDPSQNQQTSNPTHSSEDVKPKTLPLDKSINHQIESPSERRKSISGKKLCSSCGLPLGKGAAMIIETLNLYFHIQCFRCGICKGQLGDAVSGTDVRIRNGLLNCNDCYMRSRSAGQPTTL

SEQ ID NO: 3760 - DNA, 5706 bp, Homo sapiens
cagagcaggaatttcccttcaaggtagcaggagatgaacgcgtgctgctccaggattttacagaactgattctgcagcaaagacaaatgttgcctgtatttgccagatagtataaacaggagcaaaagttgcacagctaaaccaggggctcattcccaggacagacatgcagttatggattccgaaagacaagtcaaggacactgatgacattgaaagtcctaaacgcagtatccgagacagtggctacatcgactgctgggattccgagcgcagcgactccctctctcctcctcgccacggcagagatgattccttcgacagcctggattcctttggctctcgctctcggcagacgccttcaccagatgtagtcctcaggggaagcagcgatgggagaggaagcgactctgaatccgacttgcctcatcggaagctgccagatgtgaagaaggatgacatgtctgcacggcggacttcccatggtgagccgaaatcagcagtgccttttaaccagtacctcccgaacaaaagcaatcagacggcctacgtccccgcgcctctgagaaagaagaaagcagagagagaggaataccgcaagagctggagtaccgccacctccccgctgggtggggagaggcccttcaggagcaccagcatgtttgacatgcggtgtgaggaggaggccgcggtgcagccgcacagcagggcccgccaggagcagctgcagctgataaataaccagctgagggaagaggacgacaaatggcaagatgacctggctcgttggaagagtcgtagaagaagtgtttctcaggacttaatcaagaaagaggaagaaaggaaaaaaatggagaagttactggctggagaagatgggacaagtgaacgaaggaaaagcatcaaaacctacagagaaattgttcaagaaaaagagcggagagagagagagctgcatgaagcatataagaacgctcggtcccaggaggaggcagaggggatccttcaacagtacattgagaggttcaccatcagtgaggctgttctcgaacgcttggagatgccaaaaattctggaaagaagccattcaacagagccaaatttatcctccttcctgaatgaccccaatcccatgaaatacctgcggcaacagtcactgcctccacccaaattcactgccactgttgaaaccaccattgctcgtgccagtgttctggataccagcatgtcagcaggcagtgggtctccaagcaaaactgtcactcccaaagcagtgcctatgctgacacccaagccttactcccagcccaaaaattctcaagatgttctgaagacctttaaggtagacgggaaagtcagtgtgaatggagagacggttcatagagaggaggagaaggaaagagagtgtcccacggtggcacctgcccactccttaaccaaatcccagatgtttgaaggtgtggccagagtgcacgggtctccactggagctgaaacaagacaacggtagcatcgagatcaacataaagaagccaaactctgttccccaagagctcgcagcaaccactgagaaaacggaaccgaatagtcaagaggacaagaatgatggtggaaaatcaagaaaagggaatatagaacttgcctcatcagaaccacagcattttacaacaactgtgactcgatgcagcccgaccgtggcctttgtggaatttccctccagcccccagctgaagaatgatgtgtcggaagaaaaagaccagaagaaaccagaaaatgaaatgagtggaaaggtggagttggtgctgtcacaaaaggtggtaaagccaaaatctccagaacccgaagcaacgctgacatttccatttctggacaaaatgcctgaagccaaccaactacatttgccaaatctcaattctcaagtggattctccaagcagtgagaagtcacctgttatgacaccttttaagttctgggcatgggacccagaagaggagcgcaggcgacaggaaaaatggcaacaggaacaggaacgtttgctccaggagagataccagaaggagcaggacaagctgaaagaagagtgggaaaaggcccaaaaggaggtggaagaggaagaacgcagatactatgaggaggagcgtaagataattgaagacactgtggttccatttactgtttcttcaagttccgctgaccagctgtctacctcttcctccatgactgaaggcagtgggacaatgaataagatagacctgggaaactgtcaagatgaaaaacaagacagaagatggaagaaatcattccagggagatgacagtgacttattgctgaagactagggaaagtgatcgactggaggagaagggcagcctaactgaaggggccttggctcattctgggaaccctgtatcaaaaggagtccatgaagaccatcagctggataccgaggctggggccccacactgtggaacaaacccacagcttgctcaggatccatcccagaatcagcagacatcaaatccaacgcacagttcagaagatgtgaagccaaaaaccctcccgctggataaaagcattaaccatcagatcgagtctcccagtgaaaggcggaagtctataagtggaaagaagctgtgctcttcctgtgggcttcctttgggtaaaggagctgcaatgatcatcgagaccctcaatctctattttcacatccagtgtttcaggtgtggaatttgtaaaggccagcttggagatgcagtgagtgggacggatgttaggattcgaaatggtctcctgaactgtaatgattgctacatgcgatccagaagtgccgggcagcctacaacattgtgacacggctttcaagcttccggatcactcaccatttctttactgagagtgtcccctggcaactgcttaacaaaatcccaagctcaggggcttctcagcatttacctaatttctgaaaggctcttctgaaaggtggtatctgttctttcgtagcacagtgtttatgtttttcctgtttattgttttggttttttttttttttttgcatttgcacagtatacacaaaagaatatggggttgtaatgatcctgaatagctcaaaaaaggttttagcatggtcaaacaggcttatggtttaaaatgtgttattctcttctttgggaattagctaaatgatgcaataaacctgttttgttttagaatgtctaggaattaaacactttatgtttacagaattgagctgcagaaagtgcaagacatgccaatttgagacacacggtcttctaagactgaaggataaatttaatgcatttcagaaactaaacatcacagcaagctctatctctgagctataatttgtttttaatgcaaagacactagtttgataatatatactgtaatcctgaaacatttgtgttacttacctttggaggtagaaattataccaataaattattgcaccgttagtattagattctgtgtaccttggaagttatgtcattaatataggctggttcatcaaataaagcaaaaccttgcaatatcagctagatttacactccgggacgttgcccaaaggtaggaagaaagcagagggaaatatttcagtcatcatttccaaagtcattatcaaaatctgtgaggaagtttaatcttccaaagagtcaatgtcagacatcaggcctctgttgcctgcttctctcgaggcactagattaggagtcttcaataagagacttaacatgaggtatatggaagatgaggcaccgagataagttcatcattaggtgtgagcactgctcacccttgctggcaagttctccttaagggcctgaagcacaggtgtccaaagaaaagcgttaagtccatcttaatagaatctatgtggtatatgatgtggtcagcccctggtctgtgatcagcaagaacctacagcacagattatgccctgcccacttcaatgaatacctactctcctccattctccatcactttttttgctatcaagaactccggaccttgcccatggagaagtttagagaggaactcttgtggagagctggtttattttctgccctgtgcgacgagtttcagctggccaagaaaggagtcaagttattaaaaagcatcacaatgtagatctccaggctggttttttgttttttgttgttaagactggggaaagggggactatttattctgccttaaatcaatggcaaataagtcaagatgacattttgtgaatgtagactatggatacactcctaatagattgatgtagtcataaaagggggtcaagtagatgtttttctgttatgtaagcaataatttttccgtgtcttattgagtatggctagcgattatttattacatgctagatgggttctttgcatgtgggttccatataggtgcagaaatttcctcagccactggagggatttcgaccatatttgtcatttggatgagctgttattagattgaaatctacacatcatttcattaaaaattgtgccttagaaaacgcaaagctgttgcacatggcgataaattatggatgcagtacattgaagagagatgaagtcacttccaagtttccaagacttctcatggaggtgtttgctgttttacaggaaaaaataaaaataaaaaaagaaaaaaagaaaaaattaaaaagaaaaattgttttgaaaatgtacagatcaagtccaatattttgattatccacctgcatgttttattaaatattttgataatgtggatgtttacactttgcatgatattagcagagtaccactagtaatgcacaaacatgtacaatatggtcattcataaccgatttttatagaatactttttacatgtgcaactccatccgttatgtaaggattacatgaatattgcacattcccttctggtttcacaaacccatttatacatatttcttagtgaggctcattgtacatgtattgaagctagaatcgagtcaagaaaaataaagccccattctccaactgcaaaatgtgctttcccataatgaacactagtcaccagcacagaataatctccaacattttctaaattctaattgccaactgtttctatttatatttgatttatatttcatttggagtctgttacatggcagcttaggcagactagatcttgttttttccaatgcagcataatgagtatgatctatttcttttcaaataatctttgagatcccaggaaaaaaaaaatgctctgctccattgagctataatgtaaatgtgtttgtttaaaaaacaggtgaggcaagtgagtgatttattgttcctgaggaagtatatctgattttttttctcatactccaaaagctagtccctactctttaataaaaataatgggtaactttttgtttttcactagcgaacttccatgacatttcctttctatgtagtgtgattaatgcaatacatattatagttatctatacacagtgtaagatttaacaaactgaaatgatccacctcatatgtgagtccgtccaaaagatgttactgctctgggtgggccagtgttctatatcggttatactaactttcatttaaagtatttattctaaaatgcctctgagaaacagtaaaaaataaaaacaacaagttgtctaaaatgcaacagcttttatagtaaatgtacatttataaataaaatactcaaatcaa

SEQ ID NO: 3761 - protein, 890 aa, Homo sapiens
MDSERQVKDTDDIESPKRSIRDSGYIDCWDSERSDSLSPPRHGRDDSFDSLDSFGSRSRQTPSPDVVLRGSSDGRGSDSESDLPHRKLPDVKKDDMSARRTSHGEPKSAVPFNQYLPNKSNQTAYVPAPLRKKKAEREEYRKSWSTATSPLGGERPFRSTSMFDMRCEEEAAVQPHSRARQEQLQLINNQLREEDDKWQDDLARWKSRRRSVSQDLIKKEEERKKMEKLLAGEDGTSERRKSIKTYREIVQEKERRERELHEAYKNARSQEEAEGILQQYIERFTISEAVLERLEMPKILERSHSTEPNLSSFLNDPNPMKYLRQQSLPPPKFTATVETTIARASVLDTSMSAGSGSPSKTVTPKAVPMLTPKPYSQPKNSQDVLKTFKVDGKVSVNGETVHREEEKERECPTVAPAHSLTKSQMFEGVARVHGSPLELKQDNGSIEINIKKPNSVPQELAATTEKTEPNSQEDKNDGGKSRKGNIELASSEPQHFTTTVTRCSPTVAFVEFPSSPQLKNDVSEEKDQKKPENEMSGKVELVLSQKVVKPKSPEPEATLTFPFLDKMPEANQLHLPNLNSQVDSPSSEKSPVMTPFKFWAWDPEEERRRQEKWQQEQERLLQERYQKEQDKLKEEWEKAQKEVEEEERRYYEEERKIIEDTVVPFTVSSSSADQLSTSSSMTEGSGTMNKIDLGNCQDEKQDRRWKKSFQGDDSDLLLKTRESDRLEEKGSLTEGALAHSGNPVSKGVHEDHQLDTEAGAPHCGTNPQLAQDPSQNQQTSNPTHSSEDVKPKTLPLDKSINHQIESPSERRKSISGKKLCSSCGLPLGKGAAMIIETLNLYFHIQCFRCGICKGQLGDAVSGTDVRIRNGLLNCNDCYMRSRSAGQPTTL

SEQ ID NO: 3762 - DNA, 5742 bp, Homo sapiens
cagagcaggaatttcccttcaaggtagcaggagatgaacgcgtgctgctccaggattttacagaactgattctgcagcaaagacaaatgttgcctgtatttgccagatagtataaacaggagcaaaagttgcacagctaaaccaggggctcattcccaggacagacatgcagttatggattccgaaagacaagtcaaggacactgatgacattgaaagtcctaaacgcagtatccgagacagtggctacatcgactgctgggattccgagcgcagcgactccctctctcctcctcgccacggcagagatgattccttcgacagcctggattcctttggctctcgctctcggcagacgccttcaccagatgtagtcctcaggggaagcagcgatgggagaggaagcgactctgaatccgacttgcctcatcggaagctgccagatgtgaagaaggatgacatgtctgcacggcggacttcccatggtgagccgaaatcagcagtgccttttaaccagtacctcccgaacaaaagcaatcagacggcctacgtccccgcgcctctgagaaagaagaaagcagagagagaggaataccgcaagagctggagtaccgccacctccccgctgggtggggagaggcccttcagatacggtccgagaactcctgtgtctgatgacgcagagagcaccagcatgtttgacatgcggtgtgaggaggaggccgcggtgcagccgcacagcagggcccgccaggagcagctgcagctgataaataaccagctgagggaagaggacgacaaatggcaagatgacctggctcgttggaagagtcgtagaagaagtgtttctcaggacttaatcaagaaagaggaagaaaggaaaaaaatggagaagttactggctggagaagatgggacaagtgaacgaaggaaaagcatcaaaacctacagagaaattgttcaagaaaaagagcggagagagagagagctgcatgaagcatataagaacgctcggtcccaggaggaggcagaggggatccttcaacagtacattgagaggttcaccatcagtgaggctgttctcgaacgcttggagatgccaaaaattctggaaagaagccattcaacagagccaaatttatcctccttcctgaatgaccccaatcccatgaaatacctgcggcaacagtcactgcctccacccaaattcactgccactgttgaaaccaccattgctcgtgccagtgttctggataccagcatgtcagcaggcagtgggtctccaagcaaaactgtcactcccaaagcagtgcctatgctgacacccaagccttactcccagcccaaaaattctcaagatgttctgaagacctttaaggtagacgggaaagtcagtgtgaatggagagacggttcatagagaggaggagaaggaaagagagtgtcccacggtggcacctgcccactccttaaccaaatcccagatgtttgaaggtgtggccagagtgcacgggtctccactggagctgaaacaagacaacggtagcatcgagatcaacataaagaagccaaactctgttccccaagagctcgcagcaaccactgagaaaacggaaccgaatagtcaagaggacaagaatgatggtggaaaatcaagaaaagggaatatagaacttgcctcatcagaaccacagcattttacaacaactgtgactcgatgcagcccgaccgtggcctttgtggaatttccctccagcccccagctgaagaatgatgtgtcggaagaaaaagaccagaagaaaccagaaaatgaaatgagtggaaaggtggagttggtgctgtcacaaaaggtggtaaagccaaaatctccagaacccgaagcaacgctgacatttccatttctggacaaaatgcctgaagccaaccaactacatttgccaaatctcaattctcaagtggattctccaagcagtgagaagtcacctgttatgacaccttttaagttctgggcatgggacccagaagaggagcgcaggcgacaggaaaaatggcaacaggaacaggaacgtttgctccaggagagataccagaaggagcaggacaagctgaaagaagagtgggaaaaggcccaaaaggaggtggaagaggaagaacgcagatactatgaggaggagcgtaagataattgaagacactgtggttccatttactgtttcttcaagttccgctgaccagctgtctacctcttcctccatgactgaaggcagtgggacaatgaataagatagacctgggaaactgtcaagatgaaaaacaagacagaagatggaagaaatcattccagggagatgacagtgacttattgctgaagactagggaaagtgatcgactggaggagaagggcagcctaactgaaggggccttggctcattctgggaaccctgtatcaaaaggagtccatgaagaccatcagctggataccgaggctggggccccacactgtggaacaaacccacagcttgctcaggatccatcccagaatcagcagacatcaaatccaacgcacagttcagaagatgtgaagccaaaaaccctcccgctggataaaagcattaaccatcagatcgagtctcccagtgaaaggcggaagtctataagtggaaagaagctgtgctcttcctgtgggcttcctttgggtaaaggagctgcaatgatcatcgagaccctcaatctctattttcacatccagtgtttcaggtgtggaatttgtaaaggccagcttggagatgcagtgagtgggacggatgttaggattcgaaatggtctcctgaactgtaatgattgctacatgcgatccagaagtgccgggcagcctacaacattgtgacacggctttcaagcttccggatcactcaccatttctttactgagagtgtcccctggcaactgcttaacaaaatcccaagctcaggggcttctcagcatttacctaatttctgaaaggctcttctgaaaggtggtatctgttctttcgtagcacagtgtttatgtttttcctgtttattgttttggttttttttttttttttgcatttgcacagtatacacaaaagaatatggggttgtaatgatcctgaatagctcaaaaaaggttttagcatggtcaaacaggcttatggtttaaaatgtgttattctcttctttgggaattagctaaatgatgcaataaacctgttttgttttagaatgtctaggaattaaacactttatgtttacagaattgagctgcagaaagtgcaagacatgccaatttgagacacacggtcttctaagactgaaggataaatttaatgcatttcagaaactaaacatcacagcaagctctatctctgagctataatttgtttttaatgcaaagacactagtttgataatatatactgtaatcctgaaacatttgtgttacttacctttggaggtagaaattataccaataaattattgcaccgttagtattagattctgtgtaccttggaagttatgtcattaatataggctggttcatcaaataaagcaaaaccttgcaatatcagctagatttacactccgggacgttgcccaaaggtaggaagaaagcagagggaaatatttcagtcatcatttccaaagtcattatcaaaatctgtgaggaagtttaatcttccaaagagtcaatgtcagacatcaggcctctgttgcctgcttctctcgaggcactagattaggagtcttcaataagagacttaacatgaggtatatggaagatgaggcaccgagataagttcatcattaggtgtgagcactgctcacccttgctggcaagttctccttaagggcctgaagcacaggtgtccaaagaaaagcgttaagtccatcttaatagaatctatgtggtatatgatgtggtcagcccctggtctgtgatcagcaagaacctacagcacagattatgccctgcccacttcaatgaatacctactctcctccattctccatcactttttttgctatcaagaactccggaccttgcccatggagaagtttagagaggaactcttgtggagagctggtttattttctgccctgtgcgacgagtttcagctggccaagaaaggagtcaagttattaaaaagcatcacaatgtagatctccaggctggttttttgttttttgttgttaagactggggaaagggggactatttattctgccttaaatcaatggcaaataagtcaagatgacattttgtgaatgtagactatggatacactcctaatagattgatgtagtcataaaagggggtcaagtagatgtttttctgttatgtaagcaataatttttccgtgtcttattgagtatggctagcgattatttattacatgctagatgggttctttgcatgtgggttccatataggtgcagaaatttcctcagccactggagggatttcgaccatatttgtcatttggatgagctgttattagattgaaatctacacatcatttcattaaaaattgtgccttagaaaacgcaaagctgttgcacatggcgataaattatggatgcagtacattgaagagagatgaagtcacttccaagtttccaagacttctcatggaggtgtttgctgttttacaggaaaaaataaaaataaaaaaagaaaaaaagaaaaaattaaaaagaaaaattgttttgaaaatgtacagatcaagtccaatattttgattatccacctgcatgttttattaaatattttgataatgtggatgtttacactttgcatgatattagcagagtaccactagtaatgcacaaacatgtacaatatggtcattcataaccgatttttatagaatactttttacatgtgcaactccatccgttatgtaaggattacatgaatattgcacattcccttctggtttcacaaacccatttatacatatttcttagtgaggctcattgtacatgtattgaagctagaatcgagtcaagaaaaataaagccccattctccaactgcaaaatgtgctttcccataatgaacactagtcaccagcacagaataatctccaacattttctaaattctaattgccaactgtttctatttatatttgatttatatttcatttggagtctgttacatggcagcttaggcagactagatcttgttttttccaatgcagcataatgagtatgatctatttcttttcaaataatctttgagatcccaggaaaaaaaaaatgctctgctccattgagctataatgtaaatgtgtttgtttaaaaaacaggtgaggcaagtgagtgatttattgttcctgaggaagtatatctgattttttttctcatactccaaaagctagtccctactctttaataaaaataatgggtaactttttgtttttcactagcgaacttccatgacatttcctttctatgtagtgtgattaatgcaatacatattatagttatctatacacagtgtaagatttaacaaactgaaatgatccacctcatatgtgagtccgtccaaaagatgttactgctctgggtgggccagtgttctatatcggttatactaactttcatttaaagtatttattctaaaatgcctctgagaaacagtaaaaaataaaaacaacaagttgtctaaaatgcaacagcttttatagtaaatgtacatttataaataaaatactcaaatcaa

SEQ ID NO: 3763 - protein, 902 aa, Homo sapiens
MDSERQVKDTDDIESPKRSIRDSGYIDCWDSERSDSLSPPRHGRDDSFDSLDSFGSRSRQTPSPDVVLRGSSDGRGSDSESDLPHRKLPDVKKDDMSARRTSHGEPKSAVPFNQYLPNKSNQTAYVPAPLRKKKAEREEYRKSWSTATSPLGGERPFRYGPRTPVSDDAESTSMFDMRCEEEAAVQPHSRARQEQLQLINNQLREEDDKWQDDLARWKSRRRSVSQDLIKKEEERKKMEKLLAGEDGTSERRKSIKTYREIVQEKERRERELHEAYKNARSQEEAEGILQQYIERFTISEAVLERLEMPKILERSHSTEPNLSSFLNDPNPMKYLRQQSLPPPKFTATVETTIARASVLDTSMSAGSGSPSKTVTPKAVPMLTPKPYSQPKNSQDVLKTFKVDGKVSVNGETVHREEEKERECPTVAPAHSLTKSQMFEGVARVHGSPLELKQDNGSIEINIKKPNSVPQELAATTEKTEPNSQEDKNDGGKSRKGNIELASSEPQHFTTTVTRCSPTVAFVEFPSSPQLKNDVSEEKDQKKPENEMSGKVELVLSQKVVKPKSPEPEATLTFPFLDKMPEANQLHLPNLNSQVDSPSSEKSPVMTPFKFWAWDPEEERRRQEKWQQEQERLLQERYQKEQDKLKEEWEKAQKEVEEEERRYYEEERKIIEDTVVPFTVSSSSADQLSTSSSMTEGSGTMNKIDLGNCQDEKQDRRWKKSFQGDDSDLLLKTRESDRLEEKGSLTEGALAHSGNPVSKGVHEDHQLDTEAGAPHCGTNPQLAQDPSQNQQTSNPTHSSEDVKPKTLPLDKSINHQIESPSERRKSISGKKLCSSCGLPLGKGAAMIIETLNLYFHIQCFRCGICKGQLGDAVSGTDVRIRNGLLNCNDCYMRSRSAGQPTTL

SEQ ID NO: 3764 - DNA, 891 bp, Homo sapiens
acaaacaacaacaaacaagagtggtaggcaacatttctcgcttcagacattttaaaacctccctaatgagcaactgcctttaccaaagtctcctcttcctggggaccagaaacttctcccatcctgctacttgaagtgtggccccaggacaagtagtactggcatcacctggagtctgtttgaaatccgggctcttaagccgcattccagacccacttaacgtggtgcccaggcactacagttgtgatgaggcaattgcaacatttgaaaagaccccagggagtttgcattaaatgcgtttcacaagagtgaatgatggaacagaacaccatgtacaaagacacagtcatccaacacccaagcacaaatggcacaagttaaacatgtgacggcttgatgtatgacaggattggaccagattatctctacaatttcttccagtgcaaacactctgtgaatgaaggcacttgccttctctctaaactggaagcctcttgagggcaggactgcatctacctcctctctgtacccctgcagcacccagtacagtgcccagcaatggactggaaccaaaccagcagagcaaaaccaggtgagaggataccttgaggacaccttcagcaacccatctgaaactagatagctgtcctctgaaaggcagcttttatataactaagatcacattgcaatgatgccaaatgtctgagaaactcttggaattacacaaggaatttaaaaatatgcaatatcatttgaaaaccagcaggatacagagggacaggagaaacagaaaggaagacagtagaaaagaggaagagttccccaatcaaatgctatttattaggatttccctcttatccagtagttaaatgaaatttctacatcaaagaa

SEQ ID NO: 3765 - protein, 33 aa, Homo sapiens
MYDRIGPDYLYNFFQCKHSVNEGTCLLSKLEAS

SEQ ID NO: 3766 - DNA, 301 bp, Homo sapiens
aacaagtgacagtgtttgacagaccttatatctcctttctatcacaccaaaatctctgtagtgagctcaggcaatgttttgacctgctggtgtgctgatgcacttcaggataaaaagaattggtccacattgtagcaataacttccaggaagaaacgagtggttgtggagctgataagtggtagcaggttgactccaaagcctagcgtcttaacctctatcatacaccgtttctcaatcaaaatggaagaaccattttaaacacattaaaccctagtggctttaaataaacacatggccaa

SEQ ID NO: 3767 - protein, 41 aa, Homo sapiens
QCLTDLISPFYHTKISVVSSGNVLTCWCADALQDKKNWSTL

SEQ ID NO: 3768 - DNA, 2414 bp, Homo sapiens
accaactcatcaatgtctccacgccctacattcaggagtttcattacgtcatatgtgttcccaactgaatggaaagttccttgagagacaacaatgagggttccacttctctgtggattcttccccacctcccacctctacaatatcttagtaacaatatgcgcttaacaaattatttgctgccttagtaagtgagaagcctgcttgctttcccgtcttgcatccgggcctcctactgtggaaggtgcatgttagtttgcggggcagcagggggtgctgttgcctagccgctgtttagaaaatctgaaaatggccagtggcttgcctcggaatgtttcctcattctccatcatgagtacagtccttctggtgggtcacctagacagcagaagaccttttagtgcagattcatcagtcagaaactcttttaaaaaattggagtgaagatagggagtgtgaaattcaagaatgactatttctcaaagtgaagtcacgtttttactgcctttttacatggatctcaaatctctgcaagactgaaaactttgagaataaaaattgaaggtgccgggcagcctacaacattgtgacacggctttcaagcttccggatcactcaccatttctttactgagagtgtcccctggcaactgcttaacaaaatcccaagctcaggggcttctcagcatttacctaatttctgaaaggctcttctgaaagaactccggaccttgcccatggagaagtttagagaggaactcttgtggagagctggtttattttctgccctgtgcgacgagtttcagctggccaagaaaggagtcaagttattaaaaagcatcacaatgtagatctccaggctggttttttgttttttgttgttaagactggggaaagggggactatttattctgccttaaatcaatggcaaataagtcaagatgacattttgtgaatgtagactatggatacactcctaatagattgatgtagtcataaaagggggtcaagtagatgtttttctgttatgtaagcaataatttttccgtgtcttattgagtatggctagcgattatttattacatgctagatgggttctttgcatgtgggttccatataggtgcagaaatttcctcagccactggagggatttcgaccatatttgtcatttggatgagctgttattagattgaaatctacacatcatttcattaaaaattgtgccttagaaaacgcaaagctgttgcacatggcgataaattatggatgcagtacattgaagagagatgaagtcacttccaagtttccaagacttctcatggaggtgtttgctgttttacaggaaaaaataaaaataaaaaaagaaaaaaagaaaaaattaaaaagaaaaattgttttgaaaatgtacagatcaagtccaatattttgattatccacctgcatgttttattaaatattttgataatgtggatgtttacactttgcatgatattagcagagtaccactagtaatgcacaaacatgtacaatatggtcattcataaccgatttttatagaatactttttacatgtgcaactccatccgttatgtaaggattacatgaatattgcacattcccttctggtttcacaaacccatttatacatatttcttagtgaggctcattgtacatgtattgaagctagaatcgagtcaagaaaaataaagccccattctccaactgcaaaatgtgctttcccataatgaacactagtcaccagcacagaataatctccaacattttctaaattctaattgccaactgtttctatttatatttgatttatatttcatttggagtctgttacatggcagcttaggcagactagatcttgttttttccaatgcagcataatgagtatgatctatttcttttcaaataatctttgagatcccaggaaaaaaaaaatgctctgctccattgagctataatgtaaatgtgtttgtttaaaaaacaggtgaggcaagtgagtgatttattgttcctgaggaagtatatctgattttttttctcatactccaaaagctagtccctactctttaataaaaataatgggtaactttttgtttttcactagcgaacttccatgacatttcctttctatgtagtgtgattaatgcaatacatattatagttatctatacacagtgtaagatttaacaaactgaaatgatccacctcatatgtgagtccgtccaaaagatgttactgctctgggtgggccagtgttctatatcggttatactaactttcatttaaagtatttattctaaaatgcctctgagaaacagtaaaaaataaaaacaacaagttgtctaaaatgcaacagcttttatagtaaatgtacatttataaataaaatactcaaatcaa

SEQ ID NO: 3769 - protein, 59 aa, Homo sapiens [sequence omitted]

SEQ ID NO: 3770 - DNA, 5918 bp, Homo sapiens
aatcttcagctacttggagcaacagccattgaggataaattacaagatcaagtgcctgaaaccatagaaacgctaatgaaagcagacatcaaaatctggatccttacaggggacaagcaagaaactgccattaacatcggacactcctgcaaactgttgaagaagaacatgggaatgattgttataaatgaaggctctcttgatggtttctcctcttcaaaaatctgaagttgttgagatggttaagaaacaagtcaaagtcgtaacgcttgcaatcggtgatggagcaaatgatgtcagcatgatacagacagcgcacgttggtgttggtatcagtggcaatgaaggcctgcaggcagctaattcctctgactactccatagctcagttcaaatatttgaagaatttactgatgattcatggtgcctggaactataacagagtctccaagtgcatcttatactgcttctacaagaatatagtgctctatattatcgagatctggtttgcctttgttaatggcttttctggacagatcctctttgaaagatggtgtataggtctctataacgtgatgtttacagcaatgcctcctttaactcttggaatatttgagagatcatgcagaaaagagaacatgttgaagtaccctgaattatacaaaacatctcagaatgccctggacttcaacaccaaggttttctgggttcattgtttaaatggcctcttccactcagttattctgttttggtttccactaaaagcccttcagtatggtactgcatttggaaatgggaaaacctcggattatctgctactgggaaactttgtgtacacttttgtggtgataactgtgtgtttgaaagctggattggagacatcatattggacatggttcagccacatagcgatatgggggagcatcgcactctgggtggtgttttttggaatctactcatctctgtggcctgccattccgatggcccctgatatgtcaggagaggcagccatgttgttcagttctggagtcttttggatgggcttgttattcatccctgtggcatctctgctccttgatgtggtgtacaaggttatcaagaggactgcttttaaaacattggtcgatgaagttcaggagctggaggcaaaatctcaagacccaggagcagttgtacttggaaaaagcctgaccgagagggcgcaactgctcaagaacgtctttaagaagaaccacgtgaacttgtaccgctctgaatccttgcaacaaaatctgctccatgggtatgcgttctctcaagatgaaaatggaatcgtttcacagtctgaagtgataagagcatatgataccacgaaacagaggcccgacgaatggtgatggggagagcctgaaaggcaggctctgttacctctctaaggagagctaccaggttgtcaccgcagtctgctaaccaattccagtctggtccatgaagaggaaaggtagatctgagctcatctcgctgatggacattcagattcatgtatattatagacataagcactgtgcaactgtactgtaacaccatctcttttggatttttttaaggtatttgctaagtctttgtaaacggaaattgaaaatgacctggtatcttgccagagggctttcttaaacggagaataagtcagtattcttatgccattactgtggggctgtaactgactgtcagtttattggctgtaccacaaggtaaccaaccattaaaaaactctaaatgatatttagttaaagggactcttggtatccagacttagatttcaggatatgctgaaacaaaccagcattcttaaggaactgactcaccttcctgagcaaaatttctaaacaagcatttgtgtccaaaattgtcttgataaatgtttgccaaagaggttcagtaagtgtttttctagttcagtagtcatatgcccagaaatgtaagagaaagtttacttccagttccgctgtaagatctgcatgcctgactttccaaatgtaagagtgatttacaaaaatgaatatttcaaggcatttgctactaaaatcggtgatgttgcacctttggccttacaaatgcttctttgttgtttgtcgtgtttatttgttagaggacacacgtgttaatgtgactctgttgttatgacactgatttttcaaactatgtatgtttcaggtatttctgatgaagtttcatcatcatttagatttttctaaaaatctggctaatgcagtagattgagtgatgtcattttgtcttaaagtttttcctcttaagaaacatatgctacgtatttacgtgggatttccaaagcttctgttgcaatatttggaataacatgtcagataaatgcatgggcttttgtcctgtgttccagttcccactagagatgcctgtgtcttgtgtagcacacccagtgttatggtgactgccccctatactgaagactgaaaattatttcacagttcactcatcaaatagttcccaaaattcgtcacatgctgcttattgggacaaataggtagtacattttccccatttaaaaaatgcggattttactcaggccggtaactttacagtcagaggacacgttcatcatgagtagcttttgttagtatgttttaaaatgtatcttcagttcaattattttcagcatttacaagacatctgaaaatggctattttgctaccaacagtaaatgaaggggctgtttaaaaaccacaaccagttttctacactattttttaaataatactttcatttgaaaaaaaggaattagttttcagatacacttcagagattgaagcaaactatttgccttttactcaaaagcctgcttgcctttacatggacttaccagcaaaataggtagaactttctcttttaaaaaaagtcaactagaattgagaagaggtgattttttttcagatcgcttctcgagtttaatattttcacattcttttcaccctttttctcaatctagatttaaaattaggatatatgtcatttccttgtctgtatttgtagctccttagttaccagtatgcctctccattttctacaaataagaggttataacacatatacataattctaaccttaagggaacacacgtttacatactttacttcccaagcccttcctgtttggggtacagattgagagagtcatgaatcaacacatctagcaagaccacaggtgtaagagtctaagatcgtcttcaaaattctgaagtcccagtctttacctgtccagtgaatgaatattcagagcagcttttcctgggcttcccagtggtgatagctgaggtcaaaccacaaaaaataagaaagcaagagtgaaatgcacccctccagagaaacactttgtagtgtttaattctgttaatagagaagagctgcttctgtttgcgctcacttcatcagtggcacccttctgcagaattttaatataaaaacattatggatataatagaactggattttctgacttaaaaatgtaagttttattttaatcttgaaacgtggattgtttctgtggagctcttaaacatgagaagaatacttacggttgataatgtgtaacatgatctgaaatgtgactaatttgagcctctttgtcccatcgtcctgtttttgaattattgacattgtcagtctctttgcttcctgggtgagacttggggtttgagggacagggaatgaccttcttggtgaaacttaaaatataacattgcaattgcagtgactttacagtgttaaattagagaaaatagtctgattttttaaaccttccttaactggaaaaaagtcacatggttttaccaggattgaaataaacagtcaatgtgacttttaacatgtgtttttttgaaataaagggcacgtactcttcaattaaaaagttccttatagggactctggcaaatgctaacacagttgctttacaatgtttacaattcagacaatacgacttataatagaaaatcctcattcatttagcattgaaaagctggaagttgcttctttaatgttgaatagtatacagtggtattgagcatggactttctaaatgttttatatatacatataaaaatatattggtgtctcacacccagaaagatgttatattgtagatattattaggaaaacagtgtttctcaggaacgttgtaaattttaaatgatatatgtacttcccgtcctcccacctccactctgtgctctaatgtgagactgcttcagcagtgttgctaagttaatggaaaactttttctaatcaagtcaggtgaatgtgtattctgctaaataatgttagccatttacatgaattgtatggtcattaaatggaatcagtgattcctctttaatttccagaggggaaatgaattatggaaatcagtcagcattctgatcattaaattttatactttaattttgccgttcagcattctaaatatccaatgtgaaagtcacatgataatttgttttgcattgcgtgcactgtacaacacttacaacttgtcatttaaaatgttttctcgggaaatgaatgctagtcagaaagtaatagattgtattattcatagttttaaaattatgacaatgtcataattactacaaagctaaataatcgtgtttatttttgtgcagttgccctttgatagttcctggttttaaaacctattaagtgtataatcttacaaatagtcatctacaaaatttatggagaaagtgcccagcccattcacatcacatggaccaggaattcttttgtaaatgacttaaggtaacatcatgcagttcagtgcctaataaatgctttttaatgatgaacatttctataatgactcgtaagataccatagtctgatttttctcacattaaaataactgaagtcacttgtgtaacgtagttatactttgctgcattttaattaaccttcaacagctattaaagtggaatgtaagttaaattttgaaggaaaggaaataaatgttttccatatttcgtcttgatttactttctgtatgagaacagctgtgtttttgataggtttatggtttgcatgagttcatatttaaagtgatccaggccaatgcatggctattgctgtaaatcttgatgtttatttctgccttgtaaagttctatcacggcctacctggaatttaaaattcagtagacaaattaattggtcctctgcacaacttttttaataagtagattattttacaaagaaatttgaacaaatttaattgaatcttttgtttagcttgcctctaagaacttttcttaataaagctcccaaaacttctcagcaaataaatctcccttaagtaggaaagctagatttcatatttgcttactttgaattaacagcaactttccacaggtaaatctgttcttgcaaagatgtgagcagaatagttaaaaataatatttttatgtttcatggttctaaatggaagccataaatgcagtaaatactatctgttgtttaactactttaatcgtcattttttacattttcaagtttattaggttaagaaaaacagggcagccttggaaggcagctactacagaaaactgcagttttgcgttaaagataaagtagtattttcagctccctgaaaaaccattcctgctgaaactgctgtagaaattgtgaagctgcatgagtggagagtattgaatctgtggttatagtagttttctcaggtttgtttatcttgatgtttgatgcactgtgttttatagttattaaaattgagtaatattatttctatgcagtgttatgtgtcattggccttttgtgaatgtgcatgttttaaactgcaaattttaaacattttgtcctctaattgttattaaaaatgaaataaactttaccattacttaaaa

SEQ ID NO: 3771 - protein, 395 aa, Homo sapiens
MKALLMVSPLQKSEVVEMVKKQVKVVTLAIGDGANDVSMIQTAHVGVGISGNEGLQAANSSDYSIAQFKYLKNLLMIHGAWNYNRVSKCILYCFYKNIVLYIIEIWFAFVNGFSGQILFERWCIGLYNVMFTAMPPLTLGIFERSCRKENMLKYPELYKTSQNALDFNTKVFWVHCLNGLFHSVILFWFPLKALQYGTAFGNGKTSDYLLLGNFVYTFVVITVCLKAGLETSYWTWFSHIAIWGSIALWVVFFGIYSSLWPAIPMAPDMSGEAAMLFSSGVFWMGLLFIPVASLLLDVVYKVIKRTAFKTLVDEVQELEAKSQDPGAVVLGKSLTERAQLLKNVFKKNHVNLYRSESLQQNLLHGYAFSQDENGIVSQSEVIRAYDTTKQRPDEW

SEQ ID NO: 3772 - DNA, 751 bp, Homo sapiens
gtaattttggactgaatttcttgaccttcatcatccttttcaacaatctcattcctatcagcttattggttacattagaagttgtgaaatttacccaggcatacttcataaattgggatcttgacatgcactatgaacccacagacactgctgctatggctcgaacatctaatctgaatgaggaacttggccaggttaaatacatattttctgacaaaactggtactctgacatgcaatgtaatgcagtttaagaagtgcaccatagcgggagttgcttatgggcagaactcacagtttggagatgaaaaaacatttagtgattcatcattgctggaaaatctccaaaataatcatccaactgcacctataatatgtgaatttcttacaatgatggcagtctgtcacacagcagtgccagagcgagaaggtgacaagattatttatcaagcagcatctccagatgagggagcattggtcagagcagccaagcaattgaattttgttttcactggaagaacacccgactcggtgattatagattcactggggcaggaagaaagatatgaattgctcaatgtcttggagtttaccagtgctaggaaaagaatgtcagtgattgttcgcactccatctggaaagttacgactctactgcaaaggagctgacactgtaatttatgatcgactggcagagacgtcaaaatacaaagaaattaccctaaaacatttagagcagtttgctacagaagg

SEQ ID NO: 3773 - protein, 207 aa, Homo sapiens
MHYEPTDTAAMARTSNLNEELGQVKYIFSDKTGTLTCNVMQFKKCTIAGVAYGQNSQFGDEKTFSDSSLLENLQNNHPTAPIICEFLTMMAVCHTAVPEREGDKIIYQAASPDEGALVRAAKQLNFVFTGRTPDSVIIDSLGQEERYELLNVLEFTSARKRMSVIVRTPSGKLRLYCKGADTVIYDRLAETSKYKEITLKHLEQFAT

SEQ ID NO: 3774 - DNA, 559 bp, Homo sapiens
cactatgaacccacagacactgctgctatggctcgaacatctaatctgaatgaggaacttggccaggttaaatacatattttctgacaaaactggtactctgacatgcaatgtaatgcagtttaagaagtgcaccatagcgggagttgcttatggccatgtccctgaacctgaggattatggctgctctcctgatgaatggcagaactcacagtttggagatgaaaaaacatttagtgattcatcattgctggaaaatctccaaaataatcatccaactgcacctataatatgtgaatttcttacaatgatggcagtctgtcacacagcagtgccagagcgagaaggtgacaagattatttatcaagcagcatctccagatgagggagcattggtcagagcagccaagcaattgaattttgttttcactggaagaacacccgactcggtgattatagattcactggggcaggaagaaagatatgaattgctcaatgtcttggagtttaccagtgctaggaaaagaatgtcagtgattgttcgcactccatctggaaagt

SEQ ID NO: 3775 - protein, 176 aa, Homo sapiens
MARTSNLNEELGQVKYIFSDKTGTLTCNVMQFKKCTIAGVAYGHVPEPEDYGCSPDEWQNSQFGDEKTFSDSSLLENLQNNHPTAPIICEFLTMMAVCHTAVPEREGDKIIYQAASPDEGALVRAAKQLNFVFTGRTPDSVIIDSLGQEERYELLNVLEFTSARKRMSVIVRTPSG

SEQ ID NO: 3776 - DNA, 430 bp, Homo sapiens
acatttagtgattcatcattgctggaaaatctccaaaataatcatccaactgcacctataatatgtgaatttcttacaatgatggcagtctgtcacacagcagtgccagagcgagaaggtgacaagattatttatcaagcagcatctccagatgagggagcattggtcagagcagccaagcaattgaattttgttttcactggaagaacacccgactcggtgattatagattcactggggcaggaagaaagatatgaattgctcaatgtcttggagtttaccaggtaaaacatctgctcagtgatttgtatggataagataaatttatatccatttttattttttcccttttgaataactagaaagtatgttttgtttttatttaactaaatttgtttagacaaaatattaaatcaaaatctttagtaca

SEQ ID NO: 3777 - protein, 69 aa, Homo sapiens
MMAVCHTAVPEREGDKIIYQAASPDEGALVRAAKQLNFVFTGRTPDSVIIDSLGQEERYELLNVLEFTR

SEQ ID NO: 3778 - DNA, 324 bp, Homo sapiens
cattttagaatgcttgaatatattttgtgatacaatcatgaaatctgtgatgtcttacttagaaatgcaggccaaattacatttaatttattgagggtttggagacataacactttactcataaagtacattaacaaatagatcagtgggctggtataaatgaactgggtttactctattttttacccccttcaggcagaactcacagtttggagatgaaaaaacatttagtgattcatcattgctggaaaatctccaaaataatcatccaactgcacctataatatgtgaatttcttacaatgatggcagtctgtcacacagc

SEQ ID NO: 3779 - protein, 36 aa, Homo sapiens
YNHEICDVLLRNAGQITFNLLRVWRHNTLLIKYINK

SEQ ID NO: 3780 - DNA, 533 bp, Homo sapiens
atggtggcgctagtaattttggactgaatttcttgaccttcatcatccttttcaacaatctcattcctatcagcttattggttacattagaagttgtgaaatttacccaggcatacttcataaattgggatcttgacatgcactatgaacccacagacactgctgctatggctcgaacatctaatctgaatgaggaacttggccaggttaaatacatattttctgacaaaactggtactctgacatgcaatgtaatgcagtttaagaagtgcaccatagcgggagttgcttatggccatgtccctgaacctgaggattatggctgctctcctgatgaatgaaagtgaagcatactgtacacactgctttgcaccagcttttcatttgacagtgcatctctgagattttttcatattccataaaaagcttccctttgtttgtaaatgcaccacagtatttttaagcagcactactgatgggcctttgtgtttcctaactctttgctattaaaactggactgtaggggttgggtg

SEQ ID NO: 3781 - protein, 67 aa, Homo sapiens
MHYEPTDTAAMARTSNLNEELGQVKYIFSDKTGTLTCNVMQFKKCTIAGVAYGHVPEPEDYGCSPDE

SEQ ID NO: 3782 - DNA, 537 bp, Homo sapiens
ttaaatataatgtgcaaatctattcatttgcattatcttgaagaccattactgattgttgtcaggaaattgcttttgggtccttctggctgaaaagctaatccgtgagttgtcatgcatgggttctgcctcacagcatcttgctgttagaatgaaaatcatcaagaagctaagtaactattactttgtctagaacgaaaggctttagtgagtctgagcatttaaataagttattattatgcttttcttcccgcactaaatctttgtgcttctcaactccaaactacagtgagccccaagccatgtgctacattgaaacatccaacttagatggtgaaacaaacttgaaaattagacagggcttaccagcaacatcagatatcaaagacgttgacagtttgatgaggatttctggcagaattgagtgtgaaagtccaaacagacatctctacgattttgttggaaacataaggcttgatggacatggcaccgttccactgggagcagatcagattcttcttcgaggagctcagttgag

SEQ ID NO: 3783 - protein, 77 aa, Homo sapiens
MCYIETSNLDGETNLKIRQGLPATSDIKDVDSLMRISGRIECESPNRHLYDFVGNIRLDGHGTVPLGADQILLRGAQ

SEQ ID NO: 3784 - DNA, 787 bp, Homo sapiens
aagagctcgcccagctctgcgggcgccgccaccttcgccgccaccgctgcctttctcctcctcctgtcggcgtgcgggggccgcgcccggcggcagctctgccctaggtgggcggcggcgcggcccaggctgcagctgagcgctctgcgcggcgcagccgggtctcccgcgtgtaccacgccgtgacaggtgcagagtccgggctgaggacccacctgcagccgccgccgcgatgcccaccatgcggaggaccgtgtcggagatccgctcgcgcgccgaaggttatgagaagacagatgatgtttcagagaagacctcactggctgaccaggaggaagtaaggactattttcatcaaccagccccagctgacaaaattctgcaataaccatgtcagcactgcaaaatacaacataatcacattccttccaagatttctctactctcagttcagaagagctgctaattcattttttctctttattgcactgctgcagcaaatacctgatgtgtcaccaacaggtcgttatacaacactggttcctctcttatttattttagctgtggcagctatcaaagagataatagaagatattaaacgacataaagctgataatgcagtgaacaagaaacaaacgcaagttttgagaaatggtgcttgggaaattgtccactgggaaaaggtaaatgttggagatatagttataataaaaggcaaagagtatatacctgctgacactgtacttctctcatcaagtgagccccaagccatgtgctacattgaaaca

SEQ ID NO: 3785 - protein, 184 aa, Homo sapiens
MPTMRRTVSEIRSRAEGYEKTDDVSEKTSLADQEEVRTIFINQPQLTKFCNNHVSTAKYNIITFLPRFLYSQFRRAANSFFLFIALLQQIPDVSPTGRYTTLVPLLFILAVAAIKEIIEDIKRHKADNAVNKKQTQVLRNGAWEIVHWEKVNVGDIVIIKGKEYIPADTVLLSSSEPQAMCYIE

SEQ ID NO: 3786 - DNA, 2239 bp, Homo sapiens
agctctgcgggcgccgccaccttcgccgccaccgctgcctttctcctcctcctgtcggcgtgcgggggccgcgcccggcggcagctctgccctaggtgggcggcggcgcggcccaggctgcagctgagcgctctgcgcggcgcagccgggtctcccgcgtgtaccacgccgtgacaggtgcagagtccgggctgaggacccacctgcagccgccgccgcgatgcccaccatgcggaggaccgtgtcggagatccgctcgcgcgccgaaggttatgagaagacagatgatgtttcagagaagacctcactggctgaccaggaggaagtaaggactattttcatcaaccagccccagctgacaaaattctgcaataaccatgtcaggtaagaactaccaaagaatgccatgagaccagccagcagagcagagctggttaggtcaaaatgaaaatgcttgcaaagagctttcagtgcagtcagttaatatttgagagctccctgttggcagtgtgaataggctgtttccccatcttctctcccatagagaaatattcataagaatctggaaatagcgaggagcagaaagaataagcacccatcctctgccgatgctgcatagatattgaataatgaaagctgcttatgtgtaaatgcctctgtcctaaacctgttaatagagcgatgcgttactggttttggttagcaagttttaacattttagaagaggtctttgcaattctgcaccaagaattccttctggttatatagtctttaagtattggtttttgatagttgtgaagtttagtatggtgtggaggaatggagggctgtgcgaattacttcactgcactgttgtgttttcattccaacaataatgtaaaaagtatctgtgtaagcactggccacttatgcggcttctgggaccacataaacaccttcaataccaataaagtgtttctccagtggcagagttaactagatttgagaagtgcccacttaatatgtacaatttcaaattctagaggaacatttctcaatttgggtaatgtggcatgtgtctgctttaatctcctttctatttgataaacaagaggaagatctgggtgtttctaagacctaagtagtgatatcttactgatgtgggcatatctggtgtgtttagtgtggatttctagccatgttcctggagtggcagtgaagaaaattcaaacagaaccccagagatctccctgaaattatccaggaaaggcatctctgtttacagtgtctggtcaaattgctcaaattgctgatttcggggttcttttggcaagattttattttctagtcacacgttgtactctgtcttatggagggctggagccctttaactccaaagttgctcttctttgtaagctacttctagtaatgttaagcagaataattggccaaataggacaaaagattatgcaaaaaaaaaaaaatctgtggtattcatgctttaccatttatttaaccttttcactctttttcatttaggttaatgaccctttgcaatattctcccaatttgaaacagccggcaaatgttccttatctaactttttatatgttagtaacagaactttgtaagtgtgggtgctaattatggagaagttttatgctacttttcatttttgttttctagcactgcaaaatacaacataatcacattccttccaagatttctctactctcagttcagaagagctgctaattcattttttctctttattgcactgctgcaggtaaagtcacgtcataaaaccttgtcaaatgttcaggtactaataaatgttaagcccgtgaccaatcccctgaggtttatgtaaatgccgagagataagctggttttggtggacatttctggctcctgctgcaagcagtgttggaatccactaccttttccagccttttgattcatttttatcagcttattttgggtgttctataaatttgatgtggcaaggactgttcattttgggtggtaaaggggatgggacgttttcttaaaatgctaattttcatagtaaaagtatcaactctgaaccttagaatgcaagaagttaaatcttgtgcttctctttgtatttaaattagttgtagtcagaaaaagttttagtttattaaaaagtagcatattgaacatatgcttaaatttgaaaaaatattttcattgaacttgaaaataaaaaatttttaaaacaccacaaaacacaagg

SEQ ID NO: 3787 - protein, 55 aa, Homo sapiens
MPTMRRTVSEIRSRAEGYEKTDDVSEKTSLADQEEVRTIFINQPQLTKFCNNHVR

SEQ ID NO: 3788 - DNA, 6317 bp, Homo sapiens
agaaagcggacaggagggcgacttttctccgtcaggctggaactggtgccgctggaggcgggagcgggctggaggacggacagggtctggaaatgtttaatttggtaaattggaggaaaaaaacatggatttttagcaattgaagagcaaattaaggtttcagatttgggatattggtgtttctgttttggagaaattattctttttctttttaatttgaagaaaaatcatcagtcttggaatacagaagagaaactagaaatatacgtattttgtttcacatttgaacagtcattcttgaggaatactccatacctgagtagacagccatgtggccatcgcagctactaattttcatgatgctcttagctccaataattcatgctttcagccgtgccccaattccaatggctgtggtccgcagagagctatcctgtgagagctatcctatagagcttcgctgtccaggaacagacgtcatcatgatagaaagtgccaactatggcaggactgatgacaaaatttgtgactctgaccctgctcagatggagaatatccgatgttatctgccagatgcctataagattatgtctcaaagatgcaataacagaacccagtgtgcagtggtggcaggtcctgatgtttttccagacccgtgtccaggaacctataaataccttgaagtgcagtatgaatgtgtcccttacaaagtggaacaaaaagtttttctttgtcctggactactaaaaggagtataccagagtgaacatttgtttgagtccgaccaccaatctggggcgtggtgcaaagaccctctgcaggcatctgacaagatttattatatgccctggactccctacagaactgataccctgactgagtattcatccaaggatgacttcattgctggaagaccaactacaacctacaagctccctcacagggtggatggcacaggatttgtagtgtatgatggagctttgttcttcaacaaagagcgcaccaggaacatagtaaagtttgatttgcggactaggataaagagtggagaggctatcatagcaaatgccaattaccatgatacctccccttaccgatggggaggcaaatctgacatagacctggcagtagatgagaatgggctatgggtaatctatgcaacagaacaaaacaatggtaaaattgtcattagtcaattgaacccttacaccctacggatcgaaggaacatgggatactgcatatgataaaaggtcagcttccaatgcctttatgatttgtggaattctgtatgtggtcaaatctgtatatgaggatgatgacaatgaggctactggaaataagattgactacatttacaacactgaccaaagcaaggatagtttggtggatgtaccctttcctaattcataccagtacattgcagctgtggattacaaccccagggacaacctactttatgtatggaataactatcacgtcgtgaaatattctttggattttggacctctggatagtagatcagggcaggcacatcatggacaagtttcatacatttctccgccaattcaccttgactctgagctagaaagaccctctgttaaaggacctcttggcatgggaagcactaccaccagtaccacccttcggaccacaactttgagcccaggaaggagtaccaccccgtcagtgtcaggaagaagaaaccggagtactagtaccccatctccagctgtcgaggtacttgatgacatgaccacacaccttccatcagcatcgtcccaaatcccagctctcgaagagagctgtgaggctgtggaagcccgagaaatcatgtggtttaagactcgtcaaggacagatagcaaagcagccatgccctgcaggaactataggtgtatcaacttatctatgccttgctcctgatggaatttgggatccccaaggtccagatctcagcaactgttcttctccttgggtcaatcatataacacagaagttgaaatctggtgaaacagctgccaacattgctagagagctggctgaacagacaagaaatcacttgaatgctggggacatcacctactctgtccgggccatggaccagctggtaggcctcctagatgtacagcttcggaacttgaccccaggtggaaaagatagtgctgcccggagtttgaacaagcttcagaaaagagagcgctcttgcagagcctatgtccaggcaatggtcgagacagttaacaacctccttcagccacaagctttgaatgcatggagagacctgactacgagtgatcagctgcgtgcggccaccatgttgcttcatactgtggaggaaagtgcttttgtgctggctgataaccttttgaagactgacattgtcagggagaatacagacaatattaaattggaagttgcaagactgagcacagaaggaaacttagaagacctaaaatttccagaaaacatgggccatggaagcactatccagctgtctgcaaataccttaaagcaaaatggccgaaatggagagatcagagtggcctttgtcctgtataacaacttgggtccttatttatccacggagaatgccagtatgaagttgggaacggaagctttgtccacaaatcattctgttattgtcaattcccctgttattacggcagcaataaacaaagagttcagtaacaaggtttatttggctgatcctgtggtatttactgttaaacatatcaagcagtcagaggaaaatttcaaccctaactgttcattttggagctactccaagcgtacaatgacaggttattggtcaacacaaggctgtcggctcctgacaacaaataagacacatactacatgctcttgtaaccacctaacaaattttgcagtactgatggcacatgtggaagttaagcacagtgatgcggtccatgacctccttctggatgtgatcacgtgggttggaattttgctgtcccttgtttgtctcctgatttgcatcttcacattttgctttttccgggggctccagagtgaccgtaacaccatccacaagaacctctgcatcagtctctttgtagcagagctgctcttcctgattgggatcaaccgaactgaccaaccaattgcctgtgctgttttcgctgccctgttacatttcttcttcttggctgccttcacctggatgttcctggagggggtgcagctttatatcatgctggtggaggtttttgagagtgaacattcacgtaggaaatacttttatctggtcggctatgggatgcctgcactcattgtggctgtgtcagctgcagtagactacaggagttatggaacagataaagtatgttggctccgacttgacacctacttcatttggagttttataggaccagcaactttgataattatgcttaatgtaatcttccttgggattgctttatataaaatgtttcatcatactgctatactgaaacctgaatcaggctgtcttgataacatcaactatgaggataacagacccttcatcaagtcatgggttataggtgcaatagctcttctctgcctattaggattgacctgggcctttggactcatgtatattaatgaaagcacagtcatcatggcctatctcttcaccattttcaattctctacagggaatgtttatatttattttccattgtgtcctacagaagaaggtacgaaaagagtatgggaaatgcctgcgaacacattgctgtagtggcaaaagtacagagagttccattggttcagggaaaacatctggttctcgaactcctggacgctactccacaggctcacagagccgaatccgtagaatgtggaatgacacggttcgaaagcagtcagagtcttcctttattactggagacataaacagttcagcgtcactcaacagagagccctacagagagacaagtatgggagtaaagctaaacattgcatatcaaataggggcttctgaacaatgccagggatacaagtgtcatggatactctaccactgaatggtaaccatggcaatagttacagcattgccagcggcgaatacctgagcaactgtgtgcaaatcatagaccgtggctataaccataacgagaccgccctagagaaaaagattctgaaggaactcacttccaactatatcccttcttacctgaacaaccatgagcgctccagtgaacagaacaggaatctgatgaacaagctggtgaataaccttggcagtggaagggaagatgatgccattgtcctggatgatgccacctcgtttaaccacgaggagagtttgggcctggaactcattcatgaggaatctgatgctcctttgctgcccccaagagtatactccaccgagaaccaccagccacaccattataccagaaggcggatcccccaagaccacagtgagagctttttccctttgctaaccaacgagcacacagaagatctccagtcaccccatagagactctctctataccagcatgccgacactggctggtgtggccgccacagagagtgttaccaccagcacccagaccgaacccccaccggccaaatgtggtgatgccgaagatgtttactacaaaagcatgccaaacctaggctccagaaaccacgtccatcagctgcatacttactaccagctaggtcgcggcagcagtgatggatttatagttcctccaaacaaagatgggacccctcccgagggaagttcaaaaggaccggctcatttggtcactagtctatagaagatgacacagaaattggaaccaacaaaactgctaacaccttgttgactgttctgagttgatataagcagtggtaataatgtgtgtactcctaaatctttatgctgtcctctaaagacaaacacaaactctcagacttttttttttttaatgggatttttaggtcagcccaggggagaaagataactgctaaaattcccctgtaccccatcctttcttgtcctttccccttcagatggagacttcattatgttaatgaacaagatatgaagaaaatggcactcattgtggccttgttgaattatgttgtgtatgttttaacatctctgatgctgtgttactaaaattacaaggacctgctttttaaaaggccagaacaattgtctgaaattagtaacaatgctgcatctagattggagtgctgcacaaacaaacataagagcaaagcaaaactgtatcacatagggtttttggtcactcacaacctgaattcaccacagctggaatagctgtggaaaacaaaataaaacaacaaaattaataatgaaatggaggggaattctagaattatatgctaaatgcatattttatgatttgctgtattaactgatgataaaactaatggcagaaaaagaagttgagcaatttctatgtaatgtacagatactagcattgcacatatagtctgctttctgttcctccagaatttgagtcctgttaatgtagtagaaaaaaaaaaaagaaattttctttttcttttgtgctggtcttgcaagtttgtctaccagtaagagagcaaagtttccttcctttcttctctttcttcattttctttttttcttttttgccttttattcctttaaaatttcgcctggcaaaaaataaataaatggaactatcactttataagaatcattttctagtaatgcaaacaaattattttttacaaaaaaacaaaataaataaaattagacttccttccctcactatatatctttatgcagtcagaatatttccaacagtgttttttgcaaattagagcaggacaaacttttatgtttacagggcacgtctgttgtaatgcaaagcatatttggcaagcagttcatcaccaggacactagctatgattctagaagtcaaaaggtgtctatagaactagtggggcttctgcatgtgaaaaacggttttccataggcattaaagtgctgaatgctcagtctgatcaacaagtgggcacctgcactaccactttttagaggaaattcactccctcgtaagcattggaaggtcaaattattttgaagtgatttttttaaaaaaaagtcttctgtttattaacaggaaaatttatttatttgacaggattttgagtaatgtaggaatacaaaaggtaaattagcagcacatataatttttttttaatttatgatccattttgtatggtctcaaagttggatgacctcattactaatatttgttgtaaaagtgaaacttgtttgccaaccaataaacaactgattgagatttagaagatattgt

SEQ ID NO: 3789 - protein, 1235 aa, Homo sapiens
MWPSQLLIFMMLLAPIIHAFSRAPIPMAVVRRELSCESYPIELRCPGTDVIMIESANYGRTDDKICDSDPAQMENIRCYLPDAYKIMSQRCNNRTQCAVVAGPDVFPDPCPGTYKYLEVQYECVPYKVEQKVFLCPGLLKGVYQSEHLFESDHQSGAWCKDPLQASDKIYYMPWTPYRTDTLTEYSSKDDFIAGRPTTTYKLPHRVDGTGFVVYDGALFFNKERTRNIVKFDLRTRIKSGEAIIANANYHDTSPYRWGGKSDIDLAVDENGLWVIYATEQNNGKIVISQLNPYTLRIEGTWDTAYDKRSASNAFMICGILYVVKSVYEDDDNEATGNKIDYIYNTDQSKDSLVDVPFPNSYQYIAAVDYNPRDNLLYVWNNYHVVKYSLDFGPLDSRSGQAHHGQVSYISPPIHLDSELERPSVKGPLGMGSTTTSTTLRTTTLSPGRSTTPSVSGRRNRSTSTPSPAVEVLDDMTTHLPSASSQIPALEESCEAVEAREIMWFKTRQGQIAKQPCPAGTIGVSTYLCLAPDGIWDPQGPDLSNCSSPWVNHITQKLKSGETAANIARELAEQTRNHLNAGDITYSVRAMDQLVGLLDVQLRNLTPGGKDSAARSLNKLQKRERSCRAYVQAMVETVNNLLQPQALNAWRDLTTSDQLRAATMLLHTVEESAFVLADNLLKTDIVRENTDNIKLEVARLSTEGNLEDLKFPENMGHGSTIQLSANTLKQNGRNGEIRVAFVLYNNLGPYLSTENASMKLGTEALSTNHSVIVNSPVITAAINKEFSNKVYLADPVVFTVKHIKQSEENFNPNCSFWSYSKRTMTGYWSTQGCRLLTTNKTHTTCSCNHLTNFAVLMAHVEVKHSDAVHDLLLDVITWVGILLSLVCLLICIFTFCFFRGLQSDRNTIHKNLCISLFVAELLFLIGINRTDQPIACAVFAALLHFFFLAAFTWMFLEGVQLYIMLVEVFESEHSRRKYFYLVGYGMPALIVAVSAAVDYRSYGTDKVCWLRLDTYFIWSFIGPATLIIMLNVIFLGIALYKMFHHTAILKPESGCLDNINYEDNRPFIKSWVIGAIALLCLLGLTWAFGLMYINESTVIMAYLFTIFNSLQGMFIFIFHCVLQKKVRKEYGKCLRTHCCSGKSTESSIGSGKTSGSRTPGRYSTGSQSRIRRMWNDTVRKQSESSFITGDINSSASLNREPYRETSMGVKLNIAYQIGASEQCQGYKCHGYSTTEW

SEQ ID NO: 3790 - DNA, 2363 bp, Homo sapiens
agtttttctttgtcctggactactaaaaggagtataccagagtgaacatttgtttgagtccgaccaccaatctggggcgtggtgcaaagaccctctgcaggcatctgacaagatttattatatgccctggactccctacagaactgataccctgactgagtattcatccaaggatgacttcattgctggaagaccaactacaacctacaagctccctcacagggtggatggcacaggatttgtagtgtatgatggagctttgttcttcaacaaagagcgcaccaggaacatagtaaagtttgatttgcggactaggataaagagtggagaggctatcatagcaaatgccaattaccatgatacctccccttaccgatggggaggcaaatctgacatagacctggcagtagatgagaatgggctatgggtaatctatgcaacagaacaaaacaatggtaaaattgtcattagtcaattgaacccttacaccctacggatcgaaggaacatgggatactgcatatgataaaaggtcagcttccaatgcctttatgatttgtggaattctgtatgtggtcaaatctgtatatgaggatgatgacaatgaggctactggaaataagattgactacatttacaacactgaccaaagcaaggatagtttggtggatgtaccctttcctaattcataccagtacattgcagctgtggattacaaccccagggacaacctactttatgtatggaataactatcacgtcgtgaaatattctttggattttggacctctggatagtagatcagggcaggcacatcatggacaagtttcatacatttctccgccaattcaccttgactctgagctagaaagaccctctgttaaaggacctcttggcatgggaagcactaccaccagtaccacccttcggaccacaactttgagcccaggaaggagtaccaccccgtcagtgtcaggaagaagaaaccggagtactagtaccccatctccagctgtcgaggtacttgatgacatgaccacacaccttccatcagcatcgtcccaaatcccagctctcgaagagagctgtgaggctgtggaagcccgagaaatcatgtggtttaagactcgtcaaggacagatagcaaagcagccatgccctgcaggaactataggtgtatcaacttatctatgccttgctcctgatggaatttgggatccccaaggtccagatctcagcaactgttcttctccttgggtcaatcatataacacagaagttgaaatctggtgaaacagctgccaacattgctagagagctggctgaacagacaagaaatcacttgaatgctggggacatcacctactctgtccgggccatggaccagctggtaggcctcctagatgtacagcttcggaacttgaccccaggtggaaaagatagtgctgcccggagtttgaacaaggcaatggtcgagacagttaacaacctccttcagccacaagctttgaatgcatggagagacctgactacgagtgatcagctgcgtgcggccaccatgttgcttcatactgtggaggaaagtgctttttgctggtcttgcaagtttgtctaccagtaagagagcaaagtttccttcctttcttctctttcttcattttctttttttcttttttgccttttattcctttaaaatttcgcctggcaaaaaataaataaatggaactatcactttataagaatcattttctagtaatgcaaacaaattattttttacaaaaaaacaaaataaataaaattagacttccttccctcactatatatctttatgcagtcagaatatttccaacagtgttttttgcaaattagagcaggacaaacttttatgtttacagggcacgtctgttgtaatgcaaagcatatttggcaagcagttcatcaccaggacactagctatgattctagaagtcaaaaggtgtctatagaactagtggggcttctgcatgtgaaaaacggttttccataggcattaaagtgctgaatgctcagtctgatcaacaagtgggcacctgcactaccactttttagaggaaattcactccctcgtaagcattggaaggtcaaattattttgaagtgatttttttaaaaaaaagtcttctgtttattaacaggaaaatttatttatttgacaggattttgagtaatgtaggaatacaaaaggtaaattagcagcacatataatttttttttaatttatgatccattttgtatggtctcaaagttggatgacctcattactaatatttgttgtaaaagtgaaacttgtttgccaaccaataaacaactgattgagatttagaagat

SEQ ID NO: 3791 - protein, 498 aa, Homo sapiens
MPWTPYRTDTLTEYSSKDDFIAGRPTTTYKLPHRVDGTGFVVYDGALFFNKERTRNIVKFDLRTRIKSGEAIIANANYHDTSPYRWGGKSDIDLAVDENGLWVIYATEQNNGKIVISQLNPYTLRIEGTWDTAYDKRSASNAFMICGILYVVKSVYEDDDNEATGNKIDYIYNTDQSKDSLVDVPFPNSYQYIAAVDYNPRDNLLYVWNNYHVVKYSLDFGPLDSRSGQAHHGQVSYISPPIHLDSELERPSVKGPLGMGSTTTSTTLRTTTLSPGRSTTPSVSGRRNRSTSTPSPAVEVLDDMTTHLPSASSQIPALEESCEAVEAREIMWFKTRQGQIAKQPCPAGTIGVSTYLCLAPDGIWDPQGPDLSNCSSPWVNHITQKLKSGETAANIARELAEQTRNHLNAGDITYSVRAMDQLVGLLDVQLRNLTPGGKDSAARSLNKAMVETVNNLLQPQALNAWRDLTTSDQLRAATMLLHTVEESAFCWSCKFVYQ

SEQ ID NO: 3792 - DNA, 4805 bp, Homo sapiens
ggcctccgcccccgcccgcctccccgcgcagtcgccggcggttgcctcgcggggttgcggcgagcccggcccgcgaacgtcacgtccctgcgcgctccctgcactctcccgagctgcgctaggcgggcgccacggctgcccggcgaaggaaaccgaaaccgagtccgggcccgtccctccgcggccccatccgcccggtgcacccggggccgcgctcgccaggccgcggagcccagagctgcgcgcacgaaccgtgcgccgggagggcgtgggcgtggcgccgaagggtcccgggtcttcgacgcctctgcggcggctcctccctccttgcagttggatccctggcgggtgcggcccggcccggcccgtgagcggcgcacagaatgggccgatgctgcttctacacggcggggacgttgtccctgctcctgctggtgaccagcgtcacgctgctggtggcccgggtcttccagaaggctgtagaccagagtatcgagaagaaaattgtgttaaggaatggtactgaggcatttgactcctgggagaagccccctctgcctgtgtatactcagttctatttcttcaatgtcaccaatccagaggagatcctcagaggggagacccctcgggtggaagaagtggggccatacacctacagggaactcagaaacaaagcaaatattcaatttggagataatggaacaacaatatctgctgttagcaacaaggcctatgtttttgaacgagaccaatctgttggagaccctaaaattgacttaattagaacattaaatattcctgtattgactgtcatagagtggtcccaggtgcacttcctcagggagatcatcgaggccatgttgaaagcctatcagcagaagctctttgtgactcacacagttgacgaattgctctggggctacaaagatgaaatcttgtcccttatccatgttttcaggcccgatatctctccctattttggcctattctatgagaaaaatgggactaatgatggagactatgtttttctaactggagaagacagttaccttaactttacaaaaattgtggaatggaatgggaaaacgtcacttgactggtggataacagacaagtgcaatatgattaatggaacagatggagattcttttcacccactaataaccaaagatgaggtcctttatgtcttcccatctgacttttgcaggtcagtgtatattactttcagtgactatgagagtgtacagggactgcctgcctttcggtataaagttcctgcagaaatattagccaatacgtcagacaatgccggcttctgtatacctgagggaaactgcctgggctcaggagttctgaatgtcagcatctgcaagaatggtgcacccatcattatgtctttcccacacttttaccaagcagatgagaggtttgtttctgccatagaaggcatgcacccaaatcaggaagaccatgagacatttgtggacattaatcctttgactggaataatcctaaaagcagccaagaggttccaaatcaacatttatgtcaaaaaattagatgactttgttgaaacgggagacattagaaccatggttttcccagtgatgtacctcaatgagagtgttcacattgataaagagacggcgagtcgactgaagtctatgattaacactactttgatcatcaccaacataccctacatcatcatggcgctgggtgtgttctttggtttggtttttacctggcttgcatgcaaaggacagggatccatggatgagggaacagcggatgaaagagcacccctcattcgaacctaaacattgcctttgcttggtgaagaaactgtgtgagctgtcctgacctggacgatgacgtggggaaaccctccacctccttgcaggcttgttgcctgttgaaagaaggaaaaagacacggcgctggcaagtgataggaacattctggccagaggttaaagagcaggctgacatggctggccattaagctttataaaatcatgtgggctctgaaattgttcttttatgtgtctagcaagtatttaataaacccttgtatagtaattttgttgttgttgggtgctggtagctccagaattttgtgaccactattgtgggtaaaatgtctctgcatcacttgttaatgctactggtctaacttcattcagtatgcttcattcaccgaactttgtgctcaaaatgcgtatataccattttatgttgtattcctccatttcacttgcaaaacagaagtaaataagagttcgggacccagggtaaaatggtagcttcatccaatatatcattcaaatgcatctgatttctaaaacatattacattttatgctgatcttcagttcataattcttccaggaaaactcagtcttccaactgcaataaaatactgggtagaatcaaatgggaaaggggttgggtggggcaatacccatgagttgatagtgataagctcctaaggatttttaacttgtacttttgtgaacgaagagaatgcataaataatgttggtgaggataaagtacagatatttcatgtagaattaattgctagttatgatgcttgtggatagttaactgttttttttttagtcaaaatgatcatgctacgaaaagatgcttctgagagaatgtaatgagtaactgatttttcttcctgagtcgcccttgccaaatatgttactgtattaattaatctaatattgagtgattatttgtaaaattatgaatatgggaaatccatctatctacagcctaagttacacataagtttcagaaagtctgattagactaaagagatatttcttctgggacagccgccttcttggtaattttgaagttctttttacaagttccttcctcagtttcagttctttccagtgttttgtagctcactgtcactcactgaatagagaaacgtgtgccctatacttcctgtgacaatcattttgctgacagaatgatggatgtttaaaatattgcacaaagtactttaaagaaaggtctgttaggaccagaagcagagacaccacttttcaaaggacttcttggtttcagcataacctaagacagggaattgggagccatcatatgtcacagtgttcagaattcaagcatatttaagggcattttctttgattctcaaagttcagcattcattttgaattgagaagcctatacatttagctgacaaagtgcttatagaatttcttaacaactgaaccattcaaaaggattttttttgtttaaaactggatttcaatgtaagcaaatgaagaaaaaaatatagatttcatttccatagcttcttatccctgtattgaggtaataaattgttttactgacaatttttcctttttctacactaaaacaatatgtgatatatttcccctcttgaagaggcaattcattaaactctcaaattttctatagaatcaagatagaacctttagatactccaactcaccaaaatgtaaaaaaactaacaaaaatatttggtcttcaataatgctaaatatctacatttttagaatttatcaacatttaactagataattgggcatgtcttaattatgcatgtacttatccatactaataaaattgacaatgctagtgcatacttattggtttagtcctattatcaggatataatcatctgtgaggaggatattttaaatactgtaaatgataacagttaatgatatacacatttagactgagttgcacactggcagggagaccaaaaacattacttccatacttgtgtcatgattcttttttttttgagagagtctcactctgtcgccaggctggagtacagtggcatgatctcggctcactgcaacctctgcctcccgggttcaagcaattctcctgcctcagccacccaagtagctgggactacaggtgcgtgccaccacgcccagctaaattttgtatttttagtggagacggggtttcaccatgttggccaggatggtctcaatctcctgaccctgcgatctgcccacctcagcctcccaaagtgctgggattacaggcgtaagccaccgggcctggcctgttttatgattcttaatagttacttggtttaaatcacatttgatactatccttctgaaaagtctgagacagatctacaaactacagtcaaaattatagattaagaggaatgaatgcacctatttggctttaagttgaagatgaattatttctcatgctcattttcttgcggcagttatcttagaaagacccccaaaggctttgtgattgtaagcactgtcatgatcacagaatgcaagcttctggtaccatgatcctcaacttagagaggaagaaaccaagacagagagcttaactcacttctctcagggaaaattaggagttgagcacaggacaggaaatgggctttgccacttttagctccaggcttttctaaccagacttgatttcctcatgttctagaaagatcactaatggtcaagtggaacaagcactacacgactaacccctattggggtttttaacttaagggaggctaatttttaatttaaactgctcgagatatgagttctgcaaaaggtggtccgcatccttggccctctggacattatcactaaattgcttgtgcctgttaacaagaatactgaccagaatgctcttcatgtagcttatacagttggttcacttcatgcggttcttgacatgtttatttctacccttaatgcaatgaaatgtttcattaataaaaaaccactttatataaaattgctctag

SEQ ID NO: 3793 - protein, 478 aa, Homo sapiens; identical to SEQ ID NO: 437

SEQ ID NO: 3794 - DNA, 2079 bp, Homo sapiens
ggcctccgcccccgcccgcctccccgcgcagtcgccggcggttgcctcgcggggttgcggcgagcccggcccgcgaacgtcacgtccctgcgcgctccctgcactctcccgagctgcgctaggcgggcgccacggctgcccggcgaaggaaaccgaaaccgagtccgggcccgtccctccgcggccccatccgcccggtgcacccggggccgcgctcgccaggccgcggagcccagagctgcgcgcacgaaccgtgcgccgggagggcgtgggcgtggcgccgaagggtcccgggtcttcgacgcctctgcggcggctcctccctccttgcagttggatccctggcgggtgcggcccggcccggcccgtgagcggcgcacagaatgggccgatgctgcttctacacggcggggacgttgtccctgctcctgctggtgaccagcgtcacgctgctggtggcccgggtcttccagaaggctgtagaccagagtatcgagaagaaaattgtgttaaggaatggtactgaggcatttgactcctgggagaagccccctctgcctgtgtatactcagttctatttcttcaatgtcaccaatccagaggagatcctcagaggggagacccctcgggtggaagaagtggggccatacacctacagggaactcagaaacaaagcaaatattcaatttggagataatggaacaacaatatctgctgttagcaacaaggcctatgtttttgaacgagaccaatctgttggagaccctaaaattgacttaattagaacattaaatattcctgtattgactgtcatagagtggtcccaggtgcacttcctcagggagatcatcgaggccatgttgaaagcctatcagcagaagctctttgtgactcacacagttgacgaattgctctggggctacaaagatgaaatcttgtcccttatccatgttttcaggcccgatatctctccctattttggcctattctatgagaaaaatgggactaatgatggagactatgtttttctaactggagaagacagttaccttaactttacaaaaattgtggaatggaatgggaaaacgtcacttgactggtggataacagacaagtgcaatatgattaatggaacagatggagattcttttcacccactaataaccaaagatgaggtcctttatgtcttcccatctgacttttgcaggtcagtgtatattactttcagtgactatgagagtgtacagggactgcctgcctttcggtataaagttcctgcagaaatattagccaatacgtcagacaatgccggcttctgtatacctgagggaaactgcctgggctcaggagttctgaatgtcagcatctgcaagaatggtgcacccatcattatgtctttcccacacttttaccaagcagatgagaggtttgtttctgccatagaaggcatgcacccaaatcaggaagaccatgagacatttgtggacattaatcctttgactggaataatcctaaaagcagccaagaggttccaaatcaacatttatgtcaaaaaattagatgactttgttgaaacgggagacattagaaccatggttttcccagtgatgtacctcaatgagagtgttcacattgataaagagacggcgagtcgactgaagtctatgattaacactactttgatcatcaccaacataccctacatcatcatggcgctgggtgtgttctttggtttggtttttacctggcttgcatgcaaaggacagggatccatggatgagggaacagcggatgaaagagcacccctcattcgaacctaaacattgcctttgcttggtgaagaaactgtgtgagctgtcctgacctggacgatgacgtggggaaaccctccacctccttgcaggcttgttgcctgttgaaagaaggaaaaagacacggcgctggcaagtgataggaacattctggccagaggttaaagagcaggctgacatggctggccattaagctttataaaatcatgtgggctctgaaattgttcttttatgtgtctagcaagtatttaataaacccttgtatagt

SEQ ID NO: 3795 - protein, 478 aa, Homo sapiens; identical to SEQ ID NO: 437

SEQ ID NO: 3796 - DNA, 811 bp, Homo sapiens
gcgagcccggcccgcgaacgtcacgtccctgcgcgctccctgcactctcccgagctgcgctaggcgggcgccacggctgcccggcgaaggaaaccgaaaccgagtccgggcccgtccctccgcggccccatccgcccggtgcacccggggccgcgctcgccaggccgcggagcccagagctgcgcgcacgaaccgtgcgccgggagggcgtgggcgtggcgccgaagggtcccgggtcttcgacgcctctgcggcggctcctccctccttgcagttggatccctggcgggtgcggcccggcccggcccgtgagcggcgcacagaatgggccgatgctgcttctacacggcggggacgttgtccctgctcctgctggtgaccagcgtcacgctgctggtggcccgggtcttccagaaggctgtagaccagagtatcgagaagaaaattgtgttaaggaatggtactgaggcatttgactcctgggagaagccccctctgcctgtgtatactcagttctatttcttcaatgtcaccaatccagaggagatcctcagaggggagacccctcgggtggaagaagtggggccatacacctacagggaactcagaaacaaagcaaatattcaatttggagataatggaacaacaatatctgctgttagcaacaaggcctatgtttttgaacgagaccaatctgttggagacctggtcccaggtgcacttcctcagggagatcatcgaggccatgttgaaagcctatcagcagaagctctttgtgactcacacagttgacgaattgctctggggctac

SEQ ID NO: 3797 - protein, 155 aa, Homo sapiens
MGRCCFYTAGTLSLLLLVTSVTLLVARVFQKAVDQSIEKKIVLRNGTEAFDSWEKPPLPVYTQFYFFNVTNPEEILRGETPRVEEVGPYTYRELRNKANIQFGDNGTTISAVSNKAYVFERDQSVGDLVPGALPQGDHRGHVESLSAEALCDSHS

SEQ ID NO: 3798 - DNA, 1025 bp, Homo sapiens
ggcctccgcccccgcccgcctccccgcgcagtcgccggcggttgcctcgcggggttgcggcgagcccggcccgcgaacgtcacgtccctgcgcgctccctgcactctcccgagctgcgctaggcgggcgccacggctgcccggcgaaggaaaccgaaaccgagtccgggcccgtccctccgcggccccatccgcccggtgcacccggggccgcgctcgccaggccgcggagcccagagctgcgcgcacgaaccgtgcgccgggagggcgtgggcgtggcgccgaagggtcccgggtcttcgacgcctctgcggcggctcctccctccttgcagttggatccctggcgggtgcggcccggcccggcccgtgagcggcgcacagaatgggccgatgctgcttctacacggcggggacgttgtccctgctcctgctggtgaccagcgtcacgctgctggtggcccgggtcttccagaaggctgtagaccagagtatcgagaagaaaattgtgttaaggaatggtactgaggcatttgactcctgggagaagccccctctgcctgtgtatactcagttctatttcttcaatgtcaccaatccagaggagatcctcagaggggagacccctcgggtggaagaagtggggccatacacctacagggaactcagaaacaaagcaaatattcaatttggagataatggaacaacaatatctgctgttagcaacaaggcctatgtttttgaacgagaccaatctgttggagaccctaaaattgacttaattagaacattaaatattcctgtattggtaagtaggcattttaataccattaagttggattttggaagaaaggaaaaagctaagttaatgctctttatgattttacatttaggagccattaagttatgttgaaatatacatatataaaaagaaaaatacttcttttcttttctttaaagtacatcttggacttttttctaagatgtatcaaataaggtcttttcaaatgatgacaaaattcagatt

SEQ ID NO: 3799 - protein, 175 aa, Homo sapiens
MGRCCFYTAGTLSLLLLVTSVTLLVARVFQKAVDQSIEKKIVLRNGTEAFDSWEKPPLPVYTQFYFFNVTNPEEILRGETPRVEEVGPYTYRELRNKANIQFGDNGTTISAVSNKAYVFERDQSVGDPKIDLIRTLNIPVLVSRHFNTIKLDFGRKEKAKLMLFMILHLGAIKLC

SEQ ID NO: 3800 - DNA, 811 bp, Homo sapiens
gcgagcccggcccgcgaacgtcacgtccctgcgcgctccctgcactctcccgagctgcgctaggcgggcgccacggctgcccggcgaaggaaaccgaaaccgagtccgggcccgtccctccgcggccccatccgcccggtgcacccggggccgcgctcgccaggccgcggagcccagagctgcgcgcacgaaccgtgcgccgggagggcgtgggcgtggcgccgaagggtcccgggtcttcgacgcctctgcggcggctcctccctccttgcagttggatccctggcgggtgcggcccggcccggcccgtgagcggcgcacagaatgggccgatgctgcttctacacggcggggacgttgtccctgctcctgctggtgaccagcgtcacgctgctggtggcccgggtcttccagaaggctgtagaccagagtatcgagaagaaaattgtgttaaggaatggtactgaggcatttgactcctgggagaagccccctctgcctgtgtatactcagttctatttcttcaatgtcaccaatccagaggagatcctcagaggggagacccctcgggtggaagaagtggggccatacacctacagagacaaagtcttgctctgttgctcatgctggaatgcagtggcatgatcatagctcactgtaacgtcaaactcctgggctcaagccatcctcccaccttagcctcccaagtagctgacactacagggaactcagaaacaaagcaaatattcaatttggagataatggaacaacaatatctgctgttagcaacaaggcctatgtttttgaacga

SEQ ID NO: 3801 - protein, 106 aa, Homo sapiens
MGRCCFYTAGTLSLLLLVTSVTLLVARVFQKAVDQSIEKKIVLRNGTEAFDSWEKPPLPVYTQFYFFNVTNPEEILRGETPRVEEVGPYTYRDKVLLCCSCWNAVA

SEQ ID NO: 3802 - DNA, 1624 bp, Homo sapiens
agcgccctgcaccgcaggcccagcgctcgccccaccgaaattgccgaacctggttcacacactcatttactcattccgcagataggtctgagggcctcccatgggccacgcgctggggattcaaggtggctgggacattcccctgctctagaggcgctcgcaagttagcggggacaccgttaccgcaattacaacacaatgtagcaagtgcttctaccaggtgcctgctgagatcatgccagcaagcatgttctgcctggatgacctagggccccacattgaactggggcctgggggatgcataagtttgtcacgtaaggggcatgtgcaagaatggaagatgtgcaaaaaagggaggaggaggcatttcacggagaaggaaacggagtggaagcagcctgaggccctcatccaatgcagatgtctgtgccgtgcgtcttgtccagcctgcagaaccatgagccaaataaacctcttttcactacccaatctcagctcttatcaaaggtgctggaagtgcttgatcctgaccggaagctggaggacacatgggcttattgtcaggacaccaggaaaggaatgaaggaacccacgaagcttttaaaaaaacattctacccaagtctacctgggaccttccaagaagacgtctgtgtcaaacgcaggccaatggctttatgaagaaaagccacataaaatggatttgctccatgaaaatggtcctcgtcctggtcttcatgaaaatgtatgcaaagcagttagtgacttctgcaagtgggttactacttttggaatttcggacatcgatgaagagttcatcttgaaacagtttgacattgactatgagaccaaaccaagccatgatgcgctccacacgatgaagctaaatcaggttcctctggagctaaagcgtagtgtggggctcagtaaactgcaggagacagagttcttccagaaactaggctatgagaggaaactccagaaaccacagaatccttataagccaaagtgggtgaagatgaggtatggagcatggtatttgaaccccaagttgtggaaaaagcaaagagtagacgagcctctggttgaccctgaggtctcacataaggctcaagaggagaattttaaaaaggagctgcaggaacaggaggagttacttgcagaccttcacggaacagttgcctttaaggatttcattctaagcaggggctacaggacgccacgtttccttgagaatatgtatatcgggaaggaatgtaaacgtgcatgtaataagactcctataaaacgaactcaagcatagaagaatcgtaggagaatgattaggcagattttattactacgtacttggctatttctctgtctccttttaaagattaaacagagtttatgatgagtgtcccactgtggatgttcaactttgacttggcaacatctgtaaatgtaatacctgatggttataagcatttctcaatggatttctgcttcagttaatcaacattttgtatactttatcacccatgagatcaatattcacatgtaatcttctcatatttttgtggcacgtgaatattatataggtatatcaactattggtaaaaataaataaaggcataaataaaaac

SEQ ID NO: 3803 - protein, 295 aa, Homo sapiens
MQMSVPCVLSSLQNHEPNKPLFTTQSQLLSKVLEVLDPDRKLEDTWAYCQDTRKGMKEPTKLLKKHSTQVYLGPSKKTSVSNAGQWLYEEKPHKMDLLHENGPRPGLHENVCKAVSDFCKWVTTFGISDIDEEFILKQFDIDYETKPSHDALHTMKLNQVPLELKRSVGLSKLQETEFFQKLGYERKLQKPQNPYKPKWVKMRYGAWYLNPKLWKKQRVDEPLVDPEVSHKAQEENFKKELQEQEELLADLHGTVAFKDFILSRGYRTPRFLENMYIGKECKRACNKTPIKRTQA

SEQ ID NO: 3804 - DNA, 515 bp, Homo sapiens
caacattggtttttaaaataatatgaatcccacctcagcctcccaagtagtggggactacagcaacactacaccgagccacagttccctttcttgaatttggaattattttcccccagtttgagtcagagaacatttgaatggaatcatctaatgtcctatccaaaaggactatttttctttaaaatgcatcagtgtcttaggctgaagttcaagagcctccatttccaactcttgggactactattcctcatgatcaccatttagaagcctcttttactcacctgtctattcttgagtaaagtacacaaggttgaagaaagtcttccattgaagacatcaagacaaactgctcagcatttagaaatgctaccatttgccctccccagcctgagccccagttgagtctcatcttacaatccggcctaagctcgccattcttgcaaagtaagccttcacaaagcttgcttgctctcattttcaaacacaaactcgggaaaagaaaagaaaagaaaa

SEQ ID NO: 3805 - protein, 38 aa, Homo sapiens [sequence omitted]

SEQ ID NO: 3806 - DNA, 315 bp, Homo sapiens
ccaaaattacaagactgtttctgaaaatattccgaaagaatgtttagaaaacatctttttccaggtagacagagagtttgtgaggctgcatcattggcatcattttatcatcaccatcccgctcaggagctcaagaagaggggaactgagtcagttagaattacagagaaaaaaacatagtatatataaggttctggagctgaaaaatacaatgaacaaagtgaaaagtgaaacagagactatcagcagcagaattagtcaagcaaaagaaagaatctgcaaaattgaagatgagttatttgaaaatatacagtg

SEQ ID NO: 3807 - protein, 46 aa, Homo sapiens
MFRKHLFPGRQRVCEAASLASFYHHHPAQELKKRGTESVRITEKKT

SEQ ID NO: 3808 - DNA, 579 bp, Homo sapiens
agatttctgtctgcctctcattggcaaacatgacatttcagcaatttctctaaagaggaatgactgggggattttttgttcattctgaaaatcacatcgccagatccaacacctttttatcccaatcaccagtacaagccacccgtatcagtgtacactgtggctgaccgatccatagtgatgctttgagcacaaggaaggactttctggaatctacttatctgaccaagaaagcttctttccaaaagaaatgcaattgtcttgagacttcttccctagggatctgatcaactaaccagaaaagagcaaccaccagagaagagactgtgggtgtcattgtgactggctgctacctccccatgagtcttctaaaataaaacctgcaaattcacatcttccccatgcttccagagaatgcatattcttcctttgaaaaaagaaaaccagattgaagccacaaaatccacagcacacaaagaccctgctaccatgtattcacttcagtgaaagggaagcaccgaaatgctgagtgggggcaggtacagatacttcaatcactgctgatggaagacttcgaga

SEQ ID NO: 3809 - protein, 35 aa, Homo sapiens
MTGGFFVHSENHIARSNTFLSQSPVQATRISVHCG

SEQ ID NO: 3810 - DNA, 434 bp, Homo sapiens
tgacatttcagcaatttctctaaagaggaatgactggggggtatgtacagcaggcatcatgtaagaaaaactcacacctcacgacatatttgtttgatttattcagcagacttcagcaaaggaaagatgtgaaagcaacccttgattgttgattttttgttcattctgaaaatcacatcgccagatccaacacctttttatcccaatcaccagtacaagccacccgtatcagtgtacactgtggctgaccgatccatagtgatgctttgagctctggtagatgtgattatgcccattttacagatgacaaactgaagttcagtctttaagtgatttttcttgatgcagtaatgagtatgaaaactatgaagctctgtagaacttgaagaactactatattgtcagaataaattaaaatgctcatgcttcattcc

SEQ ID NO: 3811 - protein, 40 aa, Homo sapiens
MTGGYVQQASCKKNSHLTTYLFDLFSRLQQRKDVKATLDC

SEQ ID NO: 3812 - DNA, 455 bp, Homo sapiens
tttatcccaatcaccagtacaagccacccgtatcagtgtacactgtggctgaccgatccatagtgatgctttgagcacaaggaaggactttctggaatctacttatctgaccaagaaagcttctttccaaaagaaatgcaattgtcttgagacttcttccctagggatctgatcaactaaccagaaaagagcaaccaccagagaagagactattgtggtctactctatagaagggatcatgctttgaacctcatcttgaaaggagattcaatctttccttcttgctcctaatatcaacagagggtggaatatatggccctgctgctgaagtttgagatataaaatatgtacctagagctaatataatggagatccctgaaaaagttttcctaaaaaaataaaaattaaaaaaaacacacacacaatgaaataaaaatgagaggtaaaatctgctc

SEQ ID NO: 3813 - protein, 39 aa, Homo sapiens
PIHSDALSTRKDFLESTYLTKKASFQKKCNCLETSSLGI

SEQ ID NO: 3814 - DNA, 544 bp, Homo sapiens
tgtggctgaccgatccatagtgatgctttgagcacaaggaaggactttctggaatctacttatctgaccaagaaagcttctttccaaaagaaatgcaattgtcttgagacttcttccctagggatctgatcaactaaccagaaaagagcaaccaccagagaagagactattgtggtctactctatagaagggatcatgctttgaacctcatcttgaaaggagattcaatctttccttcttgctcctaatatcaacagagggtggaatatatgtgcaggaacaaataatatctctgtactgggaagtgcaagattgtcttctagtcaccggcacttgacacactaaattgatgcacatccattttaaacccggcatttgtgctccatatcttgccctttgacctatttggattcatgtgggaatgtgacctctgcttgaataggatgatgacattttcaaagaagctaaatcttaccaaaaatcagattctggtacgattgtgatcaagtagtataataaagctaatcgtggcttgcagaaatcg

SEQ ID NO: 3815 - protein, 49 aa, Homo sapiens
KGSCFEPHLERRFNLSFLLLISTEGGIYVQEQIISLYWEVQDCLLVTGT

SEQ ID NO: 3816 - DNA, 4377 bp, Homo sapiens
agctttgtcagagacccttcagcacttccatagagccatcccactagaggtcacagatcacaaaaaccctacagaaacaggaaaccgaacttcctgagtacgctacaaaacacagaaacctgtttcctctacacatctcaaactggcaaaactcagtcttagcagattcagtgtggaagcagctatcaaaaaggccataaggattttgtccccaaatttcacatgagctaccttgcttcaaactactgagatgaagggggcaagattatttgtccttctttctagtttatggagtgggggcattgggcttaacaacagtaagcattcttggactatacctgaggatgggaactctcagaagactatgccttctgcttcagttcctccaaataaaatacaaagtttgcaaatactgccaaccactcgggtcatgtcggcggagatagctacaactccagaggcaagaacttctgaagacagtcttcttaaatcaacactgcctccctcagaaacaagtgcacctgctgagggtgtgagaaatcaaactctcacatccacagagaaagcagaaggagtggtcaagttacagaatcttaccctcccaaccaacgctagcatcaagttcaatcctggagcagaatcagtggtcctttccaattctacactgaaatttcttcagagctttgccagaaagtcaaatgaacaagcaacttctctaaacacagttggaggcactggaggcattggaggcgttggaggcactggaggcgtgggaaatcgagccccacgggaaacatacctcagccggggtgacagcagttccagccaaagaactgactaccaaaaatcaaatttcgaaacaactagaggaaagaattggtgtgcttatgtacataccaggttatctcccacagtgatattggacaaccaggtcacttatgtcccaggtgggaaaggaccttgtggctggaccggtggatcctgtcctcagagatctcagaagatatccaatcctgtctataggatgcaacataaaattgtcacctcattggattggaggtgctgtcctggatacagtgggccgaaatgtcaactaagagcccaggaacagcaaagtttgatacacaccaaccaggctgaaagtcatacagctgttggcagaggagtagctgagcagcagcagcagcaaggctgtggtgacccagaagtgatgcaaaaaatgactgatcaggtgaactaccaggcaatgaaactgactcttctgcagaagaagattgacaatatttctttgactgtgaatgatgtaaggaacacttactcctccctagaaggaaaagtcagcgaagataaaagcagagaatttcaatctcttctaaaaggtctaaaatccaaaagcattaatgtactgataagagacatagtaagagaacaatttaaaatttttcaaaatgacatgcaagagactgtagcacagctcttcaagactgtatcaagtctatcagaggacctcgaaagcaccaggcaaataattcaaaaagttaatgaatctgtggtttcaatagcagcccagcaaaagtttgttttggtgcaagagaatcggcccactttgactgatatagtggaactaaggaatcacattgtgaatgtaaggcaagaaatgactcttacatgtgagaagcctattaaagaactagaagtaaagcagactcatttagaaggtgctctagaacaggaacactcaagaagcattctgtattatgaatccctcaataaaactctttctaaattgaaggaagtacatgagcagcttttatcaactgaacaggtatcagaccagaagaatgctccagctgctgagtcagttagcaataatgtcactgagtacatgtctactttacatgaaaatataaagaagcagagtttgatgatgctgcaaatgtttgaagatttgcacattcaagaaagcaagattaacaatctcaccgtctctttggagatggagaaagagtctctcagaggtgaatgtgaagacatgttatccaaatgcagaaatgattttaaatttcaacttaaggacacagaagagaatttacatgtgttaaatcaaacattggctgaagttctctttccaatggacaataagatggacaaaatgagtgagcaactaaatgatttgacttatgatatggagatccttcaacccttgcttgagcagggagcatcactcagacagacaatgacatatgaacaaccaaaggaagcaatagtgataaggaaaaagatagaaaatctgactagtgctgtcaatagtctaaattttattatcaaagaacttacaaaaagacacaacttacttagaaatgaagtacagggtcgtgatgatgccttagaaagacgtatcaatgaatatgccttagaaatggaagatggcctcaataagacaatgactattataaataatgctattgatttcattcaagataactatgccctaaaagagactttaagtactattaaggataatagtgagatccatcataaatgtacctccgatatggaaactattttgacatttattcctcagttccaccgtctgaatgattctattcagactttggtcaatgacaatcagagatataactttgttttgcaagtcgccaagacccttgcaggtattcccagagatgagaaactaaatcagtccaacttccaaaagatgtatcaaatgttcaatgaaaccacttcccaagtgagaaaataccagcaaaatatgagtcatttggaagaaaaactactcttaactaccaagatttccaaaaattttgagactcggttgcaagacattgagtctaaagttacccagacgctcataccttattatatttcagttaaaaaaggcagtgtagttacaaatgagagagatcaggctcttcaactgcaagtattaaattccagatttaaggcgttggaagcaaaatctatccatctttcaattaacttcttttcgcttaacaaaactctccacgaagttttaacaatgtgtcacaatgcttctacaagtgtgtcagaactgaatgctaccatccctaagtggataaaacattccctgccagatattcaacttcttcagaaaggtctaacagaatttgtggaaccaataattcaaataaaaactcaagctgccctatctaatttaacttgttgtatagatcgatcgttgcctggtagtctggcaaatgttgtcaagtctcagaagcaagtaaaatcattgccaaagaaaattaacgcacttaagaaaccaacggtaaatcttaccacagtcctgataggccggactcaaagaaacacggacaacataatatatcctgaggagtattcaagctgtagtcggcatccgtgccaaaatgggggcacgtgcataaatggaagaactagctttacctgtgcctgcagacatccttttactggtgacaactgcactatcaagcttgtggaagaaaatgctttagctccagatttttccaaaggatcttacagatatgcacccatggtggcattttttgcatctcatacgtatggaatgactatacctggtcctatcctgtttaataacttggatgtcaattatggagcttcatataccccaagaactggaaaatttagaattccgtatcttggagtatatgttttcaagtacaccatcgagtcatttagtgctcatatttctggatttttagtggttgatggaatagacaagcttgcatttgagtctgaaaatattaacagtgaaatacactgtgatagggttttaactggggatgccttattagaattaaattatgggcaggaagtctggttacgacttgcaaaaggaacaattccagccaagtttccccctgttactacatttagtggctatttattatatcgtacataagttagtatgaaaaacagactatcacctttattgagaaacagccagtgttttcatttatctttgcttgcacatctgctctgttttggtttttctacaggaaatgaaaatcaacttgtttttttaatatgagtaaacttgtatgtctattttataaaattatttgaatattgtttaatgtctgaatatgaaagagttcttgatcctaaagaaatttagtggcacagaaaacaaagtgaatttgttagcataattattcctattcttatttcttcattttaagtcattgcaatggaaagtaatattataaaatggtaattacaacatattatcagtcacagttttctttccaattaaacacttaacttttgttattccctgtatataaatatataacacacattttctagattcacaaatttaaataaattactcaaaaaatg

SEQ ID NO: 3817 - protein, 1228 aa, Homo sapiens; identical to SEQ ID NO: 439

SEQ ID NO: 3818 - DNA, 5146 bp, Homo sapiens
agctttgtcagagacccttcagcacttccatagagccatcccactagaggtcacagatcacaaaaaccctacagaaacaggaaaccgaacttcctgagtacgctacaaaacacagaaacctgtttcctctacacatctcaaactggcaaaactcagtcttagcagattcagtgtggaagcagctatcaaaaaggccataaggattttgtccccaaatttcacatgagctaccttgcttcaaactactgagatgaagggggcaagattatttgtccttctttctagtttatggagtgggggcattgggcttaacaacagtaagcattcttggactatacctgaggatgggaactctcagaagactatgccttctgcttcagttcctccaaataaaatacaaagtttgcaaatactgccaaccactcgggtcatgtcggcggagatagctacaactccagaggcaagaacttctgaagacagtcttcttaaatcaacactgcctccctcagaaacaagtgcacctgctgagggtgtgagaaatcaaactctcacatccacagagaaagcagaaggagtggtcaagttacagaatcttaccctcccaaccaacgctagcatcaagttcaatcctggagcagaatcagtggtcctttccaattctacactgaaatttcttcagagctttgccagaaagtcaaatgaacaagcaacttctctaaacacagttggaggcactggaggcattggaggcgttggaggcactggaggcgtgggaaatcgagccccacgggaaacatacctcagccggggtgacagcagttccagccaaagaactgactaccaaaaatcaaatttcgaaacaactagaggaaagaattggtgtgcttatgtacataccaggttatctcccacagtgatattggacaaccaggtcacttatgtcccaggtgggaaaggaccttgtggctggaccggtggatcctgtcctcagagatctcagaagatatccaatcctgtctataggatgcaacataaaattgtcacctcattggattggaggtgctgtcctggatacagtgggccgaaatgtcaactaagagcccaggaacagcaaagtttgatacacaccaaccaggctgaaagtcatacagctgttggcagaggagtagctgagcagcagcagcagcaaggctgtggtgacccagaagtgatgcaaaaaatgactgatcaggtgaactaccaggcaatgaaactgactcttctgcagaagaagattgacaatatttctttgactgtgaatgatgtaaggaacacttactcctccctagaaggaaaagtcagcgaagataaaagcagagaatttcaatctcttctaaaaggtctaaaatccaaaagcattaatgtactgataagagacatagtaagagaacaatttaaaatttttcaaaatgacatgcaagagactgtagcacagctcttcaagactgtatcaagtctatcagaggacctcgaaagcaccaggcaaataattcaaaaagttaatgaatctgtggtttcaatagcagcccagcaaaagtttgttttggtgcaagagaatcggcccactttgactgatatagtggaactaaggaatcacattgtgaatgtaaggcaagaaatgactcttacatgtgagaagcctattaaagaactagaagtaaagcagactcatttagaaggtgctctagaacaggaacactcaagaagcattctgtattatgaatccctcaataaaactctttctaaattgaaggaagtacatgagcagcttttatcaactgaacaggtatcagaccagaagaatgctccagctgctgagtcagttagcaataatgtcactgagtacatgtctactttacatgaaaatataaagaagcagagtttgatgatgctgcaaatgtttgaagatttgcacattcaagaaagcaagattaacaatctcaccgtctctttggagatggagaaagagtctctcagaggtgaatgtgaagacatgttatccaaatgcagaaatgattttaaatttcaacttaaggacacagaagagaatttacatgtgttaaatcaaacattggctgaagttctctttccaatggacaataagatggacaaaatgagtgagcaactaaatgatttgacttatgatatggagatccttcaacccttgcttgagcagggagcatcactcagacagacaatgacatatgaacaaccaaaggaagcaatagtgataaggaaaaagatagaaaatctgactagtgctgtcaatagtctaaattttattatcaaagaacttacaaaaagacacaacttacttagaaatgaagtacagggtcgtgatgatgccttagaaagacgtatcaatgaatatgccttagaaatggaagatggcctcaataagacaatgactattataaataatgctattgatttcattcaagataactatgccctaaaagagactttaagtactattaaggataatagtgagatccatcataaatgtacctccgatatggaaactattttgacatttattcctcagttccaccgtctgaatgattctattcagactttggtcaatgacaatcagagatataactttgttttgcaagtcgccaagacccttgcaggtattcccagagatgagaaactaaatcagtccaacttccaaaagatgtatcaaatgttcaatgaaaccacttcccaagtgagaaaataccagcaaaatatgagtcatttggaagaaaaactactcttaactaccaagatttccaaaaattttgagactcggttgcaagacattgagtctaaagttacccagacgctcataccttattatatttcagttaaaaaaggcagtgtagttacaaatgagagagatcaggctcttcaactgcaagtattaaattccagatttaaggcgttggaagcaaaatctatccatctttcaattaacttcttttcgcttaacaaaactctccacgaagttttaacaatgtgtcacaatgcttctacaagtgtgtcagaactgaatgctaccatccctaagtggataaaacattccctgccagatattcaacttcttcagaaaggtctaacagaatttgtggaaccaataattcaaataaaaactcaagctgccctatctaatttaacttgttgtatagatcgatcgttgcctggtagtctggcaaatgttgtcaagtctcagaagcaagtaaaatcattgccaaagaaaattaacgcacttaagaaaccaacggtaaatcttaccacagtcctgataggccggactcaaagaaacacggacaacataatatatcctgaggagtattcaagctgtagtcggcatccgtgccaaaatgggggcacgtgcataaatggaagaactagctttacctgtgcctgcagacatccttttactggtgacaactgcactatcaagcttgtggaagaaaatgctttagctccagatttttccaaaggatcttacagatatgcacccatggtggcattttttgcatctcatacgtatggaatgactatacctggtcctatcctgtttaataacttggatgtcaattatggagcttcatataccccaagaactggaaaatttagaattccgtatcttggagtatatgttttcaagtacaccatcgagtcatttagtgctcatatttctggatttttagtggttgatggaatagacaagcttgcatttgagtctgaaaatattaacagtgaaatacactgtgatagggttttaactggggatgccttattagaattaaattatgggcaggaagtctggttacgacttgcaaaaggaacaattccagccaagtttccccctgttactacatttagtggctatttattatatcgtacataagttagtatgaaaaacagactatcacctttattgagaaacagccagtgttttcatttatctttgcttgcacatctgctctgttttggtttttctacaggaaatgaaaatcaacttgtttttttaatatgagtaaacttgtatgtctattttataaaattatttgaatattgtttaatgtctgaatatgaaagagttcttgatcctaaagaaatttagtggcacagaaaacaaagtgaatttgttagcataattattcctattcttatttcttcattttaagtcattgcaatggaaagtaatattataaaatggtaattacaacatattatcagtcacagttttctttccaattaaacacttaacttttgttattccctgtatataaatatataacacacattttctagattcacaaatttaaataaattactcaaaaaatgaaaattgattttgtaaacttttatttttactctttacgttgagttgatcaattttccatactaagattttcattcagaatcaaaattaagaaagttggactgaaaatatgaaaaatgcttaactattgttctcttcctataattctctaattataacatagtaatttacatgtagttggacatgtacactcaagtctaagaatatatgagtggatcatttaccgccccccgccccacaacatctataaggggcaaaaagtctttttctaataagtattcttctatggtagtacctacagatctgcccttcttcttctaaagggtaagtcataatctgtgtaatactacaatttatgggatgctcactatgccctgtttctcttctaaacaatttacatgtaatgtctcattcctcacaataacccttgtaaagtgggcatgattaccatgatttttatagttgaagaacctaagacacagagaccaaggcccatgagctcatagggctgaggcaggatttggaatcaggccatgtcttctccagagcccacatccatcctttctctatattgcctcccacagatgtgctaaaatttatttaactaatcctttatcctctatttgtgttgtctcccattttttattattacaatattactgtggtgaacatgcttaaaaatacattccttggatatctgacaacgtgtttctgaaaaacagattttcataagtaataataaaaataataataaaaaagttttggtatggt

SEQ ID NO: 3819 - protein, 1228 aa, Homo sapiens; identical to SEQ ID NO: 439

SEQ ID NO: 3820 - DNA, 2925 bp, Homo sapiens
acacatctcaaactggcaaaactcagtcttagcagattcagtgtggaagcagctatcaaaaaggccataaggattttgtccccaaatttcacatgagctaccttgcttcaaactactgagatgaagggggcaagattatttgtccttctttctagtttatggagtgggggcattgggcttaacaacagtaagcattcttggactatacctgaggatgggaactctcagaagactatgccttctgcttcagttcctccaaataaaatacaaagtttgcaaatactgccaaccactcgggtcatgtcggcggagatagctacaactccagagaaagcagaaggagtggtcaagttacagaatcttaccctcccaaccaacgctagcatcaagttcaatcctggagcagaatcagtggtcctttccaattctacactgaaatttcttcagagctttgccagaaagtcaaatgaacaagcaacttctctaaacacagttggaggcactggaggcattggaggcgttggaggcactggaggcgtgggaaatcgagccccacgggaaacatacctcagccggggtgacagcagttccagccaaagaactgactaccaaaaatcaaatttcgaaacaactagaggaaagaattggtgtgcttatgtacataccaggttatctcccacagtgatattggacaaccaggtcacttatgtcccaggtgggaaaggaccttgtggctggaccggtggatcctgtcctcagagatctcagaagatatccaatcctgtctataggatgcaacataaaattgtcacctcattggattggaggtgctgtcctggatacagtgggccgaaatgtcaactaagagcccaggaacagcaaagtttgatacacaccaaccaggctgaaagtcatacagctgttggcagaggagtagctgagcagcagcagcagcaaggctgtggtgacccagaagtgatgcaaaaaatgactgatcaggtgaactaccaggcaatgaaactgactcttctgcagaagaagattgacaatatttctttgactgtgaatgatgtaaggaacacttactcctccctagaaggaaaagtcagcgaagataaaagcagagaatttcaatctcttctaaaagaggagtattcaagctgtagtcggcatccgtgccaaaatgggggcacgtgcataaatggaagaactagctttacctgtgcctgcagacatccttttactggtgacaactgcactatcaagcttgtggaagaaaatgctttagctccagatttttccaaaggatcttacagatatgcacccatggtggcattttttgcatctcatacgtatggaatgactatacctggtcctatcctgtttaataacttggatgtcaattatggagcttcatataccccaagaactggaaaatttagaattccgtatcttggagtatatgttttcaagtacaccatcgagtcatttagtgctcatatttctggatttttagtggttgatggaatagacaagcttgcatttgagtctgaaaatattaacagtgaaatacactgtgatagggttttaactggggatgccttattagaattaaattatgggcaggaagtctggttacgacttgcaaaaggaacaattccagccaagtttccccctgttactacatttagtggctatttattatatcgtacataagttagtatgaaaaacagactatcacctttattgagaaacagccagtgttttcatttatctttgcttgcacatctgctctgttttggtttttctacaggaaatgaaaatcaacttgtttttttaatatgagtaaacttgtatgtctattttataaaattatttgaatattgtttaatgtctgaatatgaaagagttcttgatcctaaagaaatttagtggcacagaaaacaaagtgaatttgttagcataattattcctattcttatttcttcattttaagtcattgcaatggaaagtaatattataaaatggtaattacaacatattatcagtcacagttttctttccaattaaacacttaacttttgttattccctgtatataaatatataacacacattttctagattcacaaatttaaataaattactcaaaaaatgaaaattgattttgtaaacttttatttttactctttacgttgagttgatcaattttccatactaagattttcattcagaatcaaaattaagaaagttggactgaaaatatgaaaaatgcttaactattgttctcttcctataattctctaattataacatagtaatttacatgtagttggacatgtacactcaagtctaagaatatatgagtggatcatttaccgccccccgccccacaacatctataaggggcaaaaagtctttttctaataagtattcttctatggtagtacctacagatctgcccttcttcttctaaagggtaagtcataatctgtgtaatactacaatttatgggatgctcactatgccctgtttctcttctaaacaatttacatgtaatgtctcattcctcacaataacccttgtaaagtgggcatgattaccatgatttttatagttgaagaacctaagacacagagaccaaggcccatgagctcatagggctgaggcaggatttggaatcaggccatgtcttctccagagcccacatccatcctttctctatattgcctcccacagatgtgctaaaatttatttaactaatcctttatcctctatttgtgttgtctcccattttttattattacaatattactgtggtgaacatgcttaaaaatacattccttggatatctgacaacgtgtttctgaaaaacagattttcataagtaataataaaaataataataaaaaagttttggtatggt

SEQ ID NO: 3821 - protein, 531 aa, Homo sapiens
MKGARLFVLLSSLWSGGIGLNNSKHSWTIPEDGNSQKTMPSASVPPNKIQSLQILPTTRVMSAEIATTPEKAEGVVKLQNLTLPTNASIKFNPGAESVVLSNSTLKFLQSFARKSNEQATSLNTVGGTGGIGGVGGTGGVGNRAPRETYLSRGDSSSSQRTDYQKSNFETTRGKNWCAYVHTRLSPTVILDNQVTYVPGGKGPCGWTGGSCPQRSQKISNPVYRMQHKIVTSLDWRCCPGYSGPKCQLRAQEQQSLIHTNQAESHTAVGRGVAEQQQQQGCGDPEVMQKMTDQVNYQAMKLTLLQKKIDNISLTVNDVRNTYSSLEGKVSEDKSREFQSLLKEEYSSCSRHPCQNGGTCINGRTSFTCACRHPFTGDNCTIKLVEENALAPDFSKGSYRYAPMVAFFASHTYGMTIPGPILFNNLDVNYGASYTPRTGKFRIPYLGVYVFKYTIESFSAHISGFLVVDGIDKLAFESENINSEIHCDRVLTGDALLELNYGQEVWLRLAKGTIPAKFPPVTTFSGYLLYRT

SEQ ID NO: 3822 - DNA, 1169 bp, Homo sapiens
gacgtcctgtgcccagatcgacaggcatcctgggccgtggagcccatttttcttacttaaaattcagtctttttcctattctgctgcaaactacgatttgagatcaacaggaaaataggtcactttattctcttttaccttgattctttttccgtaacagaggagtattcaagctgtagtcggcatccgtgccaaaatgggggcacgtgcataaatggaagaactagctttacctgtgcctgcagacatccttttactggtgacaactgcactatcaagcttgtggaagaaaatgctttagctccagatttttccaaaggatcttacagatatgcacccatggtggcattttttgcatctcatacgtatggaatgactatacctggtcctatcctgtttaataacttggatgtcaattatggagcttcatataccccaagaactggaaaatttagaattccgtatcttggagtatatgttttcaagtacaccatcgagtcatttagtgctcatatttctggatttttagtggttgatggaatagacaagcttgcatttgagtctgaaaatattaacagtgaaatacactgtgatagggttttaactggggatgccttattagaattaaattatgggcaggaagtctggttacgacttgcaaaaggaacaattccagccaagtttccccctgttactacatttagtggctatttattatatcgtacataagttagtatgaaaaacagactatcacctttattgagaaacagccagtgttttcatttatctttgcttgcacatctgctctgttttggtttttctacaggaaatgaaaatcaacttgtttttttaatatgagtaaacttgtatgtctattttataaaattatttgaatattgtttaatgtctgaatatgaaagagttcttgatcctaaagaaatttagtggcacagaaaacaaagtgaatttgttagcataattattcctattcttatttcttcattttaagtcattgcaatggaaagtaatattataaaatggtaattacaacatattatcagtcacagttttctttccaattaaacacttaacttttgttattccctgtatataaatatataacacacattttctagattcacaaatttaaataaattactcaaaaaatg

SEQ ID NO: 3823 - protein, 129 aa, Homo sapiens [sequence omitted]

SEQ ID NO: 3824 - DNA, 1938 bp, Homo sapiens
gacgtcctgtgcccagatcgacaggcatcctgggccgtggagcccatttttcttacttaaaattcagtctttttcctattctgctgcaaactacgatttgagatcaacaggaaaataggtcactttattctcttttaccttgattctttttccgtaacagaggagtattcaagctgtagtcggcatccgtgccaaaatgggggcacgtgcataaatggaagaactagctttacctgtgcctgcagacatccttttactggtgacaactgcactatcaagcttgtggaagaaaatgctttagctccagatttttccaaaggatcttacagatatgcacccatggtggcattttttgcatctcatacgtatggaatgactatacctggtcctatcctgtttaataacttggatgtcaattatggagcttcatataccccaagaactggaaaatttagaattccgtatcttggagtatatgttttcaagtacaccatcgagtcatttagtgctcatatttctggatttttagtggttgatggaatagacaagcttgcatttgagtctgaaaatattaacagtgaaatacactgtgatagggttttaactggggatgccttattagaattaaattatgggcaggaagtctggttacgacttgcaaaaggaacaattccagccaagtttccccctgttactacatttagtggctatttattatatcgtacataagttagtatgaaaaacagactatcacctttattgagaaacagccagtgttttcatttatctttgcttgcacatctgctctgttttggtttttctacaggaaatgaaaatcaacttgtttttttaatatgagtaaacttgtatgtctattttataaaattatttgaatattgtttaatgtctgaatatgaaagagttcttgatcctaaagaaatttagtggcacagaaaacaaagtgaatttgttagcataattattcctattcttatttcttcattttaagtcattgcaatggaaagtaatattataaaatggtaattacaacatattatcagtcacagttttctttccaattaaacacttaacttttgttattccctgtatataaatatataacacacattttctagattcacaaatttaaataaattactcaaaaaatgaaaattgattttgtaaacttttatttttactctttacgttgagttgatcaattttccatactaagattttcattcagaatcaaaattaagaaagttggactgaaaatatgaaaaatgcttaactattgttctcttcctataattctctaattataacatagtaatttacatgtagttggacatgtacactcaagtctaagaatatatgagtggatcatttaccgccccccgccccacaacatctataaggggcaaaaagtctttttctaataagtattcttctatggtagtacctacagatctgcccttcttcttctaaagggtaagtcataatctgtgtaatactacaatttatgggatgctcactatgccctgtttctcttctaaacaatttacatgtaatgtctcattcctcacaataacccttgtaaagtgggcatgattaccatgatttttatagttgaagaacctaagacacagagaccaaggcccatgagctcatagggctgaggcaggatttggaatcaggccatgtcttctccagagcccacatccatcctttctctatattgcctcccacagatgtgctaaaatttatttaactaatcctttatcctctatttgtgttgtctcccattttttattattacaatattactgtggtgaacatgcttaaaaatacattccttggatatctgacaacgtgtttctgaaaaacagattttcataagtaataataaaaataataataaaaaagttttggtatggt

SEQ ID NO: 3825 - protein, 129 aa, Homo sapiens [sequence omitted]

SEQ ID NO: 3826 - DNA, 507 bp, Homo sapiens
ggtttcaatactagtgtcacaaaatgggaagaaaaaggactgggattatgcctccatttaaaaaattattcgatatttgattcggtagagacaaaggcaatgtgccatggaggaatgcagccacacggaatgatgcaaccacaagccgaggaacaccagtagccactagaagcctgaagaggcaaggaacggattctccctggagcctaccaagggattatggccctgctgacaccttgcttttggccaagtgatactattatactttcaaactgcagacttccagaactgtgagataataaatttctgttgttttagaccatcaagtttgcagtaacttgttatagcagctacaagaagcgaatagaagacccttccagctttaaaattgtatgggtggcaaaacaaactgaagatgtaaaaatcaataggcatttagaataacttgctttttactaactaaaattctaaagtacaactgagcattaaaagttctgggcttcttga

SEQ ID NO: 3827 - protein, 57 aa, Homo sapiens
FGRDKGNVPWRNAATRNDATTSRGTPVATRSLKRQGTDSPWSLPRDYGPADTLLLAK

SEQ ID NO: 3828 - DNA, 1909 bp, Homo sapiens
acagccccggagcgcggcctgccggggaggtggatctcgcgctccccacacagtcacactccgcgcactcacacacttggaagcgcctccccacgtccctcccctgccctcctcttgctctgctcttctctccctcaccacaaatagtcgccgacctactgccaatccgcctctcctctctctctctctctgtctcaacatgactgactgggaagcggtggctcgggcagagcagctccgctggcgcaggcaggaggagcaggaggattattaaataacgcagctggactctgtgcaactgggagtggagaggagcccaacagccgagaaggggagggagggcagaggagggggaccaggaaggacacccccgtgccccgaagacataaatccctgagtgcccgggaggagccttaacaagcgcacggagccctcaaggctgcaaagttggctttcacagtgcaagcctttgattcccaatgggggactcaggatcaagacgatctaccctggtctcccggttgccaatattcagaagaagtattaacagaagacatgattctcttccttcttcaccttcttccagtaatacagttggtgtccacagttcctctccttccagcactaactcaagctcaggtagcacaggtaaacggaggagcatattccgtactccttccattagcttccaccataagaaggggagtgagcctaagcaagagcctaccaaccagaaccttagtatttcaaatggtgctcaacctggtcacagcaatatgcagaaactgagtttggaagaacatattaagaccaggggaagacattctgttggttttagtagttcacgaaataagaagataacaagatctttgacagaggattttgaaagggaaaaagagcactcaactaacaagaatgtctttataaattgtctaagttctggcaaaagtgaaggggatgattctggtttcacagaagaccaaactcgtcgttctgttaagcagtcaacaaggaagctactccctaaatctttttcatctcactataaattttctaagccagttctacagagccaatccatttcattggtacaacagtctgaattctcattggaagttacacagtaccaagagagagaacctgtattagtaagagcttcgccatcctgttctgtggatgtaacagaacgggcaggaagctctttacaatctcctttgctttctgctgatcttaccacagctcagacaccttcagaatttttagccttgactgaagattctgtgtctgaaatggatgcattttctaaaagtggaagcatggcatcccactgtgacaactttggccacaatgattctacctctcagatgtccctcaattctgctgctgttacaaagacaacaacagaacttacgggaactgttccctgtgcaattatgtctcctgggaaatataggttagagggtcaatgtagcactgaatctaattcattaccggaaacctctgctgctaatcagaaggaagtgttattacaaattgctgaactacctgctacaagtgtgagccactcagagagtaacctaccagcagatagtgaaagagaagaaaatatagggttacaaaatggtgaaacaatgctggggacaaactccccaaggaaacttggattttatgagcaacataaagcaatagcggaacatgtaaaagggatccatcctatttcagattcaaagataatacctacttctggtgatcatcatatttttaacaaaacatcacatggatatgaagcaaatcctgccaaagttcttgccagtagtctcagtccatttcgtgaaggaagatttatagagaggagactgcgatcctcgtcagaaggcactgcagggagtagcagaatgattttgaaacc

SEQ ID NO: 3829 - protein, 475 aa, Homo sapiens
MGDSGSRRSTLVSRLPIFRRSINRRHDSLPSSPSSSNTVGVHSSSPSSTNSSSGSTGKRRSIFRTPSISFHHKKGSEPKQEPTNQNLSISNGAQPGHSNMQKLSLEEHIKTRGRHSVGFSSSRNKKITRSLTEDFEREKEHSTNKNVFINCLSSGKSEGDDSGFTEDQTRRSVKQSTRKLLPKSFSSHYKFSKPVLQSQSISLVQQSEFSLEVTQYQEREPVLVRASPSCSVDVTERAGSSLQSPLLSADLTTAQTPSEFLALTEDSVSEMDAFSKSGSMASHCDNFGHNDSTSQMSLNSAAVTKTTTELTGTVPCAIMSPGKYRLEGQCSTESNSLPETSAANQKEVLLQIAELPATSVSHSESNLPADSEREENIGLQNGETMLGTNSPRKLGFYEQHKAIAEHVKGIHPISDSKIIPTSGDHHIFNKTSHGYEANPAKVLASSLSPFREGRFIERRLRSSSEGTAGSSRMIL

SEQ ID NO: 3830 - DNA, 2034 bp, Homo sapiens
acagccccggagcgcggcctgccggggaggtggatctcgcgctccccacacagtcacactccgcgcactcacacacttggaagcgcctccccacgtccctcccctgccctcctcttgctctgctcttctctccctcaccacaaatagtcgccgacctactgccaatccgcctctcctctctctctctctctgtctcaacatgactgactgggaagcggtggctcgggcagagcagctccgctggcgcaggcaggaggagcaggaggattattaaataacgcagctggactctgtgcaactgggagtggagaggagcccaacagccgagaaggggagggagggcagaggagggggaccaggaaggacacccccgtgccccgaagacataaatccctgagtgcccgggaggagccttaacaagcgcacggagccctcaaggctgcaaagttggctttcacagtgcaagcctttgattcccaatgggggactcaggatcaagacgatctaccctggtctcccggttgccaatattcagaagaagtattaacagaagacatgattctcttccttcttcaccttcttccagtaatacagttggtgtccacagttcctctccttccagcactaactcaagctcaggtagcacaggtaaacggaggagcatattccgtactccttccattagcttccaccataagaaggggagtgagcctaagcaagagcctaccaaccagaaccttagtatttcaaatggtgctcaacctggtcacagcaatatgcagaaactgagtttggaagaacatattaagaccaggggaagacattctgttggttttagtagttcacgaaataagaagataacaagatctttgacagaggattttgaaagggaaaaagagcactcaactaacaagaatgtctttataaattgtctaagttctggcaaaagtgaaggggatgattctggtttcacagaagaccaaactcgtcgttctgttaagcagtcaacaaggaagctactccctaaatctttttcatctcactataaattttctaagccagttctacagagccaatccatttcattggtacaacagtctgaattctcattggaagttacacagtaccaagagagagaacctgtattagtaagagcttcgccatcctgttctgtggatgtaacagaacgggcaggaagctctttacaatctcctttgctttctgctgatcttaccacagctcagacaccttcagaatttttagccttgactgaagattctgtgtctgaaatggatgcattttctaaaagtggaagcatggcatcccactgtgacaactttggccacaatgattctacctctcagatgtccctcaattctgctgctgttacaaagacaacaacagaacttacgggaactgttccctgtgcaattatgtctcctgggaaatataggttagagggtcaatgtagcactgaatctaattcattaccggaaacctctgctgctaatcagaaggaagtgttattacaaattgctgaactacctgctacaagtgtgagccactcagagagtaacctaccagcagatagtgaaagagaagaaaatatagggttacaaaatggtgaaacaatgctggggacaaactccccaaggaaacttggattttatgagcaacataaagcaatagcggaacatgtaaaagggatccatcctatttcagattcaaagataatacctacttctggtgatcatcatatttttaacaaaacatcacatggatatgaagcaaatcctgccaaagttcttgccagtagtctcagtccatttcgtgaaggaagatttatagagaggagactgcgatcctcgtcagaaggcactgcagggagtagcagaatgattttgaaaccgaaagatggaaatatagaagaagttaatagtttaagaaagcaaagagcaggttcttcatcttcaaaaatgaacagtttggtaagtatatacatatgtctgcctctaataaaataatgctgtctat

SEQ ID NO: 3831 - protein, 514 aa, Homo sapiens
MGDSGSRRSTLVSRLPIFRRSINRRHDSLPSSPSSSNTVGVHSSSPSSTNSSSGSTGKRRSIFRTPSISFHHKKGSEPKQEPTNQNLSISNGAQPGHSNMQKLSLEEHIKTRGRHSVGFSSSRNKKITRSLTEDFEREKEHSTNKNVFINCLSSGKSEGDDSGFTEDQTRRSVKQSTRKLLPKSFSSHYKFSKPVLQSQSISLVQQSEFSLEVTQYQEREPVLVRASPSCSVDVTERAGSSLQSPLLSADLTTAQTPSEFLALTEDSVSEMDAFSKSGSMASHCDNFGHNDSTSQMSLNSAAVTKTTTELTGTVPCAIMSPGKYRLEGQCSTESNSLPETSAANQKEVLLQIAELPATSVSHSESNLPADSEREENIGLQNGETMLGTNSPRKLGFYEQHKAIAEHVKGIHPISDSKIIPTSGDHHIFNKTSHGYEANPAKVLASSLSPFREGRFIERRLRSSSEGTAGSSRMILKPKDGNIEEVNSLRKQRAGSSSSKMNSLVSIYICLPLIK

SEQ ID NO: 3832 - DNA, 6523 bp, Homo sapiens
acagccccggagcgcggcctgccggggaggtggatctcgcgctccccacacagtcacactccgcgcactcacacacttggaagcgcctccccacgtccctcccctgccctcctcttgctctgctcttctctccctcaccacaaatagtcgccgacctactgccaatccgcctctcctctctctctctctctgtctcaacatgactgactgggaagcggtggctcgggcagagcagctccgctggcgcaggcaggaggagcaggaggattattaaataacgcagctggactctgtgcaactgggagtggagaggagcccaacagccgagaaggggagggagggcagaggagggggaccaggaaggacacccccgtgccccgaagacataaatccctgagtgcccgggaggagccttaacaagcgcacggagccctcaaggctgcaaagttggctttcacagtgcaagcctttgattcccaatgggggactcaggatcaagacgatctaccctggtctcccggttgccaatattcagaagaagtattaacagaagacatgattctcttccttcttcaccttcttccagtaatacagttggtgtccacagttcctctccttccagcactaactcaagctcaggtagcacaggtaaacggaggagcatattccgtactccttccattagcttccaccataagaaggggagtgagcctaagcaagagcctaccaaccagaaccttagtatttcaaatggtgctcaacctggtcacagcaatatgcagaaactgagtttggaagaacatattaagaccaggggaagacattctgttggttttagtagttcacgaaataagaagataacaagatctttgacagaggattttgaaagggaaaaagagcactcaactaacaagaatgtctttataaattgtctaagttctggcaaaagtgaaggggatgattctggtttcacagaagaccaaactcgtcgttctgttaagcagtcaacaaggaagctactccctaaatctttttcatctcactataaattttctaagccagttctacagagccaatccatttcattggtacaacagtctgaattctcattggaagttacacagtaccaagagagagaacctgtattagtaagagcttcgccatcctgttctgtggatgtaacagaacgggcaggaagctctttacaatctcctttgctttctgctgatcttaccacagctcagacaccttcagaatttttagccttgactgaagattctgtgtctgaaatggatgcattttctaaaagtggaagcatggcatcccactgtgacaactttggccacaatgattctacctctcagatgtccctcaattctgctgctgttacaaagacaacaacagaacttacgggaactgttccctgtgcaattatgtctcctgggaaatataggttagagggtcaatgtagcactgaatctaattcattaccggaaacctctgctgctaatcagaaggaagtgttattacaaattgctgaactacctgctacaagtgtgagccactcagagagtaacctaccagcagatagtgaaagagaagaaaatatagggttacaaaatggtgaaacaatgctggggacaaactccccaaggaaacttggattttatgagcaacataaagcaatagcggaacatgtaaaagggatccatcctatttcagattcaaagataatacctacttctggtgatcatcatatttttaacaaaacatcacatggatatgaagcaaatcctgccaaagttcttgccagtagtctcagtccatttcgtgaaggaagatttatagagaggagactgcgatcctcgtcagaaggcactgcagggagtagcagaatgattttgaaaccgaaagatggaaatatagaagaagttaatagtttaagaaagcaaagagcaggttcttcatcttcaaaaatgaacagtttggatgttttgaataatttgggatcttgtgaactggatgaagatgatctaatgcttgatcttgaatttttagaggaacagagtcttcacccttctgtttgccgggaggactcatatcactctgtcgtctcatgtgccgcagtagttcttactcctatggaaccaatgatagaaatgaagaaaagagaagaaccagaatttcctgagccttccaaacagaatctttccctgaaattaacaaaggacgttgatcaagaagccaggtgttcccacatcagccgaatgcccaacagtccatctgcggattggcctctacaaggtgtggaagaaaacggaggcatagattctctgccattcagactgatgttacaggactgcacggcagtcaagacgttattattaaagatgaagagagttcttcaagagagtgcagacatgagtccagcaagcagtaccacgtcacttcctgttagtcctcttactgaagagccagtgcctttcaaggatataatgaaagatgaatgctcgatgctcaagctgcagctgaaagagaaggatgaactcatttcccaacttcaggaagagctgggaaaagtccggcatttacagaaggcttttgcttcaagagtagataaatccacacagactgaactactatgctatgatggtttaaacttgaaaagactagagacagtacaaggagggagagaggctacatatcgaaatcgaattgtgagccaaaatctcagcacaagggacagaaaagcaatacatactcccaccgaggaccgttttaggtattcggcagcggaccagacaagcccctacaaaaacaagacctgtcaactcccaagtctctgtttaagtaatttcctgaaggacaaggaactagcagaagttatcaaacattcaagaggaacttatgaaaccctcacttcagacgttacacagaacttacgggccaccgttgggcagagctctctgaagccaacagctaagacagaagggctctccacgttcttagagaaaccaaaggaccaagttgctacggcccgacagcattcgacctttacaggcaggtttggacagccacccagagggccaatctctttacacatgtacagcaggaagaatgtgtttctccaccacaatttacacagcactgagctgcaaactctaggccagcaggatgggtaattaaatcaccgtattcctgtctttgggtaggataaagatggttagtgtttctcgtgcatagttcatattaaaattgtcatgtactttttcttacattttagttataaacagagttgtgttgttgggttttttttcttagtcataaacaaagacttgtgggttttttttttccaagagtgaaagtttgagcatgttaattgaactaggttgcattgccttgaagactttactatataggtgtataataaatgggaccatcatgatcgtttatatagtccataatttatttattttttatctctatcacttactgatatgcattaaggtttcagaagataatatcaaatagcaatctgttcactgttaatggtgttactataaaagtagacctgatgaaaaatagataaaggaattataaagaattttaaattatataattaatagaaggaggaaaaaagagaaatgttaacgtcttatatttggtggtatatttatttgaagaatgtggcttgcttgcatgtaacctagagatgtgtttgtctctattacatacattcaagctcatcttgtgatactagtaagggggaaatggctgtattttttttcctttaaacgtttagttcatactagttcacaaaggatttcagacagagtaattgctagccaaatagagaatgacagctctgatctttgaaaaattttgcttttagtttttgttattgatgttgaagtaccgtgacataacacaaggtgataaagttggttgaattttgtcagatgatgcataaatactgacatgctatattctttgagccactgtcatggcaatataaacattttttcaaaatttcaaggatgaaacatcctaagaaaattattctttttctttactttccttattttttaaaatgttcttttttatgtaaatccaattttggtttatatacatcaacccatatctataattttatgaactgaagaacagaaagtcagtattttagtagccagcatacaatattctgactatgcagaaatctagatttggaacaaaagtaaagtaaatgtgaacattggcaatttaatcttagaaataagcttctaacaggaatatttaaaacccatttgatggcaaatatttctctttgacaaataaggcccaaatatgttataatatgttatatacttatgtgcactttagatcaatatatgaattgatctatggataattccatcatgttcaattagtagcagagcagaatcaaagagtacaattgaatacataaataaataatttttaaaagactaataggaatcaaggctgcagttttcttatacacatcagagctgttaagtacatccacattagccatagtccatgcaaattgaaactgtcatacctactgcatgatctgtttcccttgcattttctaacagaatctgtcagcgtgcacaagcaagatgaacaaagggaaattgagatagcagttttagcatggcatctgacaacttgcttaaattaaagctgtgtgcaaaatgcatctcctattataaaaatgtatttgtgccctgtgctttggggaaaagccattagacactccacccctgagctttaactactgaactttgatacatttgcaaacttagattggaactgataaagtaaggagtcgagtggatatgttgtacttgtaattttggttttccaaaggaacacacatgtgcatcaaggcagacatttgccaaatgttttctttctttgcgtgtttgtaattctgccaaaagagaacaatatacactgcaaattgcttgacttaatgagattgccatctaaagttcccaccatactttggaagctataatgatcatgcagatatacactttgggctgggcaatatttaagaaatgataggaaaatagaaaaatcatgattattaattgtggaattcagcttgatttgtcctaaatgttggtgtctgttgctagagtattttaaatctgtacataaataagcatgataaaataatcaaggattttttcccaggatatggaagaactatgtatcacaaataatgtttttgatttggacttttggagttgatagttttgttttcctggaagatagacttttgaattatactttataaaaataatctatttatagaagatctgtcatttaatagacattttaagagatgttttaaacgctagtattttcttgaaaaatcttttttaaagctgaatcattcaaaagaaaacctggattaaacagttcgattttaaaaggaagggtattttttggaaatatcatcttaaagctgttttgtatcagtattttcaacattgttataatattatttgtaatactaagtgtaactcaggcctggagaaggtgtaagcccactatgctaatgtacatcagtaactgtaaaacaggggttctttgtaagttcctcttgtgtatatatagtaacttataacaatggcatgtgggcattctttcagtgaattgctttctttgtactaaaatctctagttttctaagacagttccatgtataaaaatgatttatgcatttctccaaggcggtacatatccaaagacatgacaccagggggaaaaagtgcttgtttttctgatggaagcagtggtcttttcttttctttcctctttcttttgtgcatgtgtatgtgtagctaagcctaaataaccctgtaaaatttctgctgcaaattgtctcttctgaatttagaatgtgttttaaaggaacacttaggaagagaaataccttgaagaaaagctgtttccacctgaaataaactgttcccatttttataattattggaacatgaaactgtatttctatgaactcaatgatttttttccataaaattatatgctaagagagtcaccacaaaactatgaattctctcccgaattatttttgcttctttggagcaccatagtctttgttcaaatcacaacatgaaactgttgctgcaatgctaaagatgtgaatccaccactatcaatacggtcagggtaaaacctggagccacatgttattcaagttatttttgttatctaatgattgacatgaaaataaaatagtaagccaatattaatttgtaggcatagttgccccacttaaagtgtttacaaagattttcatgattaatctgggtttatgatttaatcctaactcattgtcattatttcctgaatgttgaactcccattataggaaattccacattttgttttgttttctttgtcttgtttaatagagataataaccatacacccctctccagaaaaaagtttttaaaaattattatgatatat

SEQ ID NO: 3833 - protein, 900 aa, Homo sapiens
MGDSGSRRSTLVSRLPIFRRSINRRHDSLPSSPSSSNTVGVHSSSPSSTNSSSGSTGKRRSIFRTPSISFHHKKGSEPKQEPTNQNLSISNGAQPGHSNMQKLSLEEHIKTRGRHSVGFSSSRNKKITRSLTEDFEREKEHSTNKNVFINCLSSGKSEGDDSGFTEDQTRRSVKQSTRKLLPKSFSSHYKFSKPVLQSQSISLVQQSEFSLEVTQYQEREPVLVRASPSCSVDVTERAGSSLQSPLLSADLTTAQTPSEFLALTEDSVSEMDAFSKSGSMASHCDNFGHNDSTSQMSLNSAAVTKTTTELTGTVPCAIMSPGKYRLEGQCSTESNSLPETSAANQKEVLLQIAELPATSVSHSESNLPADSEREENIGLQNGETMLGTNSPRKLGFYEQHKAIAEHVKGIHPISDSKIIPTSGDHHIFNKTSHGYEANPAKVLASSLSPFREGRFIERRLRSSSEGTAGSSRMILKPKDGNIEEVNSLRKQRAGSSSSKMNSLDVLNNLGSCELDEDDLMLDLEFLEEQSLHPSVCREDSYHSVVSCAAVVLTPMEPMIEMKKREEPEFPEPSKQNLSLKLTKDVDQEARCSHISRMPNSPSADWPLQGVEENGGIDSLPFRLMLQDCTAVKTLLLKMKRVLQESADMSPASSTTSLPVSPLTEEPVPFKDIMKDECSMLKLQLKEKDELISQLQEELGKVRHLQKAFASRVDKSTQTELLCYDGLNLKRLETVQGGREATYRNRIVSQNLSTRDRKAIHTPTEDRFRYSAADQTSPYKNKTCQLPSLCLSNFLKDKELAEVIKHSRGTYETLTSDVTQNLRATVGQSSLKPTAKTEGLSTFLEKPKDQVATARQHSTFTGRFGQPPRGPISLHMYSRKNVFLHHNLHSTELQTLGQQDG

SEQ ID NO: 3834 - DNA, 4207 bp, Homo sapiens
tttccatcttatacacaataaatttgaggcatagagaggttaaatttgagcagtgtcactgtaactcacttttaaaaactgtgtgataattaaatggcagtccttagttttaacccagttatggctggctgtaagttccatcccgtcatgaccattatgtttcctcaacttttctattttcctacttcctttgctctgctctcagtcactgggagacgaaagtgctgctggttagcacagaagaaactgctgctgctgcggcttctactgttgtctgccatctctgttaccatcgagaccggggctgtgtatgctcgaggtgcagggagctaatgtataaggagttaaatgaactcttgctgctgccaaatatgttgttatcactaactgcaccgctgctgtcattagtgctgctgccaacactgcaagccctgctgctgccagtgccaattctgctgatgccttgggctctccatgtcccagggtgattccatagacaagcagctgcttttagatttcacttgctcattacctgtagatcctttgccttaggactcaagcttaagcccatgaagcctgggatagaagacaattggaggctgcaaagttggctttcacagtgcaagcctttgattcccaatgggggactcaggatcaagacgatctaccctggtctcccggttgccaatattcagaagaagtattaacagaagacatgattctcttccttcttcaccttcttccagtaatacagttggtgtccacagttcctctccttccagcactaactcaagctcaggtagcacaggtaaacggaggagcatattccgtactccttccattagcttccaccataagaaggggagtgagcctaagcaagagcctaccaaccagaaccttagtatttcaaatggtgctcaacctggtcacagcaatatgcagaaactgagtttggaagaacatattaagaccaggggaagacattctgttggttttagtagttcacgaaataagaagataacaagatctttgacagaggattttgaaagggaaaaagagcactcaactaacaagaatgtctttataaattgtctaagttctggcaaaagtgaaggggatgattctggtttcacagaagaccaaactcgtcgttctgttaagcagtcaacaaggaagctactccctaaatctttttcatctcactataaattttctaagccagttctacagagccaatccatttcattggtacaacagtctgaattctcattggaagttacacagtaccaagagagagaacctgtattagtaagagcttcgccatcctgttctgtggatgtaacagaacgggcaggaagctctttacaatctcctttgctttctgctgatcttaccacagctcagacaccttcagaatttttagccttgactgaagattctgtgtctgaaatggatgcattttctaaaagtggaagcatggcatcccactgtgacaactttggccacaatgattctacctctcagatgtccctcaattctgctgctgttacaaagacaacaacagaacttacgggaactgttccctgtgcaattatgtctcctgggaaatataggttagagggtcaatgtagcactgaatctaattcattaccggaaacctctgctgctaatcagaaggaagtgttattacaaattgctgaactacctgctacaagtgtgagccactcagagagtaacctaccagcagatagtgaaagagaagaaaatatagggttacaaaatggtgaaacaatgctggggacaaactccccaaggaaacttggattttatgagcaacataaagcaatagcggaacatgtaaaagggatccatcctatttcagattcaaagataatacctacttctggtgatcatcatatttttaacaaaacatcacatggatatgaagcaaatcctgccaaagttcttgccagtagtctcagtccatttcgtgaaggaagatttatagagaggagactgcgatcctcgtcagaaggcactgcagggagtagcagaatgattttgaaaccgaaagatggaaatatagaagaagttaatagtttaagaaagcaaagagcaggttcttcatcttcaaaaatgaacagtttggatgttttgaataatttgggatcttgtgaactggatgaagatgatctaatgcttgatcttgaatttttagaggaacagagtcttcacccttctgtttgccgggaggactcatatcactctgtcgtctcatgtgccgcagtagttcttactcctatggaaccaatgatagaaatgaagaaaagagaagaaccagaatttcctgagccttccaaacagaatctttccctgaaattaacaaaggacgttgatcaagaagccaggtgttcccacatcagccgaatgcccaacagtccatctgcggattggcctctacaaggtgtggaagaaaacggaggcatagattctctgccattcagactgatgttacaggactgcacggcagtcaagacgttattattaaagatgaagagagttcttcaagagagtgcagacatgagtccagcaagcagtaccacgtcacttcctgttagtcctcttactgaagagccagtgcctttcaagaccacataccctagggaattctgaaaacctgactaacatcaattgaagattggggttcaggaggcctagatgatccaccatgacttattcaaaagttgaagatgaaaggaaagaataaagactctttccatccagttctctagtctgaaaggaaaagaaataggcaaaggacagtaggcttttctatatcattatattcattcaaatgattctcttaaaataataatgaactaaggaggctctgtaagcaagacaaacggtcaggaggcctccttgctccaagaatactccctttttactttattaaaatggtttgtaaaggtaaactaaattgactaaagtatcaatatttccatatatgcgtgatcttttagagaccataaactgtcagtgtattaggctgttcttgcatggctataaagaaatacctgagactaggtgatttataagaaaaggggtataattggcccacagttctgcagactgtacaggaagcatagtagcatgtgcttctggggaggcctcaggaagcttccaatcgtggcggaaggcaaagggaagcaggcacattgcatggtgagaacagaaacaagaacaaggaagggtggctgggaggcgccacataattttaaattaccagatctcacaagaactcactatccggaagacagcacccagccatgagggatccaccctcatgattcaaacacctcccaccaagccccacctccagcactggggatcacaactcgacatgagatttgagcagagacaaatttccaaactatatcactcagaatctggaatagaaagagtatgcaccataacacttttattctctacagaaacagacactgtgctgagctcaaaaaatagtgattcatcaaatatgaatgtgcaaacctcttttgtactgtatctgtggaatcctggttactggggctttgagcccctgtcccataaaatctctgtaatactaacctaactcatggcatttctttaaaatcaaatttaatgaaatgatggacataaagcccatggaactgagtgtgtaatcttctcttatttgattagatgttaaacttgaaacacttttttttgataaaatatgaaatacataaatgagttaaattgttgtgactttccttataagattgaaaacaataaggtgtttttaatactttttttctgtgttctcttgaaagtagctttacatgtattaagcaatcctggctttagatattagggacaataaaaatatctgcaattttcccagttttatatagccattgtttgcaagtatgaaaacctgtcttttgttactgaaatattatcttttattttggcttttttgataacttttatgtttgccttgagcaagtcacttatcttttctatttgtgttttctatttcagtttatttatgaaagacagtaataatgattgtgatgtaccttacaaaaaaagataaaatcgtattgaagagactgttgaatatgaacgcagtgtattaaatgcccgatataggaacaaaaataaaatgaagaacatttctatt

SEQ ID NO: 3835 - protein, 677 aa, Homo sapiens; identical to SEQ ID NO: 441

SEQ ID NO: 3836 - DNA, 716 bp, Homo sapiens
tagcggaacatgtaaaagggatccatcctatttcagattcaaagataatacctacttctggtgatcatcatatttttaacaaaacatcacatggatatgaagcaaatcctgccaaagttcttgccagtagtctcagtccatttcgtgaaggaagatttatagagaggagactgcgatcctcgtcagaaggcactgcagggagtagcagaatgattttgaaaccgaaagatggaaatatagaagaagttaatagtttaagaaagcaaagagcaggttcttcatcttcaaaaatgaacagtttgggtctgcgacagatctctgaccatctgaatagatgcttcacaatttgcagcacagaattgaccttcagtaaactaactacctgttctgaggtgacagtcactggaatctgaggatgttttgaataatttgggatcttgtgaactggatgaagatgatctaatgcttgatcttgaatttttagaggaacagagtcttcacccttctgaactaccgcaggaacataccaggaaagccaagagaatccacagacctttgaaggaattggatcaccgccacaggctccctgagatggcaaaaaactgtgagtctgcttgctttctcaatgggaggctcgtggtccggggcaagttctcagttctggtcactggctgcttggaaaatagactcagtgctgttgtgggacacgatgggag

SEQ ID NO: 3837 - protein, 83 aa, Homo sapiens
MLDLEFLEEQSLHPSELPQEHTRKAKRIHRPLKELDHRHRLPEMAKNCESACFLNGRLVVRGKFSVLVTGCLENRLSAVVGHD

SEQ ID NO: 3838 - DNA, 518 bp, Homo sapiens
gagcaggttcttcatcttcaaaaatgaacagtttggatgttttgaataatttgggatcttgtgaactggatgaagatgatctaatgcttgatcttgaatttttagaggaacagagtcttcacccttctgtttgccgggaggactcatatcactctgtcgtctcatgtgccgcagtagttcttactcctatggaaccaatgatagaaatgaagaaaagagaagaaccagaatttcctgagccttccaaacagtgagttgttcatttaatttttcaaggccttgtaaaatcaattagataactgataagaaaatgtgatttataataaatgtgttaatattagtataaagaaagaagaaataaattttatgggttaaaaaatcatctattctatattatcttaatgaattaacttctgtgtctcctaacttcatgtctttgaaccatgtgtcattcaagtttcattttgttaccttatcttaaggacatgggcaagtaggctgatgtactttatttccct

SEQ ID NO: 3839 - protein, 76 aa, Homo sapiens
MNSLDVLNNLGSCELDEDDLMLDLEFLEEQSLHPSVCREDSYHSVVSCAAVVLTPMEPMIEMKKREEPEFPEPSKQ

SEQ ID NO: 3840 - DNA, 1464 bp, Homo sapiens
atttctggctacagtttcaatatttaagaaaataaaaaatagacaaacagatggaaattttagcagccattttctaaacaacattttagtgactttataataatcatatagctacattatattattaaacttgatgatactaggttattttattcatgttatttttatattttccccttactgacacttaatatttattacatattgacaatcttctaagtactaaaacattatttcatttaataatcataaaaccaaacatgctattgtgttattacaaactgcagaataggaaaccgggaccctgaggagtttaagtaaattctccagagtcagaaaggtaataattatgaccatatttttatatgcctgttgtacttatcttgggagaaaatatgacattggaaaagaattgaaattatataattattgttttttcttttaattgacgatacgacattatttacatattgacttttgtctaaagaaagaggacattattgtagttttgaaaatatgggttgccttttatagttgtaccatagttttgatagctcaatttcacttacagatacatttaacgccactagatacaaagtaaaaactttgtctattatctgctgaatgtgtcatttcccacaggtgctaagaacgctcaagccatggagagagatgcatttggagttgtttacattcagacaaagctcatctggttgtttgcagctagtcacaaggtggcccattgtcctgccttgcttttctccattatctctgggtcaagttgtttctttgataaatccaaatcatgaaaatagcctgctgaaagaattcactttgaaaatgccacaaaacagacaatggaaaaatgagatgaacaagtgcgaatccatcattcttctcaggttctggaaaaatgctggttttcagctcctggaaaattctcacaagacatctgttttgttttatatcttcatttgtttccattcatctttcctactgtagacactgtctatgatttttttgtgtgggggttttggcaaagtgcatacgattactttgaatttagagaattaaattgtatttatccactgaaagctgtttttaagatctagctgtgttgtcacttggatatctagtttattacttctacttgcaaagtagtacaatgagataccaaaccaccatattttttccatctattttctcaattatggacacttttcaacttattactacagtagggaagttaaaggctatttgaattattggagaatagagatacctaggatcagaattaccaagtcatagaccgaaactttggctaagacctaaacttaatatgggtaaatattgttacattgctccctagaatattgatatggtttggatttgtgtccccacgcaaatctcatgttgaattgtaatcctcaatgttggaggtggggaatggtaaggggtgattag

SEQ ID NO: 3841 - protein, 125 aa, Homo sapiens
MCHFPQVLRTLKPWREMHLELFTFRQSSSGCLQLVTRWPIVLPCFSPLSLGQVVSLINPNHENSLLKEFTLKMPQNRQWKNEMNKCESIILLRFWKNAGFQLLENSHKTSVLFYIFICFHSSFLL

SEQ ID NO: 3842 - DNA, 1552 bp, Homo sapiens
ggcttacgcaacggtcactgggctcctgggccgctcccgggccagcgagggctgcgaaagaagttgtagcatgcataccacagaatcaaaaaatgaacatttggaggatgaaaacttccaaacatctacaactcctcagagtctcattgatcctaataatactgcacaggaagaaactaaaactgtcttatcagatacagaagaaataaaaccacagacaaaaaaggagacatacatttcttgtcctctaagaggagtattgaatgtaattattacaaatggagttatactgtttgtgatatggtgtatgacctggtcaatcttaggctctgaagctctccctggtggaaatttatttgggttgttcattattttttatagtgccattattgggggaaaaattttacaactcattagaatacctttagtgcctccacttccacctcttcttgggatgttactggctggttttacgattaggaatgttccattcatcaatgaacatgtccatgttcctaacacatggtcttcaattttaagaagcattgcccttaccattattctaataagagctgggcttggactcgatccacagttttgttctaggtgctgtctctcctgctgttgttgtcccttacatgatggtgctgcaagaaaatggatatggtgttgaggaaggcattccaaccttattaatggctgctagcagtatggatgacattctggctatcactggattcaatacatgcttgagcatagtcttttcctcaggtggtatacttaataacgccatagcctctataaggaacgtatgtattagtctgctggcaggaattgttttgggattttttgttcgatattttccaagtgaagaccagaaaaaacttacattgaagagaggattccttgttttgactatgtgtgtttctgccgtcttaggcagccaacgtattggtttacatggatctggaggattatgcacactagtgttgagtttcattgcagggacaaaatggtcccaagaaaagatgaaagtccaaaagattattacgactgtatgggatatttttcaaccacttctttttggtttagttggagcagaagtatctgtttcatcgcttgaatcaaatattgttggcatatctgttgccactctaagtttggcattatgtgttcgaattttaaccacatatctattgatgtgctttgctggttttagttttaaggagaaaatatttattgctttagcatggatgcccaaagctacagtacagattaatcaagctatccttctgttgtttcttcttcgggaggaatggacgaactgcaaggtagccaagaagtgcgagtacaccaaggaaaggcaataaccgaagccattctgaaactaaacatgtagatgtgtcagaatctgcagtgctcttggaaaagaattcaaaatagcatgtcgtttcatccttgagcttattctttgttactttttacattaattcctttttaatggatccataaaactgtgaataaataacacaataaagccagctctaccaaa

SEQ ID NO: 3843 - protein, 243 aa, Homo sapiens
MMVLQENGYGVEEGIPTLLMAASSMDDILAITGFNTCLSIVFSSGGILNNAIASIRNVCISLLAGIVLGFFVRYFPSEDQKKLTLKRGFLVLTMCVSAVLGSQRIGLHGSGGLCTLVLSFIAGTKWSQEKMKVQKIITTVWDIFQPLLFGLVGAEVSVSSLESNIVGISVATLSLALCVRILTTYLLMCFAGFSFKEKIFIALAWMPKATVQINQAILLLFLLREEWTNCKVAKKCEYTKERQ

SEQ ID NO: 3844 - DNA, 1399 bp, Homo sapiens
agcgtctgggctcctgggccgctcccgggccagcgagggctgcgaaagaagttgtagcatgcataccacagaatcaaaaaatgaacatttggaggatgaaaacttccaaacatctacaactcctcagagtctcattgatcctaataatactgcacaggaagaaactaaaactgtcttatcagatacagaagaaataaaaccacagacaaaaaaggagacatacatttcttgtcctctaagaggagtattgaatgtaattattacaaatgttttgttctaggtgctgtctctcctgctgttgttgtcccttacatgatggtgctgcaagaaaatggatatggtgttgaggaaggcattccaaccttattaatggctgctagcagtatggatgacattctggctatcactggattcaatacatgcttgagcatagtcttttcctcaggtgtggcctccgtctttcacccaggctggagtgtggtgtcacgatctcagctcactgcaaactctgcctcccgggttcaagtgattctcctccctcagcctcccgagtacctgggaccacaggtggtatacttaataacgccatagcctctataaggaacgtatgtattagtctgctggcaggaattgttttgggattttttgttcgatattttccaagtgaagaccagaaaaaacttacattgaagagaggattccttgttttgactatgtgtgtttctgccgtcttaggcagccaacgtattggtttacatggatctggaggattatgcacactagtgttgagtttcattgcagggacaaaatggtcccaagaaaagatgaaagtccaaaagattattacgactgtatgggatatttttcaaccacttctttttggtttagttggagcagaagtatctgtttcatcgcttgaatcaaatattgttggcatatctgttgccactctaagtttggcattatgtgttcgaattttaaccacatatctattgatgtgctttgctggttttagttttaaggagaaaatatttattgctttagcatggatgcccaaagctacagtacagagatgagatctcaccacgttgcccaagctggtatggtactcctgagatcaagtactccacccacctcagcctcccaaagtgctgagattacaggaatggacgaactgcaaggtagccaagaagtgcgagtacaccaaggaaaggcaataaccgaagccattctgaaactaaacatgtagatgtgtcagaatctgcagtgctcttggaaaagaattcaaaatagcatgtcgtttcatccttgagcttattctttgttactttttacattaattcctttttaatggatccataaaactgtgaataaataacacaataaagccagctctacc

SEQ ID NO: 3845 - protein, 218 aa, Homo sapiens
MLEHSLFLRCGLRLSPRLECGVTISAHCKLCLPGSSDSPPSASRVPGTTGGILNNAIASIRNVCISLLAGIVLGFFVRYFPSEDQKKLTLKRGFLVLTMCVSAVLGSQRIGLHGSGGLCTLVLSFIAGTKWSQEKMKVQKIITTVWDIFQPLLFGLVGAEVSVSSLESNIVGISVATLSLALCVRILTTYLLMCFAGFSFKEKIFIALAWMPKATVQR

SEQ ID NO: 3846 - DNA, 1859 bp, Homo sapiens
ggaagtctatccgggctttcgcgtcaccaccctgcccacctgggtggcgcgtggcttacgcaacggtcactgggctcctgggccgctcccgggccagcgagggctgcgaaagaagttgtagcatgcataccacagaatcaaaaaatgaacatttggaggatgaaaacttccaaacatctacaactcctcagagtctcattgatcctaataatactgcacaggaagaaactaaaactgtcttatcagatacagaagaaataaaaccacagacaaaaaaggagacatacatttcttgtcctctaagaggagtattgaatgtaattattacaaatggagttatactgtttgtgatatggtgtatgacctggtcaatcttaggctctgaagctctccctggtggaaatttatttgggttgttcattattttttatagtgccattattgggggaaaaattttacaactcattagaatacctttagtgcctccacttccacctcttcttgggatgttactggctggttttacgattaggaatgttccattcatcaatgaacatgtccatgttcctaacacatggtcttcaattttaagaagcattgcccttaccattattctaataagagctgggcttggactcgatccacaggctttgaggcatttgaaggtcgtttgtttcagattggctgtaggtccatgccttatggaggcaagtgcagctgctgttttttcacacttcattatgaaatttccctggcaatgggcatttctattaggttttgttctaggtgctgtctctcctgctgttgttgtcccttacatgatggtgctgcaagaaaatggatatggtgttgaggaaggcattccaaccttattaatggctgctagcagtatggatgacattctggctatcactggattcaatacatgcttgagcatagtcttttcctcaggtggtatacttaataacgccatagcctctataaggaacgtatgtattagtctgctggcaggaattgttttgggattttttgttcgatattttccaagtgaagaccagaaaaaacttacattgaagagaggattccttgttttgactatgtgtgtttctgccgtcttaggcagccaacgtattggtttacatggatctggaggattatgcacactagtgttgagtttcattgcagggacaaaatggtcccaagaaaagatgaaagtccaaaagattattacgactgtatgggatatttttcaaccacttctttttggtttagttggagcagaagtatctgtttcatcgcttgaatcaaatattgttggcatatctgttgccactctaagtttggcattatgtgttcgaattttaaccacatatctattgatgtgctttgctggttttagttttaaggagaaaatatttattgctttagcatggatgcccaaagctacagtacaggctgtgttaggtcctctggctctagaaacagcaagagtctccgcaccccacttggaaccatatgcgaaggatgtgatgacagtagcatttttagccatcttgatcacagctccaaatggagctctacttatgggcattctggggcctaaaatgcttacacgccattatgatccaagcaaaataaaactgcagttgtcaacattagaacatcattaaaaagtttacctgtcatcatctgcctgcttcttttaatgaattatttcacatgacagaagaattttaaagtagaaatatgtggggactgtacagagaatccaggatttagtaaacatgtgatttcagtacagggcttttcttggactttttactccaaagttaatttaataaaaataatattaaatggaa

SEQ ID NO: 3847 - protein, 515 aa, Homo sapiens
MHTTESKNEHLEDENFQTSTTPQSLIDPNNTAQEETKTVLSDTEEIKPQTKKETYISCPLRGVLNVIITNGVILFVIWCMTWSILGSEALPGGNLFGLFIIFYSAIIGGKILQLIRIPLVPPLPPLLGMLLAGFTIRNVPFINEHVHVPNTWSSILRSIALTIILIRAGLGLDPQALRHLKVVCFRLAVGPCLMEASAAAVFSHFIMKFPWQWAFLLGFVLGAVSPAVVVPYMMVLQENGYGVEEGIPTLLMAASSMDDILAITGFNTCLSIVFSSGGILNNAIASIRNVCISLLAGIVLGFFVRYFPSEDQKKLTLKRGFLVLTMCVSAVLGSQRIGLHGSGGLCTLVLSFIAGTKWSQEKMKVQKIITTVWDIFQPLLFGLVGAEVSVSSLESNIVGISVATLSLALCVRILTTYLLMCFAGFSFKEKIFIALAWMPKATVQAVLGPLALETARVSAPHLEPYAKDVMTVAFLAILITAPNGALLMGILGPKMLTRHYDPSKIKLQLSTLEHH

SEQ ID NO: 3848 - DNA, 1687 bp, Homo sapiens
ggaagtctatccgggctttcgcgtcaccaccctgcccacctgggtggcgcgtggcttacgcaacggtcactgggctcctgggccgctcccgggccagcgagggctgcgaaagaagttgtagcatgcataccacagaatcaaaaaatgaacatttggaggatgaaaacttccaaacatctacaactcctcagagtctcattgatcctaataatactgcacaggaagaaactaaaactgtcttatcagatacagaagaaataaaaccacagacaaaaaaggagacatacatttcttgtcctctaagaggagtattgaatgtaattattacaaatggagttatactgtttgtgatatggtgtatgacctggtcaatcttaggctctgaagctctccctggtggaaatttatttgggttgttcattattttttatagtgccattattgggggaaaaattttacaactcattagaatacctttagtgcctccacttccacctcttcttgggatgttactggctggttttacgattaggaatgttccattcatcaatgaacatgtccatgttcctaacacatggtcttcaattttaagaagcattgcccttaccattattctaataagagctgggcttggactcgatccacaggctttgaggcatttgaaggtcgtttgtttcagattggctgtaggtccatgccttatggaggcaagtgcagctgctgttttttcacacttcattatgaaatttccctggcaatgggcatttctattaggttttgttctaggtgctgtctctcctgctgttgttgtcccttacatgatggtgctgcaagaaaatggatatggtgttgaggaaggcattccaaccttattaatggctgctagcagtatggatgacattctggctatcactggattcaatacatgcttgagcatagtcttttcctcaggtggtatacttaataacgccatagcctctataaggaacgtatgtattagtctgctggcaggaattgttttgggattttttgttcgatattttccaagtgaagaccagaaaaaacttacattgaagagaggattccttgttttgactatgtgtgtttctgccgtcttaggcagccaacgtattggtttacatggatctggaggattatgcacactagtgttgagtttcattgcagggacaaaatggtcccaagaaaagatgaaagtccaaaagattattacgactgtatgggatatttttcaaccacttctttttggtttagttggagcagaagtatctgtttcatcgcttgaatcaaatattgttggcatatctgttgccactctaagtttggcattatgtgttcgaattttaaccacatatctattgatgtgctttgctggttttagttttaaggagaaaatatttattgctttagcatggatgcccaaagctacagtacaggctgtgttaggtcctctggctctagaaacagcaagagtctccgcaccccacttggaaccatatgcgaaggatgtgatgacagtagcatttttagccatcttgatcacagctccaaatggagctctacttatgggcattctggggcctaaaatgcttacacgccattatgatccaagcaaaataaaactgcagttgtcaacattagaacatcattaaaaagtttacctgtcatc

SEQ ID NO: 3849 - protein, 515 aa, Homo sapiens; identical to SEQ ID NO: 3847

SEQ ID NO: 3850 - DNA, 3716 bp, Homo sapiens
ataatctcccttgcttgaaaagcggtgattaagattggcacttgcttacaggagtgaaaaacaggtaaggggtgcgcgcgtcttaacacacacaagaggaaatacagagaaaaggaagacacaaacatgaaatgagaattaaatgaaatagaatcacactgctgatagaagggttaaaaatctaaaatacaacaagaagggcaggtgttaagcgataaaggggggcagaacaagtcttttatccggccatttaattggtcaccttaagaaagaatcctatcttcccaccgcagctgagaagacacttctaagaggtacagctaaaaggtggaggactgatagacaacttagaggttggtttcgggaacgataaaacaagtaacgggctgcccggcctgcgccgcggagtcccgaggagcctgcgctgtgctcctctcgcggtgtctcgtcatctccgggaagactcggcgcctgggtccgcgctctctgggtaagctttccgggaagctttcccgggagctcgctggtcctggccccagaagcctgcggacccgcccagggaggataagcagctgaaagaccgcgcggtgccgctccgaggccccgggacgtgggcccatggtcggcctggcgccacctttccgggggaagccacgcgcaccaggcatcgcacgcggctctgcacccgcgccgccggacctgaaacccggcggagggcacacggggctgccgctgcgggccccggaccaacccatgcttactccggagcctgtaccggcgccgacgggtcggacctccctgcgcggtgtcgcccagcgggttcgtgcgaaaggcggggccgactacacgcggtgccgcgccctgagaccgtttatctgcagtcaacgcagcctcccggctcagcctgggaagatgcgcgaatcgggaaccccagagcgcggtggctagaccgggctccgccgcctcccccacagcccctttcctaatcgttcagacggagcctggtcgacttcgccggagactgccagatctcgttcctcttccctgtgtcatcttcttaattataaataatgggggatgaagataaaagaattacatatgaagattcagaaccatccacaggaatgaattacacgccctccatgcatcaagaagcacaggaggagacagttatgaagctcaaaggtatagatgcaaatgaaccaacagaaggaagtattcttttgaaaagcagtgaaaaaaagctacaagaaacaccaactgaagcaaatcacgtacaaagactgagacaaatgctggcttgccctccacatggtttactggacagggtcataacaaatgttaccatcattgttcttctgtgggctgtagtttggtcaattactggcagtgaatgtcttcctggaggaaacctatttggaattataatcctattctattgtgccatcattggtggtaaacttttggggcttattaagttacctacattgcctccactgccttctcttcttggcatgctgcttgcagggtttctcatcagaaatatcccagtcatcaacgataatgtgcagatcaagcacaagtggtcttcctctttgagaagcatagccctgtctatcattctggttcgtgctggccttggtctggattcaaaggccctgaagaagttaaagggcgtttgtgtaagactgtccatgggtccctgtattgtggaggcgtgcacatctgctcttcttgcccattacctgctgggtttaccatggcaatggggatttatactgggttttgttttaggtgctgtatctccagctgttgtggtgccttcaatgctccttttgcagggaggaggctatggtgttgagaagggtgtcccaaccttgctcatggcagctggcagcttcgatgacattctggccatcactggcttcaacacatgcttgggcatagccttttccacaggctctactgtctttaatgtcctcagaggagttttggaggtggtaattggtgtggcaactggatctgttcttggatttttcattcagtactttccaagccgtgaccaggacaaacttgtgtgtaagagaacattccttgtgttggggttgtctgtgctagctgtgttcagcagtgtgcattttggtttccctggatcaggaggactgtgcacgttggtcatggctttccttgcaggcatgggatggaccagcgaaaaggcagaggttgaaaagataattgcagttgcctgggacatttttcagccccttctttttggactaattggagcagaggtatctattgcatctctcagaccagaaactgtaggctgcaataggatctgtggctttggacacagcaaggtcacatggagagaaacaattagaagactatggaatggatgtgttgacagtggcatttttgtccatcctcatcacagccccaattggaagtctgcttattggtttactgggccccaggcttctgcagaaagttgaacatcaaaataaagatgaagaagttcaaggagagacttctgtgcaagtttagaggaagcgcggattctattactggaaactttgggactgaaaggccaaagcttctgggcccaccatcaacgcagctccgctttcatttctttcacatacaactttccacataagatttcatgcggaaaaaaaaaaaaaactcacaaaggttttatactgataacagtatattaagtgtttactttgtacacagcgtctttgttccagacacttgccatgtctcatttattctcacaccaccaccacagcgtcctttacagatgagaagacaacctcagggagacgatgtatttgcctaggtcccatagctagcaagtgacagcgctgcagtttaagctcaggccgtcttggggagagaccgtgctcttctaccattgcactttaagctgactttaggggaaacacaatctgagttttgacaagtttacttctggcacatgcagtcccgagcactgctttttggctaaaatgcccagtgatgtcaactctgtccctggatttctacaacccgatgagtcaatattcagaagagacgtcgaaaggaaagggttcaatagacagaaaacacaccagacagtcccagaaaccccagaaccctcgcctctgccggcgcggacagccaagacgtcacttaaacgcgctgccgcctcctcgccccgccccgcccctgcgcggaagtctatccgggctttcgcgtcaccaccctgcccacctgggtggcgcgtggcttacgcaacggtcactgggctcctgggccgctcccgggccagcgagggctgcgaaagaagttgtaggtacggcccatttttcttaacgccgcccttccaagccctttggcgctagtcccgggtctgccgcgatcgtttccttgcggtaggccgcaggagggcctttcctccccctcagttcaatgggattcttgggctcttctcccagacgctgagggaacagccacagacattgtctctcctctccgtgactcctttccttactccgtcatcccacatctctcttgtttgttctcttttcctcctgtttttcttattttacaaatactcgccagtaagaaagaagagatctgtcagttaagattgacctcaaaattaattttattaagcgtgtactattttacaaacggtggatccctgcaaataaaccttcacatacatg

SEQ ID NO: 3851 - protein, 474 aa, Homo sapiens
MGDEDKRITYEDSEPSTGMNYTPSMHQEAQEETVMKLKGIDANEPTEGSILLKSSEKKLQETPTEANHVQRLRQMLACPPHGLLDRVITNVTIIVLLWAVVWSITGSECLPGGNLFGIIILFYCAIIGGKLLGLIKLPTLPPLPSLLGMLLAGFLIRNIPVINDNVQIKHKWSSSLRSIALSIILVRAGLGLDSKALKKLKGVCVRLSMGPCIVEACTSALLAHYLLGLPWQWGFILGFVLGAVSPAVVVPSMLLLQGGGYGVEKGVPTLLMAAGSFDDILAITGFNTCLGIAFSTGSTVFNVLRGVLEVVIGVATGSVLGFFIQYFPSRDQDKLVCKRTFLVLGLSVLAVFSSVHFGFPGSGGLCTLVMAFLAGMGWTSEKAEVEKIIAVAWDIFQPLLFGLIGAEVSIASLRPETVGCNRICGFGHSKVTWRETIRRLWNGCVDSGIFVHPHHSPNWKSAYWFTGPQASAES

SEQ ID NO: 3852 - DNA, 3853 bp, Homo sapiens
ataatctcccttgcttgaaaagcggtgattaagattggcacttgcttacaggagtgaaaaacaggtaaggggtgcgcgcgtcttaacacacacaagaggaaatacagagaaaaggaagacacaaacatgaaatgagaattaaatgaaatagaatcacactgctgatagaagggttaaaaatctaaaatacaacaagaagggcaggtgttaagcgataaaggggggcagaacaagtcttttatccggccatttaattggtcaccttaagaaagaatcctatcttcccaccgcagctgagaagacacttctaagaggtacagctaaaaggtggaggactgatagacaacttagaggttggtttcgggaacgataaaacaagtaacgggctgcccggcctgcgccgcggagtcccgaggagcctgcgctgtgctcctctcgcggtgtctcgtcatctccgggaagactcggcgcctgggtccgcgctctctgggtaagctttccgggaagctttcccgggagctcgctggtcctggccccagaagcctgcggacccgcccagggaggataagcagctgaaagaccgcgcggtgccgctccgaggccccgggacgtgggcccatggtcggcctggcgccacctttccgggggaagccacgcgcaccaggcatcgcacgcggctctgcacccgcgccgccggacctgaaacccggcggagggcacacggggctgccgctgcgggccccggaccaacccatgcttactccggagcctgtaccggcgccgacgggtcggacctccctgcgcggtgtcgcccagcgggttcgtgcgaaaggcggggccgactacacgcggtgccgcgccctgagaccgtttatctgcagtcaacgcagcctcccggctcagcctgggaagatgcgcgaatcgggaaccccagagcgcggtggctagaccgggctccgccgcctcccccacagcccctttcctaatcgttcagacggagcctggtcgacttcgccggagactgccagatctcgttcctcttccctgtgtcatcttcttaattataaataatgggggatgaagataaaagaattacatatgaagattcagaaccatccacaggaatgaattacacgccctccatgcatcaagaagcacaggaggagacagttatgaagctcaaaggtatagatgcaaatgaaccaacagaaggaagtattcttttgaaaagcagtgaaaaaaagctacaagaaacaccaactgaagcaaatcacgtacaaagactgagacaaatgctggcttgccctccacatggtttactggacagggtcataacaaatgttaccatcattgttcttctgtgggctgtagtttggtcaattactggcagtgaatgtcttcctggaggaaacctatttggaattataatcctattctattgtgccatcattggtggtaaacttttggggcttattaagttacctacattgcctccactgccttctcttcttggcatgctgcttgcagggtttctcatcagaaatatcccagtcatcaacgataatgtgcagatcaagcacaagtggtcttcctctttgagaagcatagccctgtctatcattctggttcgtgctggccttggtctggattcaaaggccctgaagaagttaaagggcgtttgtgtaagactgtccatgggtccctgtattgtggaggcgtgcacatctgctcttcttgcccattacctgctgggtttaccatggcaatggggatttatactgggttttgttttaggtgctgtatctccagctgttgtggtgccttcaatgctccttttgcagggaggaggctatggtgttgagaagggtgtcccaaccttgctcatggcagctggcagcttcgatgacattctggccatcactggcttcaacacatgcttgggcatagccttttccacaggctctactgtctttaatgtcctcagaggagttttggaggtggtaattggtgtggcaactggatctgttcttggatttttcattcagtactttccaagccgtgaccaggacaaacttgtgtgtaagagaacattccttgtgttggggttgtctgtgctagctgtgttcagcagtgtgcattttggtttccctggatcaggaggactgtgcacgttggtcatggctttccttgcaggcatgggatggaccagcgaaaaggcagaggttgaaaagataattgcagttgcctgggacatttttcagccccttctttttggactaattggagcagaggtatctattgcatctctcagaccagaaactgtaggcctttgtgttgccaccgtaggcattgcagtattgatacgaattttgactacatttctgatggtgtgttttgctggttttaacttaaaagaaaagatatttatttcttttgcatggcttccaaaggccacagttcaggctgcaataggatctgtggctttggacacagcaaggtcacatggagagaaacaattagaagactatggaatggatgtgttgacagtggcatttttgtccatcctcatcacagccccaattggaagtctgcttattggtttactgggccccaggcttctgcagaaagttgaacatcaaaataaagatgaagaagttcaaggagagacttctgtgcaagtttagaggaagcgcggattctattactggaaactttgggactgaaaggccaaagcttctgggcccaccatcaacgcagctccgctttcatttctttcacatacaactttccacataagatttcatgcggaaaaaaaaaaaaaactcacaaaggttttatactgataacagtatattaagtgtttactttgtacacagcgtctttgttccagacacttgccatgtctcatttattctcacaccaccaccacagcgtcctttacagatgagaagacaacctcagggagacgatgtatttgcctaggtcccatagctagcaagtgacagcgctgcagtttaagctcaggccgtcttggggagagaccgtgctcttctaccattgcactttaagctgactttaggggaaacacaatctgagttttgacaagtttacttctggcacatgcagtcccgagcactgctttttggctaaaatgcccagtgatgtcaactctgtccctggatttctacaacccgatgagtcaatattcagaagagacgtcgaaaggaaagggttcaatagacagaaaacacaccagacagtcccagaaaccccagaaccctcgcctctgccggcgcggacagccaagacgtcacttaaacgcgctgccgcctcctcgccccgccccgcccctgcgcggaagtctatccgggctttcgcgtcaccaccctgcccacctgggtggcgcgtggcttacgcaacggtcactgggctcctgggccgctcccgggccagcgagggctgcgaaagaagttgtaggtacggcccatttttcttaacgccgcccttccaagccctttggcgctagtcccgggtctgccgcgatcgtttccttgcggtaggccgcaggagggcctttcctccccctcagttcaatgggattcttgggctcttctcccagacgctgagggaacagccacagacattgtctctcctctccgtgactcctttccttactccgtcatcccacatctctcttgtttgttctcttttcctcctgtttttcttattttacaaatactcgccagtaagaaagaagagatctgtcagttaagattgacctcaaaattaattttattaagcgtgtactattttacaaacggtggatccctgcaaataaaccttcacatacatg

SEQ ID NO: 3853 - protein, 537 aa, Homo sapiens; identical to SEQ ID NO: 445

SEQ ID NO: 3854 - DNA, 2844 bp, Homo sapiens
ataatctcccttgcttgaaaagcggtgattaagattggcacttgcttacaggagtgaaaaacaggtaaggggtgcgcgcgtcttaacacacacaagaggaaatacagagaaaaggaagacacaaacatgaaatgagaattaaatgaaatagaatcacactgctgatagaagggttaaaaatctaaaatacaacaagaagggcaggtgttaagcgataaaggggggcagaacaagtcttttatccggccatttaattggtcaccttaagaaagaatcctatcttcccaccgcagctgagaagacacttctaagaggtacagctaaaaggtggaggactgatagacaacttagaggttggtttcgggaacgataaaacaagtaacgggctgcccggcctgcgccgcggagtcccgaggagcctgcgctgtgctcctctcgcggtgtctcgtcatctccgggaagactcggcgcctgggtccgcgctctctgggtaagctttccgggaagctttcccgggagctcgctggtcctggccccagaagcctgcggacccgcccagggaggataagcagctgaaagaccgcgcggtgccgctccgaggccccgggacgtgggcccatggtcggcctggcgccacctttccgggggaagccacgcgcaccaggcatcgcacgcggctctgcacccgcgccgccggacctgaaacccggcggagggcacacggggctgccgctgcgggccccggaccaacccatgcttactccggagcctgtaccggcgccgacgggtcggacctccctgcgcggtgtcgcccagcgggttcgtgcgaaaggcggggccgactacacgcggtgccgcgccctgagaccgtttatctgcagtcaacgcagcctcccggctcagcctgggaagatgcgcgaatcgggaaccccagagcgcggtggctagaccgggctccgccgcctcccccacagcccctttcctaatcgttcagacggagcctggtcgacttcgccggagactgccagatctcgttcctcttccctgtgtcatcttcttaattataaataatgggggatgaagataaaagaattacatatgaagattcagaaccatccacaggaatgaattacacgccctccatgcatcaagaagcacaggaggagacagttatgaagctcaaaggtatagatgcaaatgaaccaacagaaggaagtattcttttgaaaagcagtgaaaaaaagctacaagaaacaccaactgaagcaaatcacgtacaaagactgagacaaatgctggcttgccctccacatggtttactggacagggtcataacaaatgttaccatcattgttcttctgtgggctgtagtttggtcaattactggcagtgaatgtcttcctggaggaaacctatttggaattataatcctattctattgtgccatcattggtggtaaacttttggggcttattaagttacctacattgcctccactgccttctcttcttggcatgctgcttgcagggtttctcatcagaaatatcccagtcatcaacgataatgtgcagatcaagcacaagtggtcttcctctttgagaagcatagccctgtctatcattctggttcgtgctggccttggtctggattcaaaggccctgaagaagttaaagggcgtttgtgtaagactgtccatgggtccctgtattgtggaggcgtgcacatctgctcttcttgcccattacctgctgggtttaccatggcaatggggatttatactgggttttgttttaggtgctgtatctccagctgttgtggtgccttcaatgctccttttgcagggaggaggctatggtgttgagaagggtgtcccaaccttgctcatggcagctggcagcttcgatgacattctggccatcactggcttcaacacatgcttgggcatagccttttccacaggctctactgtctttaatgtcctcagaggagttttggaggtggtaattggtgtggcaactggatctgttcttggatttttcattcagtactttccaagccgtgaccaggacaaacttgtgtgtaagagaacattccttgtgttggggttgtctgtgctagctgtgttcagcagtgtgcattttggtttccctggatcaggaggactgtgcacgttggtcatggctttccttgcaggcatgggatggaccagcgaaaaggcagaggttgaaaagataattgcagttgcctgggacatttttcagccccttctttttggactaattggagcagaggtatctattgcatctctcagaccagaaactgtaggcctttgtgttgccaccgtaggcattgcagtattgatacgaattttgactacatttctgatggtgtgttttgctggttttaacttaaaagaaaagatatttatttcttttgcatggcttccaaaggccacagttcaggctgcaataggatctgtggctttggacacagcaaggtcacatggagagaaacaattagaagactatggaatggatgtgttgacagtggcatttttgtccatcctcatcacagccccaattggaagtctgcttattggtttactgggccccaggcttctgcagaaagttgaacatcaaaataaagatgaagaagttcaaggagagacttctgtgcaagtttagaggaagcgcggattctattactggaaactttgggactgaaaggccaaagcttctgggcccaccatcaacgcagctccgctttcatttctttcacatacaactttccacataagatttcatgcggaaaaaaaaaaaaaactcacaaaggttttatactgat

SEQ ID NO: 3855 - protein, 537 aa, Homo sapiens; identical to SEQ ID NO: 445

SEQ ID NO: 3856 - DNA, 2483 bp, Homo sapiens
ataatctcccttgcttgaaaagcggtgattaagattggcacttgcttacaggagtgaaaaacaggtaaggggtgcgcgcgtcttaacacacacaagaggaaatacagagaaaaggaagacacaaacatgaaatgagaattaaatgaaatagaatcacactgctgatagaagggttaaaaatctaaaatacaacaagaagggcaggtgttaagcgataaaggggggcagaacaagtcttttatccggccatttaattggtcaccttaagaaagaatcctatcttcccaccgcagctgagaagacacttctaagaggtacagctaaaaggtggaggactgatagacaacttagaggttggtttcgggaacgataaaacaagtaacgggctgcccggcctgcgccgcggagtcccgaggagcctgcgctgtgctcctctcgcggtgtctcgtcatctccgggaagactcggcgcctgggtccgcgctctctgggtaagctttccgggaagctttcccgggagctcgctggtcctggccccagaagcctgcggacccgcccagggaggataagcagctgaaagaccgcgcggtgccgctccgaggccccgggacgtgggcccatggtcggcctggcgccacctttccgggggaagccacgcgcaccaggcatcgcacgcggctctgcacccgcgccgccggacctgaaacccggcggagggcacacggggctgccgctgcgggccccggaccaacccatgcttactccggagcctgtaccggcgccgacgggtcggacctccctgcgcggtgtcgcccagcgggttcgtgcgaaaggcggggccgactacacgcggtgccgcgccctgagaccgtttatctgcagtcaacgcagcctcccggctcagcctgggaagatgcgcgaatcgggaaccccagagcgcggtggctagaccgggctccgccgcctcccccacagcccctttcctaatcgttcagacggagcctggtcgacttcgccggagactgccagatctcgttcctcttccctgtgtcatcttcttaattataaataatgggggatgaagataaaagaattacatatgaagattcagaaccatccacaggaatgaattacacgccctccatgcatcaagaagcacaggaggagacagttatgaagctcaaaggtatagatgcaaatgaaccaacagaaggaagtattcttttgaaaagcagtgaaaaaaagctacaagaaacaccaactgaagcaaatcacgtacaaagactgagacaaatgctggcttgccctccacatggtttactggacagggtcataacaaatgttaccatcattgttcttctgtgggctgtagtttggtcaattactggcagtgaatgtcttcctggaggaaacctatttggaattataatcctattctattgtgccatcattggtggtaaacttttggggcttattaagttacctacattgcctccactgccttctcttcttggcatgctgcttgcagggtttctcatcagaaatatcccagtcatcaacgataatgtgcagatcaagcacaagtggtcttcctctttgagaagcatagccctgtctatcattctggttcgtgctggccttggtctggattcaaaggccctgaagaagttaaagggcgtttgtgtaagactgtccatgggtccctgtattgtggaggcgtgcacatctgctcttcttgcccattacctgctgggtttaccatggcaatggggatttatactgggttttgttttaggtgctgtatctccagctgttgtggtgccttcaatgctccttttgcagggaggaggctatggtgttgagaagggtgtcccaaccttgctcatggcagctggcagcttcgatgacattctggccatcactggcttcaacacatgcttgggcatagccttttccacaggctctactgtctttaatgtcctcagaggagttttggaggtggtaattggtgtggcaactggatctgttcttggatttttcattcagtactttccaagccgtgaccaggacaaacttgtgtgtaagagaacattccttgtgttggggttgtctgtgctagctgtgttcagcagtgtgcattttggtttccctggatcaggaggactgtgcacgttggtcatggctttccttgcaggcatgggatggaccagcgaaaaggcagaggttgaaaagataattgcagttgcctgggacatttttcagccccttctttttggactaattggagcagaggtatctattgcatctctcagaccagaaactgtaggaagcgcggattctattactggaaactttgggactgaaaggccaaagcttctgggcccaccatcaacgcagctccgctttcatttctttcacatacaactttccacataagatttcatgcggaaaaaaaaaaaaaactcacaaaggttttatactgat

SEQ ID NO: 3857 - protein, 454 aa, Homo sapiens
MGDEDKRITYEDSEPSTGMNYTPSMHQEAQEETVMKLKGIDANEPTEGSILLKSSEKKLQETPTEANHVQRLRQMLACPPHGLLDRVITNVTIIVLLWAVVWSITGSECLPGGNLFGIIILFYCAIIGGKLLGLIKLPTLPPLPSLLGMLLAGFLIRNIPVINDNVQIKHKWSSSLRSIALSIILVRAGLGLDSKALKKLKGVCVRLSMGPCIVEACTSALLAHYLLGLPWQWGFILGFVLGAVSPAVVVPSMLLLQGGGYGVEKGVPTLLMAAGSFDDILAITGFNTCLGIAFSTGSTVFNVLRGVLEVVIGVATGSVLGFFIQYFPSRDQDKLVCKRTFLVLGLSVLAVFSSVHFGFPGSGGLCTLVMAFLAGMGWTSEKAEVEKIIAVAWDIFQPLLFGLIGAEVSIASLRPETVGSADSITGNFGTERPKLLGPPSTQLRFHFFHIQLST

SEQ ID NO: 3858 - DNA, 3474 bp, Homo sapiens
ataatctcccttgcttgaaaagcggtgattaagattggcacttgcttacaggagtgaaaaacaggtaaggggtgcgcgcgtcttaacacacacaagaggaaatacagagaaaaggaagacacaaacatgaaatgagaattaaatgaaatagaatcacactgctgatagaagggttaaaaatctaaaatacaacaagaagggcaggtgttaagcgataaaggggggcagaacaagtcttttatccggccatttaattggtcaccttaagaaagaatcctatcttcccaccgcagctgagaagacacttctaagaggtacagctaaaaggtggaggactgatagacaacttagaggttggtttcgggaacgataaaacaagtaacgggctgcccggcctgcgccgcggagtcccgaggagcctgcgctgtgctcctctcgcggtgtctcgtcatctccgggaagactcggcgcctgggtccgcgctctctgggtaagctttccgggaagctttcccgggagctcgctggtcctggccccagaagcctgcggacccgcccagggaggataagcagctgaaagaccgcgcggtgccgctccgaggccccgggacgtgggcccatggtcggcctggcgccacctttccgggggaagccacgcgcaccaggcatcgcacgcggctctgcacccgcgccgccggacctgaaacccggcggagggcacacggggctgccgctgcgggccccggaccaacccatgcttactccggagcctgtaccggcgccgacgggtcggacctccctgcgcggtgtcgcccagcgggttcgtgcgaaaggcggggccgactacacgcggtgccgcgccctgagaccgtttatctgcagtcaacgcagcctcccggctcagcctgggaagatgcgcgaatcgggaaccccagagcgcggtggctagaccgggctccgccgcctcccccacagcccctttcctaatcgttcagacggagcctggtcgacttcgccggagactgccagatctcgttcctcttccctgtgtcatcttcttaattataaataatgggggatgaagataaaagaattacatatgaagattcagaaccatccacaggaatgaattacacgccctccatgcatcaagaagcacaggaggagacagttatgaagctcaaaggtatagatgcaaatgaaccaacagaaggaagtattcttttgaaaagcagtgaaaaaaagctacaagaaacaccaactgaagcaaatcacgtacaaagactgagacaaatgctggcttgccctccacatggtttactggacagggtcataacaaatgttaccatcattgttcttctgtgggctgtagtttggtcaattactggcagtgaatgtcttcctggaggaaacctatttggaattataatcctattctattgtgccatcattggtggtaaacttttggggcttattaagttacctacattgcctccactgccttctcttcttggcatgctgcttgcagggtttctcatcagaaatatcccagtcatcaacgataatgtgcagatcaagcacaagtggtcttcctctttgagaagcatagccctgtctatcattctggttcgtgctggccttggtctggattcaaaggccctgaagaagttaaagggcgtttgtgtaagactgtccatgggtccctgtattgtggaggcgtgcacatctgctcttcttgcccattacctgctgggtttaccatggcaatggggatttatactgggttttgttttaggtgctgtatctccagctgttgtggtgccttcaatgctccttttgcagggaggaggctatggtgttgagaagggtgtcccaaccttgctcatggcagctggcagcttcgatgacattctggccatcactggcttcaacacatgcttgggcatagccttttccacaggctctactgtctttaatgtcctcagaggagttttggaggtggtaattggtgtggcaactggatctgttcttggatttttcattcagtactttccaagccgtgaccaggacaaacttgtgtgtaagagaacattccttgtgttggggttgtctgtgctagctgtgttcagcagtgtgcattttggtttccctggatcaggaggactgtgcacgttggtcatggctttccttgcaggcatgggatggaccagcgaaaaggcagaggttgaaaagataattgcagttgcctgggacatttttcagccccttctttttggactaattggagcagaggtatctattgcatctctcagaccagaaactgtaggctgcaataggatctgtggctttggacacagcaaggtcacatggagagaaacaattagaagactatggaatggatgtgttgacagtggcatttttgtccatcctcatcacagccccaattggaagtctgcttattggtttactgggccccaggcttctgcagaaagttgaacatcaaaataaagatgaagaagttcaaggagagacttctgtgcaagtttagaggtgaaaagagagagtgctgaacataatgtttagaaagctgctacttttttcaagatgcatattgaaatatgtaatgtttaagcttaaaatgtaatagaaccaaaagtgtagctgtttctttaaacagcatttttagcccttgctctttccatgtgggtggtaatgatctatatcaccaaccttaatctctctgccttttttttcaaacaccccttcatcatccatcttaatttgcataaggacatatctactttaatgtactaccacagtttacagttaatgtgggaaagaccagcttcagtatcctcttcagctaggattgccctaacttttaactttcacagtttcctgattcatatttgcccaggctctgatgccttgaattggttttggctctcttttttggatctgtttttgttgttaaacatcataatgcagtctctcattaatttttaccatcatttaccctgataatctgcctcttctccatttctccttcccttactacctttctttgaattactgtaactgattggtcccaccaaaattttaaagtacatgaagtatcttcattggttcatcctcttgccccctccagatgtcaaaaaactttatcctgccccctagctgaccacccaggttcctttatttcagtggcccatgtgagtctaccttcccctaaggagtgccctaatccagccctttttttgtttcttatgacccatatctttaggctcttcccatttctaggtgggagataggtaagtttcaaatctatgccagtcttatgaatattacattagggtaatgtgctataatgaagaaataaaaaatacagtgcttaaaagaaaataaaattctatttctgtctaatgaaactggctggttcgttaataccaacagggttactctgcttatgaggtct

SEQ ID NO: 3859 - protein, 474 aa, Homo sapiens; identical to SEQ ID NO: 3851

SEQ ID NO: 3860 - DNA, 3611 bp, Homo sapiens
ataatctcccttgcttgaaaagcggtgattaagattggcacttgcttacaggagtgaaaaacaggtaaggggtgcgcgcgtcttaacacacacaagaggaaatacagagaaaaggaagacacaaacatgaaatgagaattaaatgaaatagaatcacactgctgatagaagggttaaaaatctaaaatacaacaagaagggcaggtgttaagcgataaaggggggcagaacaagtcttttatccggccatttaattggtcaccttaagaaagaatcctatcttcccaccgcagctgagaagacacttctaagaggtacagctaaaaggtggaggactgatagacaacttagaggttggtttcgggaacgataaaacaagtaacgggctgcccggcctgcgccgcggagtcccgaggagcctgcgctgtgctcctctcgcggtgtctcgtcatctccgggaagactcggcgcctgggtccgcgctctctgggtaagctttccgggaagctttcccgggagctcgctggtcctggccccagaagcctgcggacccgcccagggaggataagcagctgaaagaccgcgcggtgccgctccgaggccccgggacgtgggcccatggtcggcctggcgccacctttccgggggaagccacgcgcaccaggcatcgcacgcggctctgcacccgcgccgccggacctgaaacccggcggagggcacacggggctgccgctgcgggccccggaccaacccatgcttactccggagcctgtaccggcgccgacgggtcggacctccctgcgcggtgtcgcccagcgggttcgtgcgaaaggcggggccgactacacgcggtgccgcgccctgagaccgtttatctgcagtcaacgcagcctcccggctcagcctgggaagatgcgcgaatcgggaaccccagagcgcggtggctagaccgggctccgccgcctcccccacagcccctttcctaatcgttcagacggagcctggtcgacttcgccggagactgccagatctcgttcctcttccctgtgtcatcttcttaattataaataatgggggatgaagataaaagaattacatatgaagattcagaaccatccacaggaatgaattacacgccctccatgcatcaagaagcacaggaggagacagttatgaagctcaaaggtatagatgcaaatgaaccaacagaaggaagtattcttttgaaaagcagtgaaaaaaagctacaagaaacaccaactgaagcaaatcacgtacaaagactgagacaaatgctggcttgccctccacatggtttactggacagggtcataacaaatgttaccatcattgttcttctgtgggctgtagtttggtcaattactggcagtgaatgtcttcctggaggaaacctatttggaattataatcctattctattgtgccatcattggtggtaaacttttggggcttattaagttacctacattgcctccactgccttctcttcttggcatgctgcttgcagggtttctcatcagaaatatcccagtcatcaacgataatgtgcagatcaagcacaagtggtcttcctctttgagaagcatagccctgtctatcattctggttcgtgctggccttggtctggattcaaaggccctgaagaagttaaagggcgtttgtgtaagactgtccatgggtccctgtattgtggaggcgtgcacatctgctcttcttgcccattacctgctgggtttaccatggcaatggggatttatactgggttttgttttaggtgctgtatctccagctgttgtggtgccttcaatgctccttttgcagggaggaggctatggtgttgagaagggtgtcccaaccttgctcatggcagctggcagcttcgatgacattctggccatcactggcttcaacacatgcttgggcatagccttttccacaggctctactgtctttaatgtcctcagaggagttttggaggtggtaattggtgtggcaactggatctgttcttggatttttcattcagtactttccaagccgtgaccaggacaaacttgtgtgtaagagaacattccttgtgttggggttgtctgtgctagctgtgttcagcagtgtgcattttggtttccctggatcaggaggactgtgcacgttggtcatggctttccttgcaggcatgggatggaccagcgaaaaggcagaggttgaaaagataattgcagttgcctgggacatttttcagccccttctttttggactaattggagcagaggtatctattgcatctctcagaccagaaactgtaggcctttgtgttgccaccgtaggcattgcagtattgatacgaattttgactacatttctgatggtgtgttttgctggttttaacttaaaagaaaagatatttatttcttttgcatggcttccaaaggccacagttcaggctgcaataggatctgtggctttggacacagcaaggtcacatggagagaaacaattagaagactatggaatggatgtgttgacagtggcatttttgtccatcctcatcacagccccaattggaagtctgcttattggtttactgggccccaggcttctgcagaaagttgaacatcaaaataaagatgaagaagttcaaggagagacttctgtgcaagtttagaggtgaaaagagagagtgctgaacataatgtttagaaagctgctacttttttcaagatgcatattgaaatatgtaatgtttaagcttaaaatgtaatagaaccaaaagtgtagctgtttctttaaacagcatttttagcccttgctctttccatgtgggtggtaatgatctatatcaccaaccttaatctctctgccttttttttcaaacaccccttcatcatccatcttaatttgcataaggacatatctactttaatgtactaccacagtttacagttaatgtgggaaagaccagcttcagtatcctcttcagctaggattgccctaacttttaactttcacagtttcctgattcatatttgcccaggctctgatgccttgaattggttttggctctcttttttggatctgtttttgttgttaaacatcataatgcagtctctcattaatttttaccatcatttaccctgataatctgcctcttctccatttctccttcccttactacctttctttgaattactgtaactgattggtcccaccaaaattttaaagtacatgaagtatcttcattggttcatcctcttgccccctccagatgtcaaaaaactttatcctgccccctagctgaccacccaggttcctttatttcagtggcccatgtgagtctaccttcccctaaggagtgccctaatccagccctttttttgtttcttatgacccatatctttaggctcttcccatttctaggtgggagataggtaagtttcaaatctatgccagtcttatgaatattacattagggtaatgtgctataatgaagaaataaaaaatacagtgcttaaaagaaaataaaattctatttctgtctaatgaaactggctggttcgttaataccaacagggttactctgcttatgaggtct

SEQ ID NO: 3861 - protein, 537 aa, Homo sapiens; identical to SEQ ID NO: 445

SEQ ID NO: 3862 - DNA, 3561 bp, Homo sapiens
ataatctcccttgcttgaaaagcggtgattaagattggcacttgcttacaggagtgaaaaacaggtaaggggtgcgcgcgtcttaacacacacaagaggaaatacagagaaaaggaagacacaaacatgaaatgagaattaaatgaaatagaatcacactgctgatagaagggttaaaaatctaaaatacaacaagaagggcaggtgttaagcgataaaggggggcagaacaagtcttttatccggccatttaattggtcaccttaagaaagaatcctatcttcccaccgcagctgagaagacacttctaagaggtacagctaaaaggtggaggactgatagacaacttagaggttggtttcgggaacgataaaacaagtaacgggctgcccggcctgcgccgcggagtcccgaggagcctgcgctgtgctcctctcgcggtgtctcgtcatctccgggaagactcggcgcctgggtccgcgctctctgggtaagctttccgggaagctttcccgggagctcgctggtcctggccccagaagcctgcggacccgcccagggaggataagcagctgaaagaccgcgcggtgccgctccgaggccccgggacgtgggcccatggtcggcctggcgccacctttccgggggaagccacgcgcaccaggcatcgcacgcggctctgcacccgcgccgccggacctgaaacccggcggagggcacacggggctgccgctgcgggccccggaccaacccatgcttactccggagcctgtaccggcgccgacgggtcggacctccctgcgcggtgtcgcccagcgggttcgtgcgaaaggcggggccgactacacgcggtgccgcgccctgagaccgtttatctgcagtcaacgcagcctcccggctcagcctgggaagatgcgcgaatcgggaaccccagagcgcggtggctagaccgggctccgccgcctcccccacagcccctttcctaatcgttcagacggagcctggtcgacttcgccggagactgccagatctcgttcctcttccctgtgtcatcttcttaattataaataatgggggatgaagataaaagaattacatatgaagattcagaaccatccacaggaatgaattacacgccctccatgcatcaagaagcacaggaggagacagttatgaagctcaaaggtatagatgcaaatgaaccaacagaaggaagtattcttttgaaaagcagtgaaaaaaagctacaagaaacaccaactgaagcaaatcacgtacaaagactgagacaaatgctggcttgccctccacatggtttactggacagggtcataacaaatgttaccatcattgttcttctgtgggctgtagtttggtcaattactggcagtgaatgtcttcctggaggaaacctatttggaattataatcctattctattgtgccatcattggtggtaaacttttggggcttattaagttacctacattgcctccactgccttctcttcttggcatgctgcttgcagggtttctcatcagaaatatcccagtcatcaacgataatgtgcagatcaagcacaagtggtcttcctctttgagaagcatagccctgtctatcattctggttcgtgctggccttggtctggattcaaaggccctgaagaagttaaagggcgtttgtgtaagactgtccatgggtccctgtattgtggaggcgtgcacatctgctcttcttgcccattacctgctgggtttaccatggcaatggggatttatactgggttttgttttaggtgctgtatctccagctgttgtggtgccttcaatgctccttttgcagggaggaggctatggtgttgagaagggtgtcccaaccttgctcatggcagctggcagcttcgatgacattctggccatcactggcttcaacacatgcttgggcatagccttttccacaggctctactgtctttaatgtcctcagaggagttttggaggtggtaattggtgtggcaactggatctgttcttggatttttcattcagtactttccaagccgtgaccaggacaaacttgtgtgtaagagaacattccttgtgttggggttgtctgtgctagctgtgttcagcagtgtgcattttggtttccctggatcaggaggactgtgcacgttggtcatggctttccttgcaggcatgggatggaccagcgaaaaggcagaggttgaaaagataattgcagttgcctgggacatttttcagccccttctttttggactaattggagcagaggtatctattgcatctctcagaccagaaactgtaggcctttgtgttgccaccgtaggcattgcagtattgatacgaattttgactacatttctgatggtgtgttttgctggttttaacttaaaagaaaagatatttatttcttttgcatggcttccaaaggccacagttcaggctgcaataggatctgtggctttggacacagcaaggtcacatggagagaaacaattagaagactatggaatggatgtgttgacagtggcatttttgtccatcctcatcacagccccaattggaagtctgcttattggtttactgggccccaggcttctgcagaaagttgaacatcaaaataaagatgaagaagttcaaggagagacttctgtgcaagtttagaggtgaaaagagagagtgctgaacataatgtttagaaagctgctacttttttcaagatgcatattgaaatatgtaatgtttaagcttaaaatgtaatagaaccaaaagtgtagctgtttctttaaacagcatttttagcccttgctctttccatgtgggtggtaatgatctatatcaccaaccttaatctctctgccttttttttcaaacaccccttcatcatccatcttaatttgcataaggacatatctactttaatgtactaccacagtttacagttaatgtgggaaagaccagcttcagtatcctcttcagctaggattgccctaacttttaactttcacagtttcctgattcatatttgcccaggctctgatgccttgaattggttttggctctcttttttggatctgtttttgttgttaaacatcataatgcagtctctcattaatttttaccatcatttaccctgataatctgcctcttctccatttctccttcccttactacctttctttgaattactgtaactgattggtcccaccaaaattttaaagtacatgaagtatcttcattggttcatcctcttgccccctccagatgtcaaaaaactttatcctgccccctagctgaccacccaggttcctttatttcagtggcccatgtgagtctaccttcccctaaggagtgccctaatccagccctttttttgtttcttatgacccatatctttaggctcttcccatttctaggtgggagataggtaagtttcaaatctatgccagtcttatgaatattacattagggtaatgtgctataatgaagaaataaaaaatacagtgcttaaaagaaaataaaattctatttctgtctaatg

SEQ ID NO: 3863 - protein, 537 aa, Homo sapiens; identical to SEQ ID NO: 445

SEQ ID NO: 3864 - DNA, 3424 bp, Homo sapiens
ataatctcccttgcttgaaaagcggtgattaagattggcacttgcttacaggagtgaaaaacaggtaaggggtgcgcgcgtcttaacacacacaagaggaaatacagagaaaaggaagacacaaacatgaaatgagaattaaatgaaatagaatcacactgctgatagaagggttaaaaatctaaaatacaacaagaagggcaggtgttaagcgataaaggggggcagaacaagtcttttatccggccatttaattggtcaccttaagaaagaatcctatcttcccaccgcagctgagaagacacttctaagaggtacagctaaaaggtggaggactgatagacaacttagaggttggtttcgggaacgataaaacaagtaacgggctgcccggcctgcgccgcggagtcccgaggagcctgcgctgtgctcctctcgcggtgtctcgtcatctccgggaagactcggcgcctgggtccgcgctctctgggtaagctttccgggaagctttcccgggagctcgctggtcctggccccagaagcctgcggacccgcccagggaggataagcagctgaaagaccgcgcggtgccgctccgaggccccgggacgtgggcccatggtcggcctggcgccacctttccgggggaagccacgcgcaccaggcatcgcacgcggctctgcacccgcgccgccggacctgaaacccggcggagggcacacggggctgccgctgcgggccccggaccaacccatgcttactccggagcctgtaccggcgccgacgggtcggacctccctgcgcggtgtcgcccagcgggttcgtgcgaaaggcggggccgactacacgcggtgccgcgccctgagaccgtttatctgcagtcaacgcagcctcccggctcagcctgggaagatgcgcgaatcgggaaccccagagcgcggtggctagaccgggctccgccgcctcccccacagcccctttcctaatcgttcagacggagcctggtcgacttcgccggagactgccagatctcgttcctcttccctgtgtcatcttcttaattataaataatgggggatgaagataaaagaattacatatgaagattcagaaccatccacaggaatgaattacacgccctccatgcatcaagaagcacaggaggagacagttatgaagctcaaaggtatagatgcaaatgaaccaacagaaggaagtattcttttgaaaagcagtgaaaaaaagctacaagaaacaccaactgaagcaaatcacgtacaaagactgagacaaatgctggcttgccctccacatggtttactggacagggtcataacaaatgttaccatcattgttcttctgtgggctgtagtttggtcaattactggcagtgaatgtcttcctggaggaaacctatttggaattataatcctattctattgtgccatcattggtggtaaacttttggggcttattaagttacctacattgcctccactgccttctcttcttggcatgctgcttgcagggtttctcatcagaaatatcccagtcatcaacgataatgtgcagatcaagcacaagtggtcttcctctttgagaagcatagccctgtctatcattctggttcgtgctggccttggtctggattcaaaggccctgaagaagttaaagggcgtttgtgtaagactgtccatgggtccctgtattgtggaggcgtgcacatctgctcttcttgcccattacctgctgggtttaccatggcaatggggatttatactgggttttgttttaggtgctgtatctccagctgttgtggtgccttcaatgctccttttgcagggaggaggctatggtgttgagaagggtgtcccaaccttgctcatggcagctggcagcttcgatgacattctggccatcactggcttcaacacatgcttgggcatagccttttccacaggctctactgtctttaatgtcctcagaggagttttggaggtggtaattggtgtggcaactggatctgttcttggatttttcattcagtactttccaagccgtgaccaggacaaacttgtgtgtaagagaacattccttgtgttggggttgtctgtgctagctgtgttcagcagtgtgcattttggtttccctggatcaggaggactgtgcacgttggtcatggctttccttgcaggcatgggatggaccagcgaaaaggcagaggttgaaaagataattgcagttgcctgggacatttttcagccccttctttttggactaattggagcagaggtatctattgcatctctcagaccagaaactgtaggctgcaataggatctgtggctttggacacagcaaggtcacatggagagaaacaattagaagactatggaatggatgtgttgacagtggcatttttgtccatcctcatcacagccccaattggaagtctgcttattggtttactgggccccaggcttctgcagaaagttgaacatcaaaataaagatgaagaagttcaaggagagacttctgtgcaagtttagaggtgaaaagagagagtgctgaacataatgtttagaaagctgctacttttttcaagatgcatattgaaatatgtaatgtttaagcttaaaatgtaatagaaccaaaagtgtagctgtttctttaaacagcatttttagcccttgctctttccatgtgggtggtaatgatctatatcaccaaccttaatctctctgccttttttttcaaacaccccttcatcatccatcttaatttgcataaggacatatctactttaatgtactaccacagtttacagttaatgtgggaaagaccagcttcagtatcctcttcagctaggattgccctaacttttaactttcacagtttcctgattcatatttgcccaggctctgatgccttgaattggttttggctctcttttttggatctgtttttgttgttaaacatcataatgcagtctctcattaatttttaccatcatttaccctgataatctgcctcttctccatttctccttcccttactacctttctttgaattactgtaactgattggtcccaccaaaattttaaagtacatgaagtatcttcattggttcatcctcttgccccctccagatgtcaaaaaactttatcctgccccctagctgaccacccaggttcctttatttcagtggcccatgtgagtctaccttcccctaaggagtgccctaatccagccctttttttgtttcttatgacccatatctttaggctcttcccatttctaggtgggagataggtaagtttcaaatctatgccagtcttatgaatattacattagggtaatgtgctataatgaagaaataaaaaatacagtgcttaaaagaaaataaaattctatttctgtctaatg

SEQ ID NO: 3865 - protein, 474 aa, Homo sapiens; identical to SEQ ID NO: 3851

SEQ ID NO: 3866 - DNA, 2863 bp, Homo sapiens
ataatctcccttgcttgaaaagcggtgattaagattggcacttgcttacaggagtgaaaaacaggtaaggggtgcgcgcgtcttaacacacacaagaggaaatacagagaaaaggaagacacaaacatgaaatgagaattaaatgaaatagaatcacactgctgatagaagggttaaaaatctaaaatacaacaagaagggcaggtgttaagcgataaaggggggcagaacaagtcttttatccggccatttaattggtcaccttaagaaagaatcctatcttcccaccgcagctgagaagacacttctaagaggtacagctaaaaggtggaggactgatagacaacttagaggttggtttcgggaacgataaaacaagtaacgggctgcccggcctgcgccgcggagtcccgaggagcctgcgctgtgctcctctcgcggtgtctcgtcatctccgggaagactcggcgcctgggtccgcgctctctgggtaagctttccgggaagctttcccgggagctcgctggtcctggccccagaagcctgcggacccgcccagggaggataagcagctgaaagaccgcgcggtgccgctccgaggccccgggacgtgggcccatggtcggcctggcgccacctttccgggggaagccacgcgcaccaggcatcgcacgcggctctgcacccgcgccgccggacctgaaacccggcggagggcacacggggctgccgctgcgggccccggaccaacccatgcttactccggagcctgtaccggcgccgacgggtcggacctccctgcgcggtgtcgcccagcgggttcgtgcgaaaggcggggccgactacacgcggtgccgcgccctgagaccgtttatctgcagtcaacgcagcctcccggctcagcctgggaagatgcgcgaatcgggaaccccagagcgcggtggctagaccgggctccgccgcctcccccacagcccctttcctaatcgttcagacggagcctggtcgacttcgccggagactgccagatctcgttcctcttccctgtgtcatcttcttaattataaataatgggggatgaagataaaagaattacatatgaagattcagaaccatccacaggaatgaattacacgccctccatgcatcaagaagcacaggaggagacagttatgaagctcaaaggtatagatgcaaatgaaccaacagaaggaagtattcttttgaaaagcagtgaaaaaaagctacaagaaacaccaactgaagcaaatcacgtacaaagactgagacaaatgctggcttgccctccacatggtttactggacagggtcataacaaatgttaccatcattgttcttctgtgggctgtagtttggtcaattactggcagtgaatgtcttcctggaggaaacctatttggaattataatcctattctattgtgccatcattggtggtaaacttttggggcttattaagttacctacattgcctccactgccttctcttcttggcatgctgcttgcagggtttctcatcagaaatatcccagtcatcaacgataatgtgcagatcaagcacaagtggtcttcctctttgagaagcatagccctgtctatcattctggttcgtgctggccttggtctggattcaaaggccctgaagaagttaaagggcgtttgtgtaagactgtccatgggtccctgtattgtggaggcgtgcacatctgctcttcttgcccattacctgctgggtttaccatggcaatggggatttatactgggttttgttttaggtgctgtatctccagctgttgtggtgccttcaatgctccttttgcagggaggaggctatggtgttgagaagggtgtcccaaccttgctcatggcagctggcagcttcgatgacattctggccatcactggcttcaacacatgcttgggcatagccttttccacaggctctactgtctttaatgtcctcagaggagttttggaggtggtaattggtgtggcaactggatctgttcttggatttttcattcagtactttccaagccgtgaccaggacaaacttgtgtgtaagagaacattccttgtgttggggttgtctgtgctagctgtgttcagcagtgtgcattttggtttccctggatcaggaggactgtgcacgttggtcatggctttccttgcaggcatgggatggaccagcgaaaaggcagaggttgaaaagataattgcagttgcctgggacatttttcagccccttctttttggactaattggagcagaggtatctattgcatctctcagaccagaaactgtaggcctttgtgttgccaccgtaggcattgcagtattgatacgaattttgactacatttctgatggtgtgttttgctggttttaacttaaaagaaaagatatttatttcttttgcatggcttccaaaggccacagttcaggctgcaataggatctgtggctttggacacagcaaggtcacatggagagaaacaattagaagactatggaatggatgtgttgacagtggcatttttgtccatcctcatcacagccccaattggaagtctgcttattggtttactgggccccaggcttctgcagaaagttgaacatcaaaataaagatgaagaagttcaaggagagacttctgtgcaagtttagaggtgaaaagagagagtgctgaacataatgtttagaaagctgctacttttttcaagatgcatattgaaatatgtaatgtttaagcttaaaatgtaatagaaccaaaagtgtagctgtttctttaaacagcatttttagcccttgctctttccatgtgggtggtaatgatctatatcacc

SEQ ID NO: 3867 - protein, 537 aa, Homo sapiens; identical to SEQ ID NO: 445

SEQ ID NO: 3868 - DNA, 2563 bp, Homo sapiens
ataatctcccttgcttgaaaagcggtgattaagattggcacttgcttacaggagtgaaaaacaggtaaggggtgcgcgcgtcttaacacacacaagaggaaatacagagaaaaggaagacacaaacatgaaatgagaattaaatgaaatagaatcacactgctgatagaagggttaaaaatctaaaatacaacaagaagggcaggtgttaagcgataaaggggggcagaacaagtcttttatccggccatttaattggtcaccttaagaaagaatcctatcttcccaccgcagctgagaagacacttctaagaggtacagctaaaaggtggaggactgatagacaacttagaggttggtttcgggaacgataaaacaagtaacgggctgcccggcctgcgccgcggagtcccgaggagcctgcgctgtgctcctctcgcggtgtctcgtcatctccgggaagactcggcgcctgggtccgcgctctctgggtaagctttccgggaagctttcccgggagctcgctggtcctggccccagaagcctgcggacccgcccagggaggataagcagctgaaagaccgcgcggtgccgctccgaggccccgggacgtgggcccatggtcggcctggcgccacctttccgggggaagccacgcgcaccaggcatcgcacgcggctctgcacccgcgccgccggacctgaaacccggcggagggcacacggggctgccgctgcgggccccggaccaacccatgcttactccggagcctgtaccggcgccgacgggtcggacctccctgcgcggtgtcgcccagcgggttcgtgcgaaaggcggggccgactacacgcggtgccgcgccctgagaccgtttatctgcagtcaacgcagcctcccggctcagcctgggaagatgcgcgaatcgggaaccccagagcgcggtggctagaccgggctccgccgcctcccccacagcccctttcctaatcgttcagacggagcctggtcgacttcgccggagactgccagatctcgttcctcttccctgtgtcatcttcttaattataaataatgggggatgaagataaaagaattacatatgaagattcagaaccatccacaggaatgaattacacgccctccatgcatcaagaagcacaggaggagacagttatgaagctcaaaggtatagatgcaaatgaaccaacagaaggaagtattcttttgaaaagcagtgaaaaaaagctacaagaaacaccaactgaagcaaatcacgtacaaagactgagacaaatgctggcttgccctccacatggtttactggacagggtcataacaaatgttaccatcattgttcttctgtgggctgtagtttggtcaattactggcagtgaatgtcttcctggaggaaacctatttggaattataatcctattctattgtgccatcattggtggtaaacttttggggcttattaagttacctacattgcctccactgccttctcttcttggcatgctgcttgcagggtttctcatcagaaatatcccagtcatcaacgataatgtgcagatcaagcacaagtggtcttcctctttgagaagcatagccctgtctatcattctggttcgtgctggccttggtctggattcaaaggccctgaagaagttaaagggcgtttgtgtaagactgtccatgggtccctgtattgtggaggcgtgcacatctgctcttcttgcccattacctgctgggtttaccatggcaatggggatttatactgggttttgttttaggtgctgtatctccagctgttgtggtgccttcaatgctccttttgcagggaggaggctatggtgttgagaagggtgtcccaaccttgctcatggcagctggcagcttcgatgacattctggccatcactggcttcaacacatgcttgggcatagccttttccacaggctctactgtctttaatgtcctcagaggagttttggaggtggtaattggtgtggcaactggatctgttcttggatttttcattcagtactttccaagccgtgaccaggacaaacttgtgtgtaagagaacattccttgtgttggggttgtctgtgctagctgtgttcagcagtgtgcattttggtttccctggatcaggaggactgtgcacgttggtcatggctttccttgcaggcatgggatggaccagcgaaaaggcagaggttgaaaagataattgcagttgcctgggacatttttcagccccttctttttggactaattggagcagaggtatctattgcatctctcagaccagaaactgtaggcctttgtgttgccaccgtaggcattgcagtattgatacgaattttgactacatttctgatggtgtgttttgctggttttaacttaaaagaaaagatatttatttcttttgcatggcttccaaaggccacagttcaggtatgatggataggatggcttagcattttaactgctatttctgcatgacaccttgaaatattgaataagagggcttgtttaaatttagtgaaaataaataa

SEQ ID NO: 3869 - protein, 465 aa, Homo sapiens
MGDEDKRITYEDSEPSTGMNYTPSMHQEAQEETVMKLKGIDANEPTEGSILLKSSEKKLQETPTEANHVQRLRQMLACPPHGLLDRVITNVTIIVLLWAVVWSITGSECLPGGNLFGIIILFYCAIIGGKLLGLIKLPTLPPLPSLLGMLLAGFLIRNIPVINDNVQIKHKWSSSLRSIALSIILVRAGLGLDSKALKKLKGVCVRLSMGPCIVEACTSALLAHYLLGLPWQWGFILGFVLGAVSPAVVVPSMLLLQGGGYGVEKGVPTLLMAAGSFDDILAITGFNTCLGIAFSTGSTVFNVLRGVLEVVIGVATGSVLGFFIQYFPSRDQDKLVCKRTFLVLGLSVLAVFSSVHFGFPGSGGLCTLVMAFLAGMGWTSEKAEVEKIIAVAWDIFQPLLFGLIGAEVSIASLRPETVGLCVATVGIAVLIRILTTFLMVCFAGFNLKEKIFISFAWLPKATVQV

SEQ ID NO: 3870 - DNA, 571 bp, Homo sapiens
ttcaaaatagtaataagtaagatgttatcataaatgtttaaaatgctgtctgcctagttttgttttaggtgctgtatctccagctgttgtggtgccttcaatgctccttttgcagggaggaggctatggtgttgagaagggtgtcccaaccttgctcatggcagctggcagcttcgatgacattctggccatcactggcttcaacacatgcttgggcatagccttttccacaggctctactgtctttaatgtcctcagaggagttttggaggtggtaattggtgtggcaactggatctgttcttggatttttcattcagtactttccaagccgtgaccaggacaaacttgtgtgtaagagaacattccttgtgttggggttgtctgtgctagctgtgttcagcagtgtgcattttggtttccctggatcaggaggactgtgcacgttggtcatggctttccttgcaggcatgggatggaccagcgaaaagcttttattttaggttcaaggggtacatgtgcaggtttgttacatggataaatgatgtgttgcaagggcttggagtacagac

SEQ ID NO: 3871 - protein, 133 aa, Homo sapiens
MLLLQGGGYGVEKGVPTLLMAAGSFDDILAITGFNTCLGIAFSTGSTVFNVLRGVLEVVIGVATGSVLGFFIQYFPSRDQDKLVCKRTFLVLGLSVLAVFSSVHFGFPGSGGLCTLVMAFLAGMGWTSEKLLF

SEQ ID NO: 3872 - DNA, 2563 bp, Homo sapiens
ataatctcccttgcttgaaaagcggtgattaagattggcacttgcttacaggagtgaaaaacaggtaaggggtgcgcgcgtcttaacacacacaagaggaaatacagagaaaaggaagacacaaacatgaaatgagaattaaatgaaatagaatcacactgctgatagaagggttaaaaatctaaaatacaacaagaagggcaggtgttaagcgataaaggggggcagaacaagtcttttatccggccatttaattggtcaccttaagaaagaatcctatcttcccaccgcagctgagaagacacttctaagaggtacagctaaaaggtggaggactgatagacaacttagaggttggtttcgggaacgataaaacaagtaacgggctgcccggcctgcgccgcggagtcccgaggagcctgcgctgtgctcctctcgcggtgtctcgtcatctccgggaagactcggcgcctgggtccgcgctctctgggtaagctttccgggaagctttcccgggagctcgctggtcctggccccagaagcctgcggacccgcccagggaggataagcagctgaaagaccgcgcggtgccgctccgaggccccgggacgtgggcccatggtcggcctggcgccacctttccgggggaagccacgcgcaccaggcatcgcacgcggctctgcacccgcgccgccggacctgaaacccggcggagggcacacggggctgccgctgcgggccccggaccaacccatgcttactccggagcctgtaccggcgccgacgggtcggacctccctgcgcggtgtcgcccagcgggttcgtgcgaaaggcggggccgactacacgcggtgccgcgccctgagaccgtttatctgcagtcaacgcagcctcccggctcagcctgggaagatgcgcgaatcgggaaccccagagcgcggtggctagaccgggctccgccgcctcccccacagcccctttcctaatcgttcagacggagcctggtcgacttcgccggagactgccagatctcgttcctcttccctgtgtcatcttcttaattataaataatgggggatgaagataaaagaattacatatgaagattcagaaccatccacaggaatgaattacacgccctccatgcatcaagaagcacaggaggagacagttatgaagctcaaaggtatagatgcaaatgaaccaacagaaggaagtattcttttgaaaagcagtgaaaaaaagctacaagaaacaccaactgaagcaaatcacgtacaaagactgagacaaatgctggcttgccctccacatggtttactggacagggtcataacaaatgttaccatcattgttcttctgtgggctgtagtttggtcaattactggcagtgaatgtcttcctggaggaaacctatttggaattataatcctattctattgtgccatcattggtggtaaacttttggggcttattaagttacctacattgcctccactgccttctcttcttggcatgctgcttgcagggtttctcatcagaaatatcccagtcatcaacgataatgtgcagatcaagcacaagtggtcttcctctttgagaagcatagccctgtctatcattctggttcgtgctggccttggtctggattcaaaggccctgaagaagttaaagggcgtttgtgtaagactgtccatgggtccctgtattgtggaggcgtgcacatctgctcttcttgcccattacctgctgggtttaccatggcaatggggatttatactgggttttgttttaggtgctgtatctccagctgttgtggtgccttcaatgctccttttgcagggaggaggctatggtgttgagaagggtgtcccaaccttgctcatggcagctggcagcttcgatgacattctggccatcactggcttcaacacatgcttgggcatagccttttccacaggctctactgtctttaatgtcctcagaggagttttggaggtggtaattggtgtggcaactggatctgttcttggatttttcattcagtactttccaagccgtgaccaggacaaacttgtgtgtaagagaacattccttgtgttggggttgtctgtgctagctgtgttcagcagtgtgcattttggtttccctggatcaggaggactgtgcacgttggtcatggctttccttgcaggcatgggatggaccagcgaaaagattcatttttgtagatttgaacttgataggattgtatgctattctgcttaatgaagatgtcggtgacctaaaataaatgcagctatatcattttgtgataatcttacaaagcctgaagacaactgttcaaaataattaaacttaaataattaaaataatgccatatggaaaatatggaaacgttacaaattttgagatgagatatataatcataactcaattaagtggatctctgtggggatcttccatagacagcattcactgtgggtaaataacattcattctcatatcaacagtgtaacagaaatgcattctgtcaccagctctttaaaaatctttgcaaattg

SEQ ID NO: 3873 - protein, 398 aa, Homo sapiens
MGDEDKRITYEDSEPSTGMNYTPSMHQEAQEETVMKLKGIDANEPTEGSILLKSSEKKLQETPTEANHVQRLRQMLACPPHGLLDRVITNVTIIVLLWAVVWSITGSECLPGGNLFGIIILFYCAIIGGKLLGLIKLPTLPPLPSLLGMLLAGFLIRNIPVINDNVQIKHKWSSSLRSIALSIILVRAGLGLDSKALKKLKGVCVRLSMGPCIVEACTSALLAHYLLGLPWQWGFILGFVLGAVSPAVVVPSMLLLQGGGYGVEKGVPTLLMAAGSFDDILAITGFNTCLGIAFSTGSTVFNVLRGVLEVVIGVATGSVLGFFIQYFPSRDQDKLVCKRTFLVLGLSVLAVFSSVHFGFPGSGGLCTLVMAFLAGMGWTSEKIHFCRFELDRIVCYSA

SEQ ID NO: 3874 - DNA, 1699 bp, Homo sapiens
ataatctcccttgcttgaaaagcggtgattaagattggcacttgcttacaggagtgaaaaacaggtaaggggtgcgcgcgtcttaacacacacaagaggaaatacagagaaaaggaagacacaaacatgaaatgagaattaaatgaaatagaatcacactgctgatagaagggttaaaaatctaaaatacaacaagaagggcaggtgttaagcgataaaggggggcagaacaagtcttttatccggccatttaattggtcaccttaagaaagaatcctatcttcccaccgcagctgagaagacacttctaagaggtacagctaaaaggtggaggactgatagacaacttagaggttggtttcgggaacgataaaacaagtaacgggctgcccggcctgcgccgcggagtcccgaggagcctgcgctgtgctcctctcgcggtgtctcgtcatctccgggaagactcggcgcctgggtccgcgctctctgggtaagctttccgggaagctttcccgggagctcgctggtcctggccccagaagcctgcggacccgcccagggaggataagcagctgaaagaccgcgcggtgccgctccgaggccccgggacgtgggcccatggtcggcctggcgccacctttccgggggaagccacgcgcaccaggcatcgcacgcggctctgcacccgcgccgccggacctgaaacccggcggagggcacacggggctgccgctgcgggccccggaccaacccatgcttactccggagcctgtaccggcgccgacgggtcggacctccctgcgcggtgtcgcccagcgggttcgtgcgaaaggcggggccgactacacgcggtgccgcgccctgagaccgtttatctgcagtcaacgcagcctcccggctcagcctgggaagatgcgcgaatcgggaaccccagagcgcggtggctagaccgggctccgccgcctcccccacagcccctttcctaatcgttcagacggagcctggtcgacttcgccggagactgccagatctcgttcctcttccctgtgtcatcttcttaattataaataatgggggatgaagataaaagaattacatatgaagattcagaaccatccacaggaatgaattacacgccctccatgcatcaagaagcacaggaggagacagttatgaagctcaaaggtatagatgcaaatgaaccaacagaaggaagtattcttttgaaaagcagtgaaaaaaagctacaagaaacaccaactgaagcaaatcacgtacaaagactgagacaaatgctggcttgccctccacatggtttactggacagggtcataacaaatggaatggatttggtctttgaaggaagccaaaggttattctgccatcaatttgataaatatatggaagttcagattgatttatgccctatttttcttcagaaatgaattgtgtgcatatgtgtgtctgtgctgtgtatgctgggggaatatgtgataaagcagaaaaaagaagagatttgaaaattatctataaaggcaaattaggtttttttaagaagacagtattcttttattgagacttaaaatttattttattttttacattgatagataaaattgtatgtatttaccatgtgcaacatgatgttttgaagtatgtatacatactggaatgactaattttagctaattaacatatg

SEQ ID NO: 3875 - protein, 124 aa, Homo sapiens [sequence omitted]

SEQ ID NO: 3876 - DNA, 2947 bp, Homo sapiens
agcatgcattattaagcgcttgacttgcttccagacaaaggttgtctcaagtttgttgctcaaaccgagttctggagaacgccatcagctcgctgcttaaaattaaaccacaggttccattatgggtcgacttgatgggaaagtcatcatcctgacggccgctgctcaggggattggccaagcagctgccttagcttttgcaagagaaggtgccaaagtcatagccacagacattaatgagtccaaacttcaggaactggaaaagtacccgggtattcaaactcgtgtccttgatgtcacaaagaagaaacaaattgatcagtttgccaatgaagttgagagacttgatgttctctttaatgttgctggttttgtccatcatggaactgtcctggattgtgaggagaaagactgggacttctcgatgaatctcaatgtgcgcagcatgtacctgatgatcaaggcattccttcctaaaatgcttgctcagaaatctggcaatattatcaacatgtcttctgtggcttccagcgtcaaaggagttgtgaacagatgtgtgtacagcacaaccaaggcagccgtgattggcctcacaaaatctgtggctgcagatttcatccagcagggcatcaggtgcaactgtgtgtgcccaggaacagttgatacgccatctctacaagaaagaatacaagccagaggaaatcctgaagaggcacggaatgatttcctgaagagacaaaagacgggaagattcgcaactgcagaagaaatagccatgctctgcgtgtatttggcttctgatgaatctgcttatgtaactggtaaccctgtcatcattgatggaggctggagcttgtgattttaggatctccatggtgggaaggaaggcaggcccttcctatccacagtgaacctggttacgaagaaaactcaccaatcatctccttcctgttaatcacatgttaatgaaaataagctctttttaatgatgtcactgtttgcaagagtctgattctttaagtatattaatctctttgtaatctcttctgaaatcattgtaaagaaataaaaatattgaactcatagcaggagaatagtttttaaaataaatctcgatttgttagcatctgtcttagtcactttgggctgctataacaaattaccatagatggagtgtcatagacaacaaacatttatttttcagtctggaggctaggaagtgcaagataaaggtgccagcagatatagtttctggttagggcccacttcctggtttgcagatggtcctcttcttgctgtatcctcacatagcaagagcagagaaaaaaagcgagcgctcatgtgtctttttataaggacactaatcctgttcatgagggcactacccttatgacctgattacctcccaaaggccccacctcctaatgtatcatattgcaggttaggatgtcaacacatgactctggggtgatacaaataggccattgcagcatatacaattaaaatgtaaatatgaagaaaaaaggaagtttttgtttttttgtgggggagatgggggttaaggaagaagatagtaatttcaggactaggcatggtagctcatgcctataattcctgcactttgggaggccaaggcaggaggatcacttgcggccaggagttcaggaccagcatggttaacagaggctaaggcaggaggattacttgagcccaagagtttgaggctgcagtgagctgtaatcatgccactgcactccagggtgacagagcaagaccctgtacctaaataataataataatttccacttcatttttcaatattcaaatatttttatataattctgcattgttctgtatgtagatcctaattttaaaattttacaccatcataaatgaacaaaggtaggaaggagtttggcttcaatagcttacagtaaaaggagtaaaggagttcagcctcaaaacgatattgttgacctgttatgttatgaaaaataatccagtgtttatacttaacggatgccatcccttattatttactattttcttagtctaactaaacaatctttattaaaataagcaatgatatttgacatgggcctaagaaatatatagttagctaacaatattgtcagttagagggatttcttttctaaattaagtacagatttcttcaccaaactccaggataacagaaaagaggacataaaatttggacatagtttctggataaataaatgtaaatttaaatataaattatgtaacaggaaacaaacgaaattaaagaaaataaatttttcaagaaaagtaaatttatggatgttaattctgtaacattgtcagggcaaagttttttgtttttattttaatttaagggttttatgtttgttttttacttgttgcaacctcaaatgaccaaatggtatgatgcacactgagatactcaataaatgtgcagtgattcttagccttttttcctagaactttaatattaacatggaaaattctgaaatggacaacaaaaagataacactttgtgtatggggaagaatatcatgcagttgatgacggtacattaaaattcacacaaaaggacattttgactagcattcagaaagagtccattgattataagattatctatgaggttttggaccgggcactacactaccgaattatggctaactttggtttgtgatctagaccaagtcacccaatctatcttggattttagttttctggtttatgaaattaaggagttaagctaaatgacttgggtttcttttcgtgtatcataatcaaaatgctgtaacttctctagtgaattcatagaacactgactcttacaagtatgtcatgaaatactttatgctgtgagcaggtatacatgtataatatatgtatagctatgaacaaataaattttaaataaatgcacaacgaattct

SEQ ID NO: 3877 - protein, 245 aa, Homo sapiens; identical to SEQ ID NO: 447

SEQ ID NO: 3878 - DNA, 2391 bp, Homo sapiens
agcatgcattattaagcgcttgacttgcttccagacaaaggttgtctcaagtttgttgctcaaaccgagttctggagaacgccatcagctcgctgcttaaaattaaaccacaggttccattatgggtcgacttgatgggaaagtcatcatcctgacggccgctgctcaggggattggccaagcagctgccttagcttttgcaagagaaggtgccaaagtcatagccacagacattaatgagtccaaacttcaggaactggaaaagtacccgggtattcaaactcgtgtccttgatgtcacaaagaagaaacaaattgatcagtttgccaatgaagttgagagacttgatgttctctttaatgttgctggttttgtccatcatggaactgtcctggattgtgaggagaaagactgggacttctcgatgaatctcaatgtgcgcagcatgtacctgatgatcaaggcattccttcctaaaatgcttgctcagaaatctggcaatattatcaacatgtcttctgtggcttccagcgtcaaaggagttgtgaacagatgtgtgtacagcacaaccaaggcagccgtgattggcctcacaaaatctgtggctgcagatttcatccagcagggcatcaggtgcaactgtgtgtgcccaggaacagttgatacgccatctctacaagaaagaatacaagccagaggaaatcctgaagaggcacggaatgatttcctgaagagacaaaagacgggaagattcgcaactgcagaagaaatagccatgctctgcgtgtatttggcttctgatgaatctgcttatgtaactggtaaccctgtcatcattgatggaggctggagcttgtgattttaggatctccatggtgggaaggaaggcaggcccttcctatccacagtgaacctggttacgaagaaaactcaccaatcatctccttcctgttaatcacatgttaatgaaaataagctctttttaatgatgtcactgtttgcaagagtctgattctttaagtatattaatctctttgtaatctcttctgaaatcattgtaaagaaataaaaatattgaactcatagcaggagaatagtttttaaaataaatctcgatttgttagcatcgcatatacaattaaaatgtaaatatgaagaaaaaaggaagtttttgtttttttgtgggggagatgggggttaaggaagaagatagtaatttcaggaacctaaataataataataatttccacttcatttttcaatattcaaatatttttatataattctgcattgttctgtatgtagatcctaattttaaaattttacaccatcataaatgaacaaaggtaggaaggagtttggcttcaatagcttacagtaaaaggagtaaaggagttcagcctcaaaacgatattgttgacctgttatgttatgaaaaataatccagtgtttatacttaacggatgccatcccttattatttactattttcttagtctaactaaacaatctttattaaaataagcaatgatatttgacatgggcctaagaaatatatagttagctaacaatattgtcagttagagggatttcttttctaaattaagtacagatttcttcaccaaactccaggataacagaaaagaggacataaaatttggacatagtttctggataaataaatgtaaatttaaatataaattatgtaacaggaaacaaacgaaattaaagaaaataaatttttcaagaaaagtaaatttatggatgttaattctgtaacattgtcagggcaaagttttttgtttttattttaatttaagggttttatgtttgttttttacttgttgcaacctcaaatgaccaaatggtatgatgcacactgagatactcaataaatgtgcagtgattcttagccttttttcctagaactttaatattaacatggaaaattctgaaatggacaacaaaaagataacactttgtgtatggggaagaatatcatgcagttgatgacggtacattaaaattcacacaaaaggacattttgactagcattcagaaagagtccattgattataagattatctatgaggttttggaccgggcactacactaccgaattatggctaactttggtttgtgatctagaccaagtcacccaatctatcttggattttagttttctggtttatgaaattaaggagttaagctaaatgacttgggtttcttttcgtgtatcataatcaaaatgctgtaacttctctagtgaattcatagaacactgactcttacaagtatgtcatgaaatactttatgctgtgagcaggtatacatgtataatatatgtatagctatgaacaaataaattttaaataaatgcacaacgaattct

SEQ ID NO: 3879 - protein, 245 aa, Homo sapiens; identical to SEQ ID NO: 447

SEQ ID NO: 3880 - DNA, 3230 bp, Homo sapiens
aaccgagttctggagaacgccatcagctcgctgcttaaagccgtgtttgctctcattttctcaaagaaatctgttttagtttgagattacagtttatcaaatgttaaggctttgaccccaaaatctggtcccagaaagacaggaaggccagctaagaggaggttttcagagtgcatagaaaggctgctctgtgcttcggcatttgttctggaagtgcttcttcggttggcaaagattcctagcaaaacctttgactggaggctttacagggccatacacccaatatcactaatgacagtgttgtaaaatagcttttgtgcaccatgcttaggattcaaggaggataaagtatatctttctaaagttatactttagaaactgtcattccatgttgaaatgataaacattccatgtttatcttttgtgtaagaagtaaaaaagcaaaaattcattgcatcaaagtaggtcaggcactgttaaagccaagcttccccatcgcctaaaaaatgtggacaaactcagaggaagtcagtgattataagctgatccctggagccagttcttacataattgtgttagtctgctcctccaagaagcagactccaagatagaattaaatatgcatggattttattaggggaaatgctgttgtgagagagaatgaggagagaactaggtaaggctgtgagagccatcagacctcgatgcaagtccacccgcgagggaggaaaagaaggaaaccaggttgagtggaagcatcccagacagctgtgcagtctaagagaacttcagcaagattaaaccacaggttccattatgggtcgacttgatgggaaagtcatcatcctgacggccgctgctcaggggattggccaagcagctgccttagcttttgcaagagaaggtgccaaagtcatagccacagacattaatgagtccaaacttcaggaactggaaaagtacccgggtattcaaactcgtgtccttgatgtcacaaagaagaaacaaattgatcagtttgccaatgaagttgagagacttgatgttctctttaatgttgctggttttgtccatcatggaactgtcctggattgtgaggagaaagactgggacttctcgatgaatctcaatgtgcgcagcatgtacctgatgatcaaggcattccttcctaaaatgcttgctcagaaatctggcaatattatcaacatgtcttctgtggcttccagcgtcaaaggtgggtctgtctccttccgaggactgcgatgctcatacacgcacatcattaagagctctgcgtttgggaacaggcatagcagagattataatttcaagtattgaaatgatttcaaaactgcttttttcaaaattggtattaagttccttaaccacagatcttttgctctcgatgtgagccagtggtaaaattaaattaaaatgtggggtatttttgccctcccttttattctttctaatggacatggaaatgaacatcaaactgggagaaagaaccatttaacatttaattaatttaaaatagtgtattgagcaccggtatgtgctctggccataaaagaattcacagtccaaaactaggagcaaggcagcaaacatcatcttctccagtgtgatgatatataacagaggtttgtacaaagcgctgtcaaaatacagggaaataactgcctgtgagtttgtggaatgcttcacaaagacagttgatctgagccatcagcaagaagtcaagttgaaggacaaggacagcagtacaaaatgtggattatgtcacaatctggcatagttggatctgtgagtttaaaatgaaatagttactgctgagataccatttcttctctttgcaaggatacacatattcaacatacacaagagaggaatgtaaagaagtgcctaggcctcctgttttattgttttgttttgttattaatcttcattttcttttggaatctgcctaagagttatggcaactgatgatgagaaactaagactaccaatgttaagtaagttcagcatttcaattaagtctcaattaagttgtgcctatactgatattatttccctagatccagaaactgactctattgaaggaaaaaaatctgatatcaatctttttaaaaggggaggaatgtgggagaaagcatgaaaatggctactgggaaaacttatttgtgttacctttctgaaggaaaatacattttttattccttcaattgttgaacctttcctccaccctcaggagttgtgaacagatgtgtgtacagcacaaccaaggcagccgtgattggcctcacaaaatctgtggctgcagatttcatccagcagggcatcaggtgcaactgtgtgtgcccaggaacagttgatacgccatctctacaagaaagaatacaagccagaggaaatcctgaagaggcacggaatgatttcctgaagagacaaaagacgggaagattcgcaactgcagaagaaatagccatgctctgcgtgtatttggcttctgatgaatctgcttatgtaactggtaaccctgtcatcattgatggaggctggagcttgtgattttaggatctccatggtgggaaggaaggcaggcccttcctatccacagtgaacctggttacgaagaaaactcaccaatcatctccttcctgttaatcacatgttaatgaaaataagctctttttaatgatgtcactgtttgcaagagtctgattctttaagtatattaatctctttgtaatctcttctgaaatcattgtaaagaaataaaaatattgaactcatagcaggagaatagtttttaaaataaatctcgatttgttagcatctgtcttagtcactttgggctgctataacaaattaccatagatggagtgtcatagacaacaaacatttatttttcagtctggaggctaggaagtgcaagataaaggtgccagcagatatagtttctggttagggcccacttcctggtttgcagatggtcctcttcttgctgtatcctcacatagcaagagcagagaaaaaaagcgagcgctcatgtgtctttttataaggacactaatcctgttcatgagggcactacccttatgacctgattacctcccaaaggccccacctcctaatgtatcatattgcaggttaggatgtcaacacatgactctggggtgatacaaataggccattgcagcatatacaattaaaatgtaaatatgaag

SEQ ID NO: 3881 - protein, 173 aa, Homo sapiens
MGRLDGKVIILTAAAQGIGQAAALAFAREGAKVIATDINESKLQELEKYPGIQTRVLDVTKKKQIDQFANEVERLDVLFNVAGFVHHGTVLDCEEKDWDFSMNLNVRSMYLMIKAFLPKMLAQKSGNIINMSSVASSVKGGSVSFRGLRCSYTHIIKSSAFGNRHSRDYNFKY

SEQ ID NO: 3882 - DNA, 2487 bp, Homo sapiens
aagtttgttgctcaaaccgagttctggagaacgccatcagctcgctgcttaaaattaaaccacaggttccattatgggtcgacttgatgggaaagtcatcatcctgacggccgctgctcaggggattggccaagcagctgccttagcttttgcaagagaaggtgccaaagtcatagccacagacattaatgagtccaaacttcaggaactggaaaagtacccgggtattcaaactcgtgtccttgatgtcacaaagaagaaacaaattgatcagtttgccaatgaagttgagagacttgatgttctctttaatgttgctggttttgtccatcatggaactgtcctggattgtgaggagaaagactgggacttctcgatgaatctcaatgtgcgcagcatgtacctgatgatcaaggcattccttcctaaaatgcttgctcagaaatctggcaatattatcaacatgtcttctgtggcttccagcgtcaaaggtgggtctgtctccttccgaggactgcgatgctcatacacgcacatcattaagagctctgcgtttgggaacaggcatagcagagattataatttcaagtattgaaatgatttcaaaactgcttttttcaaaattggtattaagttccttaaccacagatcttttgctctcgatgtgagccagtggtaaaattaaattaaaatgtggggtatttttgccctcccttttattctttctaatggacatggaaatgaacatcaaactgggagaaagaaccatttaacatttaattaatttaaaatagtgtattgagcaccggtatgtgctctggccataaaagaattcacagtccaaaactaggagcaaggcagcaaacatcatcttctccagtgtgatgatatataacagaggtttgtacaaagcgctgtcaaaatacagggaaataactgcctgtgagtttgtggaatgcttcacaaagacagttgatctgagccatcagcaagaagtcaagttgaaggacaaggacagcagtacaaaatgtggattatgtcacaatctggcatagttggatctgtgagtttaaaatgaaatagttactgctgagataccatttcttctctttgcaaggatacacatattcaacatacacaagagaggaatgtaaagaagtgcctaggcctcctgttttattgttttgttttgttattaatcttcattttcttttggaatctgcctaagagttatggcaactgatgatgagaaactaagactaccaatgttaagtaagttcagcatttcaattaagtctcaattaagttgtgcctatactgatattatttccctagatccagaaactgactctattgaaggaaaaaaatctgatatcaatctttttaaaaggggaggaatgtgggagaaagcatgaaaatggctactgggaaaacttatttgtgttacctttctgaaggaaaatacattttttattccttcaattgttgaacctttcctccaccctcaggagttgtgaacagatgtgtgtacagcacaaccaaggcagccgtgattggcctcacaaaatctgtggctgcagatttcatccagcagggcatcaggtgcaactgtgtgtgcccaggaacagttgatacgccatctctacaagaaagaatacaagccagaggaaatcctgaagaggcacggaatgatttcctgaagagacaaaagacgggaagattcgcaactgcagaagaaatagccatgctctgcgtgtatttggcttctgatgaatctgcttatgtaactggtaaccctgtcatcattgatggaggctggagcttgtgattttaggatctccatggtgggaaggaaggcaggcccttcctatccacagtgaacctggttacgaagaaaactcaccaatcatctccttcctgttaatcacatgttaatgaaaataagctctttttaatgatgtcactgtttgcaagagtctgattctttaagtatattaatctctttgtaatctcttctgaaatcattgtaaagaaataaaaatattgaactcatagcaggagaatagtttttaaaataaatctcgatttgttagcatctgtcttagtcactttgggctgctataacaaattaccatagatggagtgtcatagacaacaaacatttatttttcagtctggaggctaggaagtgcaagataaaggtgccagcagatatagtttctggttagggcccacttcctggtttgcagatggtcctcttcttgctgtatcctcacatagcaagagcagagaaaaaaagcgagcgctcatgtgtctttttataaggacactaatcctgttcatgagggcactacccttatgacctgattacctcccaaaggccccacctcctaatgtatcatattgcaggttaggatgtcaacacatgactctggggtgatacaaataggccattgcagcatatacaattaaaatgtaaatatgaag

SEQ ID NO: 3883 - protein, 173 aa, Homo sapiens; identical to SEQ ID NO: 3881

SEQ ID NO: 3884 - DNA, 2296 bp, Homo sapiens
atgcattattaagcgcttgacttgcttccagacaaaggttgtctcaagtttgttgctcaaaccgagttctggagaacgccatcagctcgctgcttaaaattaaaccacaggttccattatgggtcgacttgatgggaaagtcatcatcctgacggccgctgctcaggggattggccaagcagctgccttagcttttgcaagagaaggtgccaaagtcatagccacagacattaatgagtccaaacttcaggaactggaaaagtacccgggtattcaaactcgtgtccttgatgtcacaaagaagaaacaaattgatcagtttgccaatgaagttgagagacttgatgttctctttaatgttgctggttttgtccatcatggaactgtcctggattgtgaggagaaagactgggacttctcgatgaatctcaatgtgcgcagcatgtacctgatgatcaaggcattccttcctaaaatgcttgctcagaaatctggcaatattatcaacatgtcttctgtggcttccagcgtcaaaggtgggtctgtctccttccgaggactgcgatgctcatacacgcacatcattaagagctctgcgtttgggaacaggcatagcagagattataatttcaagtattgaaatgatttcaaaactgcttttttcaaaattggtattaagttccttaaccacagatcttttgctctcgatgtgagccagtggtaaaattaaattaaaatgtggggtatttttgccctcccttttattctttctaatggacatggaaatgaacatcaaactgggagaaagaaccatttaacatttaattaatttaaaatagtgtattgagcaccggtatgtgctctggccataaaagaattcacagtccaaaactaggagcaaggcagcaaacatcatcttctccagtgtgatgatatataacagaggtttgtacaaagcgctgtcaaaatacagggaaataactgcctgtgagtttgtggaatgcttcacaaagacagttgatctgagccatcagcaagaagtcaagttgaaggacaaggacagcagtacaaaatgtggattatgtcacaatctggcatagttggatctgtgagtttaaaatgaaatagttactgctgagataccatttcttctctttgcaaggatacacatattcaacatacacaagagaggaatgtaaagaagtgcctaggcctcctgttttattgttttgttttgttattaatcttcattttcttttggaatctgcctaagagttatggcaactgatgatgagaaactaagactaccaatgttaagagttgtgaacagatgtgtgtacagcacaaccaaggcagccgtgattggcctcacaaaatctgtggctgcagatttcatccagcagggcatcaggtgcaactgtgtgtgcccaggaacagttgatacgccatctctacaagaaagaatacaagccagaggaaatcctgaagaggcacggaatgatttcctgaagagacaaaagacgggaagattcgcaactgcagaagaaatagccatgctctgcgtgtatttggcttctgatgaatctgcttatgtaactggtaaccctgtcatcattgatggaggctggagcttgtgattttaggatctccatggtgggaaggaaggcaggcccttcctatccacagtgaacctggttacgaagaaaactcaccaatcatctccttcctgttaatcacatgttaatgaaaataagctctttttaatgatgtcactgtttgcaagagtctgattctttaagtatattaatctctttgtaatctcttctgaaatcattgtaaagaaataaaaatattgaactcatagcaggagaatagtttttaaaataaatctcgatttgttagcatctgtcttagtcactttgggctgctataacaaattaccatagatggagtgtcatagacaacaaacatttatttttcagtctggaggctaggaagtgcaagataaaggtgccagcagatatagtttctggttagggcccacttcctggtttgcagatggtcctcttcttgctgtatcctcacatagcaagagcagagaaaaaaagcgagcgctcatgtgtctttttataaggacactaatcctgttcatgagggcactacccttatgacctgattacctcccaaaggccccacctcctaatgtatcatattgcaggttaggatgtcaacacatgactctggggtgatacaaataggccattgcagcatatacaattaaaatgtaaatatgaag

SEQ ID NO: 3885 - protein, 173 aa, Homo sapiens; identical to SEQ ID NO: 3881

SEQ ID NO: 3886 - DNA, 1906 bp, Homo sapiens
atgcattattaagcgcttgacttgcttccagacaaaggttgtctcaagtttgttgctcaaaccgagttctggagaacgccatcagctcgctgcttaaaattaaaccacaggttccattatgggtcgacttgatgggaaagtcatcatcctgacggccgctgctcaggggattggccaagcagctgccttagcttttgcaagagaaggtgccaaagtcatagccacagacattaatgagtccaaacttcaggaactggaaaagtacccgggtattcaaactcgtgtccttgatgtcacaaagaagaaacaaattgatcagtttgccaatgaagttgagagacttgatgttctctttaatgttgctggttttgtccatcatggaactgtcctggattgtgaggagaaagactgggacttctcgatgaatctcaatgtgcgcagcatgtacctgatgatcaaggcattccttcctaaaatgcttgctcagaaatctggcaatattatcaacatgtcttctgtggcttccagcgtcaaaggtgggtctgtctccttccgaggactgcgatgctcatacacgcacatcattaagagctctgcgtttgggaacaggcatagcagagattataatttcaagtattgaaatgatttcaaaactgcttttttcaaaattggtattaagttccttaaccacagatcttttgctctcgatgtgagccagtggtaaaattaaattaaaatgtggggtatttttgccctcccttttattctttctaatggacatggaaatgaacatcaaactgggagaaagaaccatttaacatttaattaatttaaaatagtgtattgagcaccggtatgtgctctggccataaaagaattcacagtccaaaactaggagcaaggcagcaaacatcatcttctccagtgtgatgatatataacagaggtttgtacaaagcgctgtcaaaatacagggaaataactgcctgtgagtttgtggaatgcttcacaaagacagttgatctgagccatcagcaagaagtcaagttgaaggacaaggacagcagtacaaaatgtggattatgtcacaatctggcatagttggatctgtgagtttaaaatgaaatagttactgctgagataccatttcttctctttgcaaggatacacatattcaacatacacaagagaggaatgtaaagaagtgcctaggcctcctgttttattgttttgttttgttattaatcttcattttcttttggaatctgcctaagagttatggcaactgatgatgagaaactaagactaccaatgttaagagttgtgaacagatgtgtgtacagcacaaccaaggcagccgtgattggcctcacaaaatctgtggctgcagatttcatccagcagggcatcaggtgcaactgtgtgtgcccaggaacagttgatacgccatctctacaagaaagaatacaagccagaggaaatcctgaagaggcacggaatgatttcctgaagagacaaaagacgggaagattcgcaactgcagaagaaatagccatgctctgcgtgtatttggcttctgatgaatctgcttatgtaactggtaaccctgtcatcattgatggaggctggagcttgtgattttaggatctccatggtgggaaggaaggcaggcccttcctatccacagtgaacctggttacgaagaaaactcaccaatcatctccttcctgttaatcacatgttaatgaaaataagctctttttaatgatgtcactgtttgcaagagtctgattctttaagtatattaatctctttgtaatctcttctgaaatcattgtaaagaaataaaaatattgaactcatagcaggagaatagtttttaaaataaatctcgatttgttagcatc

SEQ ID NO: 3887 - protein, 173 aa, Homo sapiens; identical to SEQ ID NO: 3881

SEQ ID NO: 3888 - DNA, 1128 bp, Homo sapiens
agcatgcattattaagcgcttgacttgcttccagacaaaggttgtctcaagtttgttgctcaaaccgagttctggagaacgccatcagctcgctgcttaaaattaaaccacaggttccattatgggtcgacttgatgggaaagtcatcatcctgacggccgctgctcaggggattggccaagcagctgccttagcttttgcaagagaaggtgccaaagtcatagccacagacattaatgagtccaaacttcaggaactggaaaagtacccgggtattcaaactcgtgtccttgatgtcacaaagaagaaacaaattgatcagtttgccaatgaagttgagagacttgatgttctctttaatgttgctggttttgtccatcatggaactgtcctggattgtgaggagaaagactgggacttctcgatgaatctcaatgtgcgcagcatgtacctgatgatcaaggcattccttcctaaaatgcttgctcagaaatctggcaatattatcaacatgtcttctgtggcttccagcgtcaaaggagttgtgaacagatgtgtgtacagcacaaccaaggcagccgtgattggcctcacaaaatctgtggctgcagatttcatccagcagggcatcaggtgcaactgtgtgtgcccaggaacagttgatacgccatctctacaagaaagaatacaagccagaggaaatcctgaagaggcacggaatgatttcctgaagagacaaaagacgggaagattcgcaactgcagaagaaatagccatgctctgcgtgtatttggcttctgatgaatctgcttatgtaactggtaaccctgtcatcattgatggaggctggagcttgtgattttaggatctccatggtgggaaggaaggcaggcccttcctatccacagtgaacctggttacgaagaaaactcaccaatcatctccttcctgttaatcacatgttaatgaaaataagctctttttaatgatgtcactgtttgcaagagtctgattctttaagtatattaatctctttgtaatctcttctgaaatcattgtaaagaaataaaaatattgaactcatagcaggagaatagtttttaaaataaatctcgatttgttagcatc

SEQ ID NO: 3889 - protein, 245 aa, Homo sapiens; identical to SEQ ID NO: 447

SEQ ID NO: 3890 - DNA, 2838 bp, Homo sapiens
aaccgagttctggagaacgccatcagctcgctgcttaaagccgtgtttgctctcattttctcaaagaaatctgttttagtttgagattacagtttatcaaatgttaaggctttgaccccaaaatctggtcccagaaagacaggaaggccagctaagaggaggttttcagagtgcatagaaaggctgctctgtgcttcggcatttgttctggaagtgcttcttcggttggcaaagattcctagcaaaacctttgactggaggctttacagggccatacacccaatatcactaatgacagtgttgtaaaatagcttttgtgcaccatgcttaggattcaaggaggataaagtatatctttctaaagttatactttagaaactgtcattccatgttgaaatgataaacattccatgtttatcttttgtgtaagaagtaaaaaagcaaaaattcattgcatcaaagtaggtcaggcactgttaaagccaagcttccccatcgcctaaaaaatgtggacaaactcagaggaagtcagtgattataagctgatccctggagccagttcttacataattgtgttagtctgctcctccaagaagcagactccaagatagaattaaatatgcatggattttattaggggaaatgctgttgtgagagagaatgaggagagaactaggtaaggctgtgagagccatcagacctcgatgcaagtccacccgcgagggaggaaaagaaggaaaccaggttgagtggaagcatcccagacagctgtgcagtctaagagaacttcagcaagattaaaccacaggttccattatgggtcgacttgatgggaaagtcatcatcctgacggccgctgctcaggggattggccaagcagctgccttagcttttgcaagagaaggtgccaaagtcatagccacagacattaatgagtccaaacttcaggaactggaaaagtacccgggtattcaaactcgtgtccttgatgtcacaaagaagaaacaaattgatcagtttgccaatgaagttgagagacttgatgttctctttaatgttgctggttttgtccatcatggaactgtcctggattgtgaggagaaagactgggacttctcgatgaatctcaatgtgcgcagcatgtacctgatgatcaaggcattccttcctaaaatgcttgctcagaaatctggcaatattatcaacatgtcttctgtggcttccagcgtcaaaggtgggtctgtctccttccgaggactgcgatgctcatacacgcacatcattaagagctctgcgtttgggaacaggcatagcagagattataatttcaagtattgaaatgatttcaaaactgcttttttcaaaattggtattaagttccttaaccacagatcttttgctctcgatgtgagccagtggtaaaattaaattaaaatgtggggtatttttgccctcccttttattctttctaatggacatggaaatgaacatcaaactgggagaaagaaccatttaacatttaattaatttaaaatagtgtattgagcaccggtatgtgctctggccataaaagaattcacagtccaaaactaggagcaaggcagcaaacatcatcttctccagtgtgatgatatataacagaggtttgtacaaagcgctgtcaaaatacagggaaataactgcctgtgagtttgtggaatgcttcacaaagacagttgatctgagccatcagcaagaagtcaagttgaaggacaaggacagcagtacaaaatgtggattatgtcacaatctggcatagttggatctgtgagtttaaaatgaaatagttactgctgagataccatttcttctctttgcaaggatacacatattcaacatacacaagagaggaatgtaaagaagtgcctaggcctcctgttttattgttttgttttgttattaatcttcattttcttttggaatctgcctaagagttatggcaactgatgatgagaaactaagactaccaatgttaagtaagttcagcatttcaattaagtctcaattaagttgtgcctatactgatattatttccctagatccagaaactgactctattgaaggaaaaaaatctgatatcaatctttttaaaaggggaggaatgtgggagaaagcatgaaaatggctactgggaaaacttatttgtgttacctttctgaaggaaaatacattttttattccttcaattgttgaacctttcctccaccctcaggagttgtgaacagatgtgtgtacagcacaaccaaggcagccgtgattggcctcacaaaatctgtggctgcagatttcatccagcagggcatcaggtgcaactgtgtgtgcccaggaacagttgatacgccatctctacaagaaagaatacaagccagaggaaatcctgaagaggcacggaatgatttcctgaagagacaaaagacgggaagattcgcaactgcagaagaaatagccatgctctgcgtgtatttggcttctgatgaatctgcttatgtaactggtaaccctgtcatcattgatggaggctggagcttgtgattttaggatctccatggtgggaaggaaggcaggcccttcctatccacagtgaacctggttacgaagaaaactcaccaatcatctccttcctgttaatcacatgttaatgaaaataagctctttttaatgatgtcactgtttgcaagagtctgattctttaagtatattaatctctttgtaatctcttctgaaatcattgtaaagaaataaaaatattgaactcatagcaggagaatagtttttaaaataaatctcgatttgttagca

SEQ ID NO: 3891 - protein, 173 aa, Homo sapiens; identical to SEQ ID NO: 3881

SEQ ID NO: 3892 - DNA, 2095 bp, Homo sapiens
aagtttgttgctcaaaccgagttctggagaacgccatcagctcgctgcttaaaattaaaccacaggttccattatgggtcgacttgatgggaaagtcatcatcctgacggccgctgctcaggggattggccaagcagctgccttagcttttgcaagagaaggtgccaaagtcatagccacagacattaatgagtccaaacttcaggaactggaaaagtacccgggtattcaaactcgtgtccttgatgtcacaaagaagaaacaaattgatcagtttgccaatgaagttgagagacttgatgttctctttaatgttgctggttttgtccatcatggaactgtcctggattgtgaggagaaagactgggacttctcgatgaatctcaatgtgcgcagcatgtacctgatgatcaaggcattccttcctaaaatgcttgctcagaaatctggcaatattatcaacatgtcttctgtggcttccagcgtcaaaggtgggtctgtctccttccgaggactgcgatgctcatacacgcacatcattaagagctctgcgtttgggaacaggcatagcagagattataatttcaagtattgaaatgatttcaaaactgcttttttcaaaattggtattaagttccttaaccacagatcttttgctctcgatgtgagccagtggtaaaattaaattaaaatgtggggtatttttgccctcccttttattctttctaatggacatggaaatgaacatcaaactgggagaaagaaccatttaacatttaattaatttaaaatagtgtattgagcaccggtatgtgctctggccataaaagaattcacagtccaaaactaggagcaaggcagcaaacatcatcttctccagtgtgatgatatataacagaggtttgtacaaagcgctgtcaaaatacagggaaataactgcctgtgagtttgtggaatgcttcacaaagacagttgatctgagccatcagcaagaagtcaagttgaaggacaaggacagcagtacaaaatgtggattatgtcacaatctggcatagttggatctgtgagtttaaaatgaaatagttactgctgagataccatttcttctctttgcaaggatacacatattcaacatacacaagagaggaatgtaaagaagtgcctaggcctcctgttttattgttttgttttgttattaatcttcattttcttttggaatctgcctaagagttatggcaactgatgatgagaaactaagactaccaatgttaagtaagttcagcatttcaattaagtctcaattaagttgtgcctatactgatattatttccctagatccagaaactgactctattgaaggaaaaaaatctgatatcaatctttttaaaaggggaggaatgtgggagaaagcatgaaaatggctactgggaaaacttatttgtgttacctttctgaaggaaaatacattttttattccttcaattgttgaacctttcctccaccctcaggagttgtgaacagatgtgtgtacagcacaaccaaggcagccgtgattggcctcacaaaatctgtggctgcagatttcatccagcagggcatcaggtgcaactgtgtgtgcccaggaacagttgatacgccatctctacaagaaagaatacaagccagaggaaatcctgaagaggcacggaatgatttcctgaagagacaaaagacgggaagattcgcaactgcagaagaaatagccatgctctgcgtgtatttggcttctgatgaatctgcttatgtaactggtaaccctgtcatcattgatggaggctggagcttgtgattttaggatctccatggtgggaaggaaggcaggcccttcctatccacagtgaacctggttacgaagaaaactcaccaatcatctccttcctgttaatcacatgttaatgaaaataagctctttttaatgatgtcactgtttgcaagagtctgattctttaagtatattaatctctttgtaatctcttctgaaatcattgtaaagaaataaaaatattgaactcatagcaggagaatagtttttaaaataaatctcgatttgttagca

SEQ ID NO: 3893 - protein, 173 aa, Homo sapiens; identical to SEQ ID NO: 3881

SEQ ID NO: 3894 - DNA, 2804 bp, Homo sapiens
aaccgagttctggagaacgccatcagctcgctgcttaaagccgtgtttgctctcattttctcaaagaaatctgttttagtttgagattacagtttatcaaatgttaaggctttgaccccaaaatctggtcccagaaagacaggaaggccagctaagaggaggttttcagagtgcatagaaaggctgctctgtgcttcggcatttgttctggaagtgcttcttcggttggcaaagattcctagcaaaacctttgactggaggctttacagggccatacacccaatatcactaatgacagtgttgtaaaatagcttttgtgcaccatgcttaggattcaaggaggataaagtatatctttctaaagttatactttagaaactgtcattccatgttgaaatgataaacattccatgtttatcttttgtgtaagaagtaaaaaagcaaaaattcattgcatcaaagtaggtcaggcactgttaaagccaagcttccccatcgcctaaaaaatgtggacaaactcagaggaagtcagtgattataagctgatccctggagccagttcttacataattgtgttagtctgctcctccaagaagcagactccaagatagaattaaatatgcatggattttattaggggaaatgctgttgtgagagagaatgaggagagaactaggtaaggctgtgagagccatcagacctcgatgcaagtccacccgcgagggaggaaaagaaggaaaccaggttgagtggaagcatcccagacagctgtgcagtctaagagaacttcagcaagattaaaccacaggttccattatgggtcgacttgatgggaaagtcatcatcctgacggccgctgctcaggggattggccaagcagctgccttagcttttgcaagagaaggtgccaaagtcatagccacagacattaatgagtccaaacttcaggaactggaaaagtacccgggtattcaaactcgtgtccttgatgtcacaaagaagaaacaaattgatcagtttgccaatgaagttgagagacttgatgttctctttaatgttgctggttttgtccatcatggaactgtcctggattgtgaggagaaagactgggacttctcgatgaatctcaatgtgcgcagcatgtacctgatgatcaaggcattccttcctaaaatgcttgctcagaaatctggcaatattatcaacatgtcttctgtggcttccagcgtcaaaggtgggtctgtctccttccgaggactgcgatgctcatacacgcacatcattaagagctctgcgtttgggaacaggcatagcagagattataatttcaagtattgaaatgatttcaaaactgcttttttcaaaattggtattaagttccttaaccacagatcttttgctctcgatgtgagccagtggtaaaattaaattaaaatgtggggtatttttgccctcccttttattctttctaatggacatggaaatgaacatcaaactgggagaaagaaccatttaacatttaattaatttaaaatagtgtattgagcaccggtatgtgctctggccataaaagaattcacagtccaaaactaggagcaaggcagcaaacatcatcttctccagtgtgatgatatataacagaggtttgtacaaagcgctgtcaaaatacagggaaataactgcctgtgagtttgtggaatgcttcacaaagacagttgatctgagccatcagcaagaagtcaagttgaaggacaaggacagcagtacaaaatgtggattatgtcacaatctggcatagttggatctgtgagtttaaaatgaaatagttactgctgagataccatttcttctctttgcaaggatacacatattcaacatacacaagagaggaatgtaaagaagtgcctaggcctcctgttttattgttttgttttgttattaatcttcattttcttttggaatctgcctaagagttatggcaactgatgatgagaaactaagactaccaatgttaagtaagttcagcatttcaattaagtctcaattaagttgtgcctatactgatattatttccctagatccagaaactgactctattgaaggaaaaaaatctgatatcaatctttttaaaaggggaggaatgtgggagaaagcatgaaaatggctactgggaaaacttatttgtgttacctttctgaaggaaaatacattttttattccttcaattgttgaacctttcctccaccctcaggagttgtgaacagatgtgtgtacagcacaaccaaggcagccgtgattggcctcacaaaatctgtggctgcagatttcatccagcagggcatcaggtgcaactgtgtgtgcccaggaacagttgatacgccatctctacaagaaagaatacaagccagaggaaatcctgaagaggcacggaatgatttcctgaagagacaaaagacgggaagattcgcaactgcagaagaaatagccatgctctgcgtgtatttggcttctgatgaatctgcttatgtaactggtaaccctgtcatcattgatggaggctggagcttgtgattttaggatctccatggtgggaaggaaggcaggcccttcctatccacagtgaacctggttacgaagaaaactcaccaatcatctccttcctgttaatcacatgttaatgaaaataagctctttttaatgatgtcactgtttgcaagagtctgattctttaagtatattaatctctttgtaatctcttctgaaatcattgtaaagaaataaaaatattgaactcatagcaggag

SEQ ID NO: 3895 - protein, 173 aa, Homo sapiens; identical to SEQ ID NO: 3881

SEQ ID NO: 3896 - DNA, 2061 bp, Homo sapiens
aagtttgttgctcaaaccgagttctggagaacgccatcagctcgctgcttaaaattaaaccacaggttccattatgggtcgacttgatgggaaagtcatcatcctgacggccgctgctcaggggattggccaagcagctgccttagcttttgcaagagaaggtgccaaagtcatagccacagacattaatgagtccaaacttcaggaactggaaaagtacccgggtattcaaactcgtgtccttgatgtcacaaagaagaaacaaattgatcagtttgccaatgaagttgagagacttgatgttctctttaatgttgctggttttgtccatcatggaactgtcctggattgtgaggagaaagactgggacttctcgatgaatctcaatgtgcgcagcatgtacctgatgatcaaggcattccttcctaaaatgcttgctcagaaatctggcaatattatcaacatgtcttctgtggcttccagcgtcaaaggtgggtctgtctccttccgaggactgcgatgctcatacacgcacatcattaagagctctgcgtttgggaacaggcatagcagagattataatttcaagtattgaaatgatttcaaaactgcttttttcaaaattggtattaagttccttaaccacagatcttttgctctcgatgtgagccagtggtaaaattaaattaaaatgtggggtatttttgccctcccttttattctttctaatggacatggaaatgaacatcaaactgggagaaagaaccatttaacatttaattaatttaaaatagtgtattgagcaccggtatgtgctctggccataaaagaattcacagtccaaaactaggagcaaggcagcaaacatcatcttctccagtgtgatgatatataacagaggtttgtacaaagcgctgtcaaaatacagggaaataactgcctgtgagtttgtggaatgcttcacaaagacagttgatctgagccatcagcaagaagtcaagttgaaggacaaggacagcagtacaaaatgtggattatgtcacaatctggcatagttggatctgtgagtttaaaatgaaatagttactgctgagataccatttcttctctttgcaaggatacacatattcaacatacacaagagaggaatgtaaagaagtgcctaggcctcctgttttattgttttgttttgttattaatcttcattttcttttggaatctgcctaagagttatggcaactgatgatgagaaactaagactaccaatgttaagtaagttcagcatttcaattaagtctcaattaagttgtgcctatactgatattatttccctagatccagaaactgactctattgaaggaaaaaaatctgatatcaatctttttaaaaggggaggaatgtgggagaaagcatgaaaatggctactgggaaaacttatttgtgttacctttctgaaggaaaatacattttttattccttcaattgttgaacctttcctccaccctcaggagttgtgaacagatgtgtgtacagcacaaccaaggcagccgtgattggcctcacaaaatctgtggctgcagatttcatccagcagggcatcaggtgcaactgtgtgtgcccaggaacagttgatacgccatctctacaagaaagaatacaagccagaggaaatcctgaagaggcacggaatgatttcctgaagagacaaaagacgggaagattcgcaactgcagaagaaatagccatgctctgcgtgtatttggcttctgatgaatctgcttatgtaactggtaaccctgtcatcattgatggaggctggagcttgtgattttaggatctccatggtgggaaggaaggcaggcccttcctatccacagtgaacctggttacgaagaaaactcaccaatcatctccttcctgttaatcacatgttaatgaaaataagctctttttaatgatgtcactgtttgcaagagtctgattctttaagtatattaatctctttgtaatctcttctgaaatcattgtaaagaaataaaaatattgaactcatagcaggag

SEQ ID NO: 3897 - protein, 173 aa, Homo sapiens; identical to SEQ ID NO: 3881

SEQ ID NO: 3898 - DNA, 1870 bp, Homo sapiens
atgcattattaagcgcttgacttgcttccagacaaaggttgtctcaagtttgttgctcaaaccgagttctggagaacgccatcagctcgctgcttaaaattaaaccacaggttccattatgggtcgacttgatgggaaagtcatcatcctgacggccgctgctcaggggattggccaagcagctgccttagcttttgcaagagaaggtgccaaagtcatagccacagacattaatgagtccaaacttcaggaactggaaaagtacccgggtattcaaactcgtgtccttgatgtcacaaagaagaaacaaattgatcagtttgccaatgaagttgagagacttgatgttctctttaatgttgctggttttgtccatcatggaactgtcctggattgtgaggagaaagactgggacttctcgatgaatctcaatgtgcgcagcatgtacctgatgatcaaggcattccttcctaaaatgcttgctcagaaatctggcaatattatcaacatgtcttctgtggcttccagcgtcaaaggtgggtctgtctccttccgaggactgcgatgctcatacacgcacatcattaagagctctgcgtttgggaacaggcatagcagagattataatttcaagtattgaaatgatttcaaaactgcttttttcaaaattggtattaagttccttaaccacagatcttttgctctcgatgtgagccagtggtaaaattaaattaaaatgtggggtatttttgccctcccttttattctttctaatggacatggaaatgaacatcaaactgggagaaagaaccatttaacatttaattaatttaaaatagtgtattgagcaccggtatgtgctctggccataaaagaattcacagtccaaaactaggagcaaggcagcaaacatcatcttctccagtgtgatgatatataacagaggtttgtacaaagcgctgtcaaaatacagggaaataactgcctgtgagtttgtggaatgcttcacaaagacagttgatctgagccatcagcaagaagtcaagttgaaggacaaggacagcagtacaaaatgtggattatgtcacaatctggcatagttggatctgtgagtttaaaatgaaatagttactgctgagataccatttcttctctttgcaaggatacacatattcaacatacacaagagaggaatgtaaagaagtgcctaggcctcctgttttattgttttgttttgttattaatcttcattttcttttggaatctgcctaagagttatggcaactgatgatgagaaactaagactaccaatgttaagagttgtgaacagatgtgtgtacagcacaaccaaggcagccgtgattggcctcacaaaatctgtggctgcagatttcatccagcagggcatcaggtgcaactgtgtgtgcccaggaacagttgatacgccatctctacaagaaagaatacaagccagaggaaatcctgaagaggcacggaatgatttcctgaagagacaaaagacgggaagattcgcaactgcagaagaaatagccatgctctgcgtgtatttggcttctgatgaatctgcttatgtaactggtaaccctgtcatcattgatggaggctggagcttgtgattttaggatctccatggtgggaaggaaggcaggcccttcctatccacagtgaacctggttacgaagaaaactcaccaatcatctccttcctgttaatcacatgttaatgaaaataagctctttttaatgatgtcactgtttgcaagagtctgattctttaagtatattaatctctttgtaatctcttctgaaatcattgtaaagaaataaaaatattgaactcatagcaggag

SEQ ID NO: 3899 - protein, 173 aa, Homo sapiens; identical to SEQ ID NO: 3881

SEQ ID NO: 3900 - DNA, 1092 bp, Homo sapiens
agcatgcattattaagcgcttgacttgcttccagacaaaggttgtctcaagtttgttgctcaaaccgagttctggagaacgccatcagctcgctgcttaaaattaaaccacaggttccattatgggtcgacttgatgggaaagtcatcatcctgacggccgctgctcaggggattggccaagcagctgccttagcttttgcaagagaaggtgccaaagtcatagccacagacattaatgagtccaaacttcaggaactggaaaagtacccgggtattcaaactcgtgtccttgatgtcacaaagaagaaacaaattgatcagtttgccaatgaagttgagagacttgatgttctctttaatgttgctggttttgtccatcatggaactgtcctggattgtgaggagaaagactgggacttctcgatgaatctcaatgtgcgcagcatgtacctgatgatcaaggcattccttcctaaaatgcttgctcagaaatctggcaatattatcaacatgtcttctgtggcttccagcgtcaaaggagttgtgaacagatgtgtgtacagcacaaccaaggcagccgtgattggcctcacaaaatctgtggctgcagatttcatccagcagggcatcaggtgcaactgtgtgtgcccaggaacagttgatacgccatctctacaagaaagaatacaagccagaggaaatcctgaagaggcacggaatgatttcctgaagagacaaaagacgggaagattcgcaactgcagaagaaatagccatgctctgcgtgtatttggcttctgatgaatctgcttatgtaactggtaaccctgtcatcattgatggaggctggagcttgtgattttaggatctccatggtgggaaggaaggcaggcccttcctatccacagtgaacctggttacgaagaaaactcaccaatcatctccttcctgttaatcacatgttaatgaaaataagctctttttaatgatgtcactgtttgcaagagtctgattctttaagtatattaatctctttgtaatctcttctgaaatcattgtaaagaaataaaaatattgaactcatagcaggag

SEQ ID NO: 3901 - protein, 245 aa, Homo sapiens; identical to SEQ ID NO: 447

SEQ ID NO: 3902 - DNA, 572 bp, Homo sapiens
gacttgcttccagacaaaggttgtctcaagtttgttgctcaaaccgagttctggagaacgccatcagctcgctgcttaaaattaaaccacaggttccattatgggtcgacttgatgggaaagtcatcatcctgacggccgctgctcaggggattggccaagcagctgccttagcttttgcaagagaaggtgccaaagtcatagccacagacattaatgagtccaaacttcaggaactggaaaagtacccgggtattcaaactcgtgtccttgatgtcacaaagaagaaacaaattgatcagtttgccaatgaagttgagagacttgatgttctctttaatgttgctgggtaattcataactttttagtttcactttccttacagaaagttttctatgactttcattcaaagaattttcataatgtggcaaaatcattcattgtgaaccatgacatattccttgggaaatatggctagattttacacagcattttcattacacataaaattcagcaggtaagacagccttagagtttgacatgatctggggcaaatgaggtctactcaagaca

SEQ ID NO: 3903 - protein, 83 aa, Homo sapiens
MGRLDGKVIILTAAAQGIGQAAALAFAREGAKVIATDINESKLQELEKYPGIQTRVLDVTKKKQIDQFANEVERLDVLFNVAG

SEQ ID NO: 3904 - DNA, 1014 bp, Homo sapiens
tacaagaagtccatccatatatgctttatctatctgtggggactccaggtttagaaaactttactttgataaaaactctggtactgtttccttatgtctacaatgaagaggtagaataaatgatctataggttcctccaggctgggagtgaggggcaatgaaaaacaaagtctataataaaccaaccaatttagagagtttgtatagggattgggataggtaggttaccagaaatgtgagaaagaacttctgtggttattacagtaaaaggaatattagaactggaaagttaagaggacatagcctctgctatcctttaagaatttaaatccagatccagaaaacttgtgtatattttcatagcaaaatactgagtcaacaagagagactacctcaccaagaaaccattaacattatatagaagagcggtgattcagaactactaaacatttattgaatgtgtaagtggcaaagtaaagactgaattgaaattaagctgcactacaacatcattaccagggatagacacataaacaaagtcatttccaaataaggaatgctggatctccagagaagtgacaaagaggagtctactgagttttgcactcaggcacatccttgcctgaggaggcgtgccaaggacctggctgagaatccacactctctgctcctgcattttgcacctctgagaaagaaaatgaaaacaacattcatcctattacaaaaatacacaaaaaccaagcacagctggaagtggaaaggaggttaagacaggagagatgtgaagaatgaaaaatggcaacgtgattcaccgtgtttggtcatgaagatggtgtatttcacctcagagttggagaagtttactccccattttgtcctaaaatgaactattagacaaaccatagttaaactgagaggtaataaagttttatttggaattcttcaatttgaaattcaaagtgaatcaaacacgggctgattgagttttcttttgtcctgtttttcaaaataaat

SEQ ID NO: 3905 - protein, 70 aa, Homo sapiens [sequence omitted]

SEQ ID NO: 3906 - DNA, 8248 bp, Homo sapiens
aaatttaaaggcggggcggcctgtgagccctgaagtgccggccgcggagggtcctggccattttcctgggaccagttcagcctgataggatggcggaggaaggagccgtggccgtctgcgtgcgagtgcggccgctgaacagcagagaagaatcacttggagaaactgcccaagtttactggaaaactgacaataatgtcatttatcaagttgatggaagtaaatccttcaattttgatcgtgtctttcatggtaatgaaactaccaaaaatgtgtatgaagaaatagcagcaccaatcatcgattctgccatacaaggctacaatggtactatatttgcctatggacagactgcttcaggaaaaacatataccatgatgggttcagaagatcatttgggagttatacccagggcaattcatgacattttccaaaaaattaagaagtttcctgatagggaatttctcttacgtgtatcttacatggaaatatacaatgaaaccattacagatttactctgtggcactcaaaaaatgaaacctttaattattcgagaagatgtcaataggaatgtgtatgttgctgatctcacagaagaagttgtatatacatcagaaatggctttgaaatggattacaaagggagaaaagagcaggcattatggagaaacaaaaatgaatcaaagaagcagtcgttctcataccatctttaggatgattttggaaagcagagagaagggtgaaccttctaattgtgaaggatctgttaaggtatcccatttgaatttggttgatcttgcaggcagtgaaagagctgctcaaacaggcgctgcaggtgtgcggctcaaggaaggctgtaatataaatcgaagcttatttattttgggacaagtgatcaagaaacttagtgatggacaagttggtggtttcataaattatcgagatagcaagttaacacgaattctccagaattccttgggaggaaatgcaaagacacgtattatctgcacaattactccagtatcttttgatgaaacacttactgctctccagtttgccagtactgctaaatatatgaagaatactccttatgttaatgaggtatcaactgatgaagctctcctgaaaaggtatagaaaagaaataatggatcttaaaaaacaattagaggaggtttctttagagacgcgggctcaggcaatggaaaaagaccaattggcccaacttttggaagaaaaagatttgcttcagaaagtacagaatgagaaaattgaaaacttaacacggatgctggtgacctcttcttccctcacgttgcaacaggaattaaaggctaaaagaaaacgaagagttacttggtgccttggcaaaattaacaaaatgaagaactcaaactatgcagatcaatttaatataccaacaaatataacaacaaaaacacataagctttctataaatttattacgagaaattgatgaatctgtctgttcagagtctgatgttttcagtaacactcttgatacattaagtgagatagaatggaatccagcaacaaagctactaaatcaggagaatatagaaagtgagttgaactcacttcgtgctgactatgataatctggtattagactatgaacaactacgaacagaaaaagaagaaatggaattgaaattaaaagaaaagaatgatttggatgaatttgaggctctagaaagaaaaactaaaaaagatcaagagaatgaactcagttcaaaagtagagctgcttagagaaaaggaagaccagattaagaagctacaggaatacatagactctcaaaagctagaaaatataaaaatggacttgtcatactcattggaaagcattgaagacccaaaacaaatgaagcagactctgtttgatgctgaaactgtagcccttgatgccaagagagaatcagcctttcttagaagtgaaaatctggagctgaaggagaaaatgaaagaacttgcaactacatacaagcaaatggaaaatgatattcagttatatcaaagccagttggaggcaaaaaagaaaatgcaagttgatctggagaaagaattacaatctgcttttaatgagataacaaaactcacctcccttatagatggcaaagttccaaaagatttgctctgtaatttggaattggaaggaaagattactgatcttcagaaagaactaaataaagaagttgaagaaaatgaagctttgcgggaagaagtcattttgctttcagaattgaaatctttaccttctgaagtagaaaggctgaggaaagagatacaagacaaatctgaagagctccatataataacatcagaaaaagataaattgttttctgaagtagttcataaggagagtagagttcaaggtttacttgaagaaattgggaaaacaaaagatgacctagcaactacacagtcgaattataaaagcactgatcaagaattccaaaatttcaaaacccttcatatggactttgagcaaaagtataagatggtccttgaggagaatgagagaatgaatcaggaaatagttaatctctctaaagaagcccaaaaatttgattcgagtttgggtgctttgaagaccgagctttcttacaagacccaagaacttcaggagaaaacacgtgaggttcaagaaagactaaatgagatggaacagctgaaggaacaattagaaaatagagattctacgctgcaaactgtagaaagggagaaaacactgattactgagaaactgcagcaaactttagaagaagtaaaaactttaactcaagaaaaagatgatctaaaacaactccaagaaagcttgcaaattgagagggaccaactcaaaagtgatattcacgatactgttaacatgaatatagatactcaagaacaattacgaaatgctcttgagtctctgaaacaacatcaagaaacaattaatacactaaaatcgaaaatttctgaggaagtttccaggaatttgcatatggaggaaaatacaggagaaactaaagatgaatttcagcaaaagatggttggcatagataaaaaacaggatttggaagctaaaaatacccaaacactaactgcagatgttaaggataatgagataattgagcaacaaaggaagatattttctttaatacaggagaaaaatgaactccaacaaatgttagagagtgttatagcagaaaaggaacaattgaagactgacctaaaggaaaatattgaaatgaccattgaaaaccaggaagaattaagacttcttggggatgaacttaaaaagcaacaagagatagttgcacaagaaaagaaccatgccataaagaaagaaggagagctttctaggacctgtgacagactggcagaagttgaagaaaaactaaaggaaaagagccagcaactccaagaaaaacagcaacaacttcttaatgtacaagaagagatgagtgagatgcagaaaaagattaatgaaatagagaatttaaagaatgaattaaagaacaaagaattgacattggaacatatggaaacagagaggcttgagttggctcagaaacttaatgaaaattatgaggaagtgaaatctataaccaaagaaagaaaagttctaaaggaattacagaagtcatttgaaacagagagagaccaccttagaggatatataagagaaattgaagctacaggcctacaaaccaaagaagaactaaaaattgctcatattcacctaaaagaacaccaagaaactattgatgaactaagaagaagcgtatctgagaagacagctcaaataataaatactcaggacttagaaaaatcccataccaaattacaagaagagatcccagtgcttcatgaggaacaagagttactgcctaatgtgaaagaagtcagtgagactcaggaaacaatgaatgaactggagttattaacagaacagtccacaaccaaggactcaacaacactggcaagaatagaaatggaaaggctcaggttgaatgaaaaatttcaagaaagtcaggaagagataaaatctctaaccaaggaaagagacaaccttaaaacgataaaagaagcccttgaagttaaacatgaccagctgaaagaacatattagagaaactttggctaaaatccaggagtctcaaagcaaacaagaacagtccttaaatatgaaagaaaaagacaatgaaactaccaaaatcgtgagtgagatggagcaattcaaacccaaagattcagcactactaaggatagaaatagaaatgctcggattgtccaaaagacttcaagaaagtcatgatgaaatgaaatctgtagctaaggagaaagatgacctacagaggctgcaagaagttcttcaatctgaaagtgaccagctcaaagaaaacataaaagaaattgtagctaaacacctggaaactgaagaggaacttaaagttgctcattgttgcctgaaagaacaagaggaaactattaatgagttaagagtgaatctttcagagaaggaaactgaaatatcaaccattcaaaagcagttagaagcaatcaatgataaattacagaacaagatccaagagatttatgagaaagaggaacaatttaatataaaacaaattagtgaggttcaggaaaaagtgaatgaactgaaacaattcaaggagcatcgcaaagccaaggattcagcactacaaagtatagaaagtaagatgctcgagttgaccaacagacttcaagaaagtcaagaagaaatacaaattatgattaaggaaaaagaggaaatgaaaagagtacaggaggcccttcagatagagagagaccaactgaaagaaaacactaaagaaattgtagctaaaatgaaagaatctcaagaaaaagaatatcagtttcttaagatgacagctgtcaatgagactcaggagaaaatgtgtgaaatagaacacttgaaggagcaatttgagacccagaagttaaacctggaaaacatagaaacggagaatataaggttgactcagatactacatgaaaaccttgaagaaatgagatctgtaacaaaagaaagagatgaccttaggagtgtggaggagactctcaaagtagagagagaccagctcaaggaaaaccttagagaaactataactagagacctagaaaaacaagaggagctaaaaattgttcacatgcatctgaaggagcaccaagaaactattgataaactaagagggattgtttcagagaaaacaaatgaaatatcaaatatgcaaaaggacttagaacactcaaatgatgccttaaaagcacaggatctgaaaatacaagaggaactaagaattgctcacatgcatctgaaagagcagcaggaaactattgacaaactcagaggaattgtttctgagaagacagataaactatcaaatatgcaaaaagatttagaaaattcaaatgctaaattacaagaaaagattcaagaacttaaggcaaatgaacatcaacttattacgttaaaaaaagatgtcaatgagacacagaaaaaagtgtctgaaatggagcaactaaagaaacaaataaaagaccaaagcttaactctgagtaaattagaaatagagaatttaaatttggctcagaaacttcatgaaaaccttgaagaaatgaaatctgtaatgaaagaaagagataatctaagaagagtagaggagacactcaaactggagagagaccaactcaaggaaagcctgcaagaaaccaaagctagagatctggaaatacaacaggaactaaaaactgctcgtatgctatcaaaagaacacaaagaaactgttgataaacttagagaaaaaatttcagaaaagacaattcaaatttcagacattcaaaaggatttagataaatcaaaagatgaattacagaaaaagcaggaccgacagaaccaccaagtaaaacctgaaaaaaggttactaagtgatggacaacagcaccttacggaaagcctgagagaaaagtgctctagaataaaagagcttttgaagagatactcagagatggatgatcattatgagtgcttgaatagattgtctcttgacttggagaaggaaattgaattccaaaaagagctttcaatgagagttaaagcaaacctctcacttccctatttacaaaccaaacacattgaaaaactttttactgcaaaccagagatgctccatggaattccacagaatcatgaagaaactgaagtatgtgttaagctatgttacaaaaataaaagaagaacaacatgaatccatcaataaatttgaaatggattttattgatgaagtggaaaagcaaaaggaattgctaattaaaatacagcaccttcaacaagattgtgatgtaccatccagagaattaagggatctcaaattgaaccagaatatggatctacatattgaggaaattctcaaagatttctcagaaagtgagttccctagcataaagactgaatttcaacaagtactaagtaataggaaagaaatgacacagtttttggaagagtggttaaatactcgttttgatatagaaaagcttaaaaatggcatccagaaagaaaatgataggatttgtcaagtgaataacttctttaataacagaataattgccataatgaatgaatcaacagagtttgaggaaagaagtgctaccatatccaaagagtgggaacaggacctgaaatcactgaaagagaaaaatgaaaaactatttaaaaactaccaaacattgaagacttccttggcatctggtgcccaggttaatcctaccacacaagacaataagaatcctcatgttacatcaagagctacacagttaaccacagagaaaattcgagagctggaaaattcactgcatgaagctaaagaaagtgctatgcataaggaaagcaagattataaagatgcagaaagaacttgaggtgactaatgacataatagcaaaacttcaagccaaagttcatgaatcaaataaatgccttgaaaaaacaaaagagacaattcaagtacttcaggacaaagttgctttaggagctaagccatataaagaagaaattgaagatctcaaaatgaagcttgtgaaaatagacctagagaaaatgaaaaatgccaaagaatttgaaaaggaaatcagtgctacaaaagccactgtagaatatcaaaaggaagttataaggctattgagagaaaatctcagaagaagtcaacaggcccaagatacctcagtgatatcagaacatactgatcctcagccttcaaataaacccttaacttgtggaggtggcagcggcattgtacaaaacacaaaagctcttattttgaaaagtgaacatataaggctagaaaaagaaatttctaagttaaagcagcaaaatgaacagctaataaaacaaaagaatgaattgttaagcaataatcagcatctttccaatgaggtcaaaacttggaaggaaagaacccttaaaagagaggctcacaaacaagtaacttgtgagaattctccaaagtctcctaaagtgactggaacagcttctaaaaagaaacaaattacaccctctcaatgcaaggaacggaatttacaagatcctgtgccaaaggaatcaccaaaatcttgtttttttgatagccgatcaaagtctttaccatcacctcatccagttcgctattttgataactcaagtttaggcctttgtccagaggtgcaaaatgcaggagcagagagtgtggattctcagccaggtccttggcacgcctcctcaggcaaggatgtgcctgagtgcaaaactcagtagactcctctttgtcacttctctggagatccagcattccttatttggaaatgactttgtttatgtgtctatccctggtaatgatgttgtagtgcagcttaatttcaattcagtctttactttgccactagagttgaaagataagggaacaggaaatgaatgcattgtggtaatttagaatggtgatagcaataccttcttcttgcatatggtaatacttttaaaagttgaattgttttatttatttgtatattttgtaaagaataaagttattgaaagaaatgtaaagttatctacatgacttagcatattccaaagcataatacatacattaatataaaacatcattttattaacaaaattgtaaatgtttttaataccttacacattcaataaatgtttagtagttctgaatcacc

SEQ ID NO: 3907 - protein, 2580 aa, Homo sapiens
MAEEGAVAVCVRVRPLNSREESLGETAQVYWKTDNNVIYQVDGSKSFNFDRVFHGNETTKNVYEEIAAPIIDSAIQGYNGTIFAYGQTASGKTYTMMGSEDHLGVIPRAIHDIFQKIKKFPDREFLLRVSYMEIYNETITDLLCGTQKMKPLIIREDVNRNVYVADLTEEVVYTSEMALKWITKGEKSRHYGETKMNQRSSRSHTIFRMILESREKGEPSNCEGSVKVSHLNLVDLAGSERAAQTGAAGVRLKEGCNINRSLFILGQVIKKLSDGQVGGFINYRDSKLTRILQNSLGGNAKTRIICTITPVSFDETLTALQFASTAKYMKNTPYVNEVSTDEALLKRYRKEIMDLKKQLEEVSLETRAQAMEKDQLAQLLEEKDLLQKVQNEKIENLTRMLVTSSSLTLQQELKAKRKRRVTWCLGKINKMKNSNYADQFNIPTNITTKTHKLSINLLREIDESVCSESDVFSNTLDTLSEIEWNPATKLLNQENIESELNSLRADYDNLVLDYEQLRTEKEEMELKLKEKNDLDEFEALERKTKKDQENELSSKVELLREKEDQIKKLQEYIDSQKLENIKMDLSYSLESIEDPKQMKQTLFDAETVALDAKRESAFLRSENLELKEKMKELATTYKQMENDIQLYQSQLEAKKKMQVDLEKELQSAFNEITKLTSLIDGKVPKDLLCNLELEGKITDLQKELNKEVEENEALREEVILLSELKSLPSEVERLRKEIQDKSEELHIITSEKDKLFSEVVHKESRVQGLLEEIGKTKDDLATTQSNYKSTDQEFQNFKTLHMDFEQKYKMVLEENERMNQEIVNLSKEAQKFDSSLGALKTELSYKTQELQEKTREVQERLNEMEQLKEQLENRDSTLQTVEREKTLITEKLQQTLEEVKTLTQEKDDLKQLQESLQIERDQLKSDIHDTVNMNIDTQEQLRNALESLKQHQETINTLKSKISEEVSRNLHMEENTGETKDEFQQKMVGIDKKQDLEAKNTQTLTADVKDNEIIEQQRKIFSLIQEKNELQQMLESVIAEKEQLKTDLKENIEMTIENQEELRLLGDELKKQQEIVAQEKNHAIKKEGELSRTCDRLAEVEEKLKEKSQQLQEKQQQLLNVQEEMSEMQKKINEIENLKNELKNKELTLEHMETERLELAQKLNENYEEVKSITKERKVLKELQKSFETERDHLRGYIREIEATGLQTKEELKIAHIHLKEHQETIDELRRSVSEKTAQIINTQDLEKSHTKLQEEIPVLHEEQELLPNVKEVSETQETMNELELLTEQSTTKDSTTLARIEMERLRLNEKFQESQEEIKSLTKERDNLKTIKEALEVKHDQLKEHIRETLAKIQESQSKQEQSLNMKEKDNETTKIVSEMEQFKPKDSALLRIEIEMLGLSKRLQESHDEMKSVAKEKDDLQRLQEVLQSESDQLKENIKEIVAKHLETEEELKVAHCCLKEQEETINELRVNLSEKETEISTIQKQLEAINDKLQNKIQEIYEKEEQFNIKQISEVQEKVNELKQFKEHRKAKDSALQSIESKMLELTNRLQESQEEIQIMIKEKEEMKRVQEALQIERDQLKENTKEIVAKMKESQEKEYQFLKMTAVNETQEKMCEIEHLKEQFETQKLNLENIETENIRLTQILHENLEEMRSVTKERDDLRSVEETLKVERDQLKENLRETITRDLEKQEELKIVHMHLKEHQETIDKLRGIVSEKTNEISNMQKDLEHSNDALKAQDLKIQEELRIAHMHLKEQQETIDKLRGIVSEKTDKLSNMQKDLENSNAKLQEKIQELKANEHQLITLKKDVNETQKKVSEMEQLKKQIKDQSLTLSKLEIENLNLAQKLHENLEEMKSVMKERDNLRRVEETLKLERDQLKESLQETKARDLEIQQELKTARMLSKEHKETVDKLREKISEKTIQISDIQKDLDKSKDELQKKQDRQNHQVKPEKRLLSDGQQHLTESLREKCSRIKELLKRYSEMDDHYECLNRLSLDLEKEIEFQKELSMRVKANLSLPYLQTKHIEKLFTANQRCSMEFHRIMKKLKYVLSYVTKIKEEQHESINKFEMDFIDEVEKQKELLIKIQHLQQDCDVPSRELRDLKLNQNMDLHIEEILKDFSESEFPSIKTEFQQVLSNRKEMTQFLEEWLNTRFDIEKLKNGIQKENDRICQVNNFFNNRIIAIMNESTEFEERSATISKEWEQDLKSLKEKNEKLFKNYQTLKTSLASGAQVNPTTQDNKNPHVTSRATQLTTEKIRELENSLHEAKESAMHKESKIIKMQKELEVTNDIIAKLQAKVHESNKCLEKTKETIQVLQDKVALGAKPYKEEIEDLKMKLVKIDLEKMKNAKEFEKEISATKATVEYQKEVIRLLRENLRRSQQAQDTSVISEHTDPQPSNKPLTCGGGSGIVQNTKALILKSEHIRLEKEISKLKQQNEQLIKQKNELLSNNQHLSNEVKTWKERTLKREAHKQVTCENSPKSPKVTGTASKKKQITPSQCKERNLQDPVPKESPKSCFFDSRSKSLPSPHPVRYFDNSSLGLCPEVQNAGAESVDSQPGPWHASSGKDVPECKTQ

SEQ ID NO: 3908 - DNA, 8505 bp, Homo sapiens
taaatttaaaggcggggcggcctgtgagccctgaagtgccggccgcggagggtcctggccattttcctgggaccagttcagcctgataggatggcggaggaaggagccgtggccgtctgcgtgcgagtgcggccgctgaacagcagagaagaatcacttggagaaactgcccaagtttactggaaaactgacaataatgtcatttatcaagttgatggaagtaaatccttcaattttgatcgtgtctttcatggtaatgaaactaccaaaaatgtgtatgaagaaatagcagcaccaatcatcgattctgccatacaaggctacaatggtactatatttgcctatggacagactgcttcaggaaaaacatataccatgatgggttcagaagatcatttgggagttatacccagggcaattcatgacattttccaaaaaattaagaagtttcctgatagggaatttctcttacgtgtatcttacatggaaatatacaatgaaaccattacagatttactctgtggcactcaaaaaatgaaacctttaattattcgagaagatgtcaataggaatgtgtatgttgctgatctcacagaagaagttgtatatacatcagaaatggctttgaaatggattacaaagggagaaaagagcaggcattatggagaaacaaaaatgaatcaaagaagcagtcgttctcataccatctttaggatgattttggaaagcagagagaagggtgaaccttctaattgtgaaggatctgttaaggtatcccatttgaatttggttgatcttgcaggcagtgaaagagctgctcaaacaggcgctgcaggtgtgcggctcaaggaaggctgtaatataaatcgaagcttatttattttgggacaagtgatcaagaaacttagtgatggacaagttggtggtttcataaattatcgagatagcaagttaacacgaattctccagaattccttgggaggaaatgcaaagacacgtattatctgcacaattactccagtatcttttgatgaaacacttactgctctccagtttgccagtactgctaaatatatgaagaatactccttatgttaatgaggtatcaactgatgaagctctcctgaaaaggtatagaaaagaaataatggatcttaaaaaacaattagaggaggtttctttagagacgcgggctcaggcaatggaaaaagaccaattggcccaacttttggaagaaaaagatttgcttcagaaagtacagaatgagaaaattgaaaacttaacacggatgctggtgacctcttcttccctcacgttgcaacaggaattaaaggctaaaagaaaacgaagagttacttggtgccttggcaaaattaacaaaatgaagaactcaaactatgcagatcaatttaatataccaacaaatataacaacaaaaacacataagctttctataaatttattacgagaaattgatgaatctgtctgttcagagtctgatgttttcagtaacactcttgatacattaagtgagatagaatggaatccagcaacaaagctactaaatcaggagaatatagaaagtgagttgaactcacttcgtgctgactatgataatctggtattagactatgaacaactacgaacagaaaaagaagaaatggaattgaaattaaaagaaaagaatgatttggatgaatttgaggctctagaaagaaaaactaaaaaagatcaagagatgcaactaattcatgaaatttcgaacttaaagaatttagttaagcatgcagaagtatataatcaagatcttgagaatgaactcagttcaaaagtagagctgcttagagaaaaggaagaccagattaagaagctacaggaatacatagactctcaaaagctagaaaatataaaaatggacttgtcatactcattggaaagcattgaagacccaaaacaaatgaagcagactctgtttgatgctgaaactgtagcccttgatgccaagagagaatcagcctttcttagaagtgaaaatctggagctgaaggagaaaatgaaagaacttgcaactacatacaagcaaatggaaaatgatattcagttatatcaaagccagttggaggcaaaaaagaaaatgcaagttgatctggagaaagaattacaatctgcttttaatgagataacaaaactcacctcccttatagatggcaaagttccaaaagatttgctctgtaatttggaattggaaggaaagattactgatcttcagaaagaactaaataaagaagttgaagaaaatgaagctttgcgggaagaagtcattttgctttcagaattgaaatctttaccttctgaagtagaaaggctgaggaaagagatacaagacaaatctgaagagctccatataataacatcagaaaaagataaattgttttctgaagtagttcataaggagagtagagttcaaggtttacttgaagaaattgggaaaacaaaagatgacctagcaactacacagtcgaattataaaagcactgatcaagaattccaaaatttcaaaacccttcatatggactttgagcaaaagtataagatggtccttgaggagaatgagagaatgaatcaggaaatagttaatctctctaaagaagcccaaaaatttgattcgagtttgggtgctttgaagaccgagctttcttacaagacccaagaacttcaggagaaaacacgtgaggttcaagaaagactaaatgagatggaacagctgaaggaacaattagaaaatagagattctacgctgcaaactgtagaaagggagaaaacactgattactgagaaactgcagcaaactttagaagaagtaaaaactttaactcaagaaaaagatgatctaaaacaactccaagaaagcttgcaaattgagagggaccaactcaaaagtgatattcacgatactgttaacatgaatatagatactcaagaacaattacgaaatgctcttgagtctctgaaacaacatcaagaaacaattaatacactaaaatcgaaaatttctgaggaagtttccaggaatttgcatatggaggaaaatacaggagaaactaaagatgaatttcagcaaaagatggttggcatagataaaaaacaggatttggaagctaaaaatacccaaacactaactgcagatgttaaggataatgagataattgagcaacaaaggaagatattttctttaatacaggagaaaaatgaactccaacaaatgttagagagtgttatagcagaaaaggaacaattgaagactgacctaaaggaaaatattgaaatgaccattgaaaaccaggaagaattaagacttcttggggatgaacttaaaaagcaacaagagatagttgcacaagaaaagaaccatgccataaagaaagaaggagagctttctaggacctgtgacagactggcagaagttgaagaaaaactaaaggaaaagagccagcaactccaagaaaaacagcaacaacttcttaatgtacaagaagagatgagtgagatgcagaaaaagattaatgaaatagagaatttaaagaatgaattaaagaacaaagaattgacattggaacatatggaaacagagaggcttgagttggctcagaaacttaatgaaaattatgaggaagtgaaatctataaccaaagaaagaaaagttctaaaggaattacagaagtcatttgaaacagagagagaccaccttagaggatatataagagaaattgaagctacaggcctacaaaccaaagaagaactaaaaattgctcatattcacctaaaagaacaccaagaaactattgatgaactaagaagaagcgtatctgagaagacagctcaaataataaatactcaggacttagaaaaatcccataccaaattacaagaagagatcccagtgcttcatgaggaacaagagttactgcctaatgtgaaagaagtcagtgagactcaggaaacaatgaatgaactggagttattaacagaacagtccacaaccaaggactcaacaacactggcaagaatagaaatggaaaggctcaggttgaatgaaaaatttcaagaaagtcaggaagagataaaatctctaaccaaggaaagagacaaccttaaaacgataaaagaagcccttgaagttaaacatgaccagctgaaagaacatattagagaaactttggctaaaatccaggagtctcaaagcaaacaagaacagtccttaaatatgaaagaaaaagacaatgaaactaccaaaatcgtgagtgagatggagcaattcaaacccaaagattcagcactactaaggatagaaatagaaatgctcggattgtccaaaagacttcaagaaagtcatgatgaaatgaaatctgtagctaaggagaaagatgacctacagaggctgcaagaagttcttcaatctgaaagtgaccagctcaaagaaaacataaaagaaattgtagctaaacacctggaaactgaagaggaacttaaagttgctcattgttgcctgaaagaacaagaggaaactattaatgagttaagagtgaatctttcagagaaggaaactgaaatatcaaccattcaaaagcagttagaagcaatcaatgataaattacagaacaagatccaagagatttatgagaaagaggaacaatttaatataaaacaaattagtgaggttcaggaaaaagtgaatgaactgaaacaattcaaggagcatcgcaaagccaaggattcagcactacaaagtatagaaagtaagatgctcgagttgaccaacagacttcaagaaagtcaagaagaaatacaaattatgattaaggaaaaagaggaaatgaaaagagtacaggaggcccttcagatagagagagaccaactgaaagaaaacactaaagaaattgtagctaaaatgaaagaatctcaagaaaaagaatatcagtttcttaagatgacagctgtcaatgagactcaggagaaaatgtgtgaaatagaacacttgaaggagcaatttgagacccagaagttaaacctggaaaacatagaaacggagaatataaggttgactcagatactacatgaaaaccttgaagaaatgagatctgtaacaaaagaaagagatgaccttaggagtgtggaggagactctcaaagtagagagagaccagctcaaggaaaaccttagagaaactataactagagacctagaaaaacaagaggagctaaaaattgttcacatgcatctgaaggagcaccaagaaactattgataaactaagagggattgtttcagagaaaacaaatgaaatatcaaatatgcaaaaggacttagaacactcaaatgatgccttaaaagcacaggatctgaaaatacaagaggaactaagaattgctcacatgcatctgaaagagcagcaggaaactattgacaaactcagaggaattgtttctgagaagacagataaactatcaaatatgcaaaaagatttagaaaattcaaatgctaaattacaagaaaagattcaagaacttaaggcaaatgaacatcaacttattacgttaaaaaaagatgtcaatgagacacagaaaaaagtgtctgaaatggagcaactaaagaaacaaataaaagaccaaagcttaactctgagtaaattagaaatagagaatttaaatttggctcagaaacttcatgaaaaccttgaagaaatgaaatctgtaatgaaagaaagagataatctaagaagagtagaggagacactcaaactggagagagaccaactcaaggaaagcctgcaagaaaccaaagctagagatctggaaatacaacaggaactaaaaactgctcgtatgctatcaaaagaacacaaagaaactgttgataaacttagagaaaaaatttcagaaaagacaattcaaatttcagacattcaaaaggatttagataaatcaaaagatgaattacagaaaaagatccaagaacttcagaaaaaagaacttcaactgcttagagtgaaagaagatgtcaatatgagtcataaaaaaattaatgaaatggaacagttgaagaagcaatttgaggcccaaaacttatctatgcaaagtgtgagaatggataacttccagttgactaagaaacttcatgaaagccttgaagaaataagaattgtagctaaagaaagagatgagctaaggaggataaaagaatctctcaaaatggaaagggaccaattcatagcaaccttaagggaaatgatagctagagaccgacagaaccaccaagtaaaacctgaaaaaaggttactaagtgatggacaacagcaccttacggaaagcctgagagaaaagtgctctagaataaaagagcttttgaagagatactcagagatggatgatcattatgagtgcttgaatagattgtctcttgacttggagaaggaaattgaattccaaaaaaatcatgaagaaactgaagtatgtgttaagctatgttacaaaaataaaagaagaacaacatgaatccatcaataaatttgaaatggattttattgatgaagtggaaaagcaaaaggaattgctaattaaaatacagcaccttcaacaagattgtgatgtaccatccagagaattaagggatctcaaattgaaccagaatatggatctacatattgaggaaattctcaaagatttctcagaaagtgagttccctagcataaagactgaatttcaacaagtactaagtaataggaaagaaatgacacagtttttggaagagtggttaaatactcgttttgatatagaaaagcttaaaaatggcatccagaaagaaaatgataggatttgtcaagtgaataacttctttaataacagaataattgccataatgaatgaatcaacagagtttgaggaaagaagtgctaccatatccaaagagtgggaacaggacctgaaatcactgaaagagaaaaatgaaaaactatttaaaaactaccaaacattgaagacttccttggcatctggtgcccaggttaatcctaccacacaagacaataagaatcctcatgttacatcaagagctacacagttaaccacagagaaaattcgagagctggaaaattcactgcatgaagctaaagaaagtgctatgcataaggaaagcaagattataaagatgcagaaagaacttgaggtgactaatgacataatagcaaaacttcaagccaaagttcatgaatcaaataaatgccttgaaaaaacaaaagagacaattcaagtacttcaggacaaagttgctttaggagctaagccatataaagaagaaattgaagatctcaaaatgaagcttgtgaaaatagacctagagaaaatgaaaaatgccaaagaatttgaaaaggaaatcagtgctacaaaagccactgtagaatatcaaaaggaagttataaggctattgagagaaaatctcagaagaagtcaacaggcccaagatacctcagtgatatcagaacatactgatcctcagccttcaaataaacccttaacttgtggaggtggcagcggcattgtacaaaacacaaaagctcttattttgaaaagtgaacatataaggctagaaaaagaaatttctaagttaaagcagcaaaatgaacagctaataaaacaaaagaatgaattgttaagcaataatcagcatctttccaatgaggtcaaaacttggaaggaaagaacccttaaaagagaggctcacaaacaagtaacttgtgagaattctccaaagtctcctaaagtgactggaacagcttctaaaaagaaacaaattacaccctctcaatgcaaggaacggaatttacaagatcctgtgccaaaggaatcaccaaaatcttgtttttttgatagccgatcaaagtctttaccatcacctcatccagttcgctattttgataactcaagtttaggcctttgtccagaggtgcaaaatgcaggagcagagagtgtggattctcagccaggtccttggcacgcctcctcaggcaaggatgtgcctgagtgcaaaactcagtagactcctctttgtcacttctctggagatccagcattccttatttggaaatgactttgtttatgtgtctatccctggtaatgatgttgtagtgcagcttaatttcaattcagtctttactttgccactagagttgaaagataagggaacaggaaatgaatgcattgtggtaatttagaatggtgatagcaataccttcttcttgcatatggtaatacttttaaaagttgaattgttttatttatttgtatattttgtaaagaataaagttattgaaagaaatgtaaagttatctacatgacttagcatattccaaagcataatacatacattaatataaaacatcattttattaacaaaattgtaaatgtttttaataccttacacattcaataaatgtttagtagttctgaatcacc

SEQ ID NO: 3909 - protein, 2152 aa, Homo sapiens
MAEEGAVAVCVRVRPLNSREESLGETAQVYWKTDNNVIYQVDGSKSFNFDRVFHGNETTKNVYEEIAAPIIDSAIQGYNGTIFAYGQTASGKTYTMMGSEDHLGVIPRAIHDIFQKIKKFPDREFLLRVSYMEIYNETITDLLCGTQKMKPLIIREDVNRNVYVADLTEEVVYTSEMALKWITKGEKSRHYGETKMNQRSSRSHTIFRMILESREKGEPSNCEGSVKVSHLNLVDLAGSERAAQTGAAGVRLKEGCNINRSLFILGQVIKKLSDGQVGGFINYRDSKLTRILQNSLGGNAKTRIICTITPVSFDETLTALQFASTAKYMKNTPYVNEVSTDEALLKRYRKEIMDLKKQLEEVSLETRAQAMEKDQLAQLLEEKDLLQKVQNEKIENLTRMLVTSSSLTLQQELKAKRKRRVTWCLGKINKMKNSNYADQFNIPTNITTKTHKLSINLLREIDESVCSESDVFSNTLDTLSEIEWNPATKLLNQENIESELNSLRADYDNLVLDYEQLRTEKEEMELKLKEKNDLDEFEALERKTKKDQEMQLIHEISNLKNLVKHAEVYNQDLENELSSKVELLREKEDQIKKLQEYIDSQKLENIKMDLSYSLESIEDPKQMKQTLFDAETVALDAKRESAFLRSENLELKEKMKELATTYKQMENDIQLYQSQLEAKKKMQVDLEKELQSAFNEITKLTSLIDGKVPKDLLCNLELEGKITDLQKELNKEVEENEALREEVILLSELKSLPSEVERLRKEIQDKSEELHIITSEKDKLFSEVVHKESRVQGLLEEIGKTKDDLATTQSNYKSTDQEFQNFKTLHMDFEQKYKMVLEENERMNQEIVNLSKEAQKFDSSLGALKTELSYKTQELQEKTREVQERLNEMEQLKEQLENRDSTLQTVEREKTLITEKLQQTLEEVKTLTQEKDDLKQLQESLQIERDQLKSDIHDTVNMNIDTQEQLRNALESLKQHQETINTLKSKISEEVSRNLHMEENTGETKDEFQQKMVGIDKKQDLEAKNTQTLTADVKDNEIIEQQRKIFSLIQEKNELQQMLESVIAEKEQLKTDLKENIEMTIENQEELRLLGDELKKQQEIVAQEKNHAIKKEGELSRTCDRLAEVEEKLKEKSQQLQEKQQQLLNVQEEMSEMQKKINEIENLKNELKNKELTLEHMETERLELAQKLNENYEEVKSITKERKVLKELQKSFETERDHLRGYIREIEATGLQTKEELKIAHIHLKEHQETIDELRRSVSEKTAQIINTQDLEKSHTKLQEEIPVLHEEQELLPNVKEVSETQETMNELELLTEQSTTKDSTTLARIEMERLRLNEKFQESQEEIKSLTKERDNLKTIKEALEVKHDQLKEHIRETLAKIQESQSKQEQSLNMKEKDNETTKIVSEMEQFKPKDSALLRIEIEMLGLSKRLQESHDEMKSVAKEKDDLQRLQEVLQSESDQLKENIKEIVAKHLETEEELKVAHCCLKEQEETINELRVNLSEKETEISTIQKQLEAINDKLQNKIQEIYEKEEQFNIKQISEVQEKVNELKQFKEHRKAKDSALQSIESKMLELTNRLQESQEEIQIMIKEKEEMKRVQEALQIERDQLKENTKEIVAKMKESQEKEYQFLKMTAVNETQEKMCEIEHLKEQFETQKLNLENIETENIRLTQILHENLEEMRSVTKERDDLRSVEETLKVERDQLKENLRETITRDLEKQEELKIVHMHLKEHQETIDKLRGIVSEKTNEISNMQKDLEHSNDALKAQDLKIQEELRIAHMHLKEQQETIDKLRGIVSEKTDKLSNMQKDLENSNAKLQEKIQELKANEHQLITLKKDVNETQKKVSEMEQLKKQIKDQSLTLSKLEIENLNLAQKLHENLEEMKSVMKERDNLRRVEETLKLERDQLKESLQETKARDLEIQQELKTARMLSKEHKETVDKLREKISEKTIQISDIQKDLDKSKDELQKKIQELQKKELQLLRVKEDVNMSHKKINEMEQLKKQFEAQNLSMQSVRMDNFQLTKKLHESLEEIRIVAKERDELRRIKESLKMERDQFIATLREMIARDRQNHQVKPEKRLLSDGQQHLTESLREKCSRIKELLKRYSEMDDHYECLNRLSLDLEKEIEFQKNHEETEVCVKLCYKNKRRTT

SEQ ID NO: 3910 - DNA, 8612 bp, Homo sapiens
taaatttaaaggcggggcggcctgtgagccctgaagtgccggccgcggagggtcctggccattttcctgggaccagttcagcctgataggatggcggaggaaggagccgtggccgtctgcgtgcgagtgcggccgctgaacagcagagaagaatcacttggagaaactgcccaagtttactggaaaactgacaataatgtcatttatcaagttgatggaagtaaatccttcaattttgatcgtgtctttcatggtaatgaaactaccaaaaatgtgtatgaagaaatagcagcaccaatcatcgattctgccatacaaggctacaatggtactatatttgcctatggacagactgcttcaggaaaaacatataccatgatgggttcagaagatcatttgggagttatacccagggcaattcatgacattttccaaaaaattaagaagtttcctgatagggaatttctcttacgtgtatcttacatggaaatatacaatgaaaccattacagatttactctgtggcactcaaaaaatgaaacctttaattattcgagaagatgtcaataggaatgtgtatgttgctgatctcacagaagaagttgtatatacatcagaaatggctttgaaatggattacaaagggagaaaagagcaggcattatggagaaacaaaaatgaatcaaagaagcagtcgttctcataccatctttaggatgattttggaaagcagagagaagggtgaaccttctaattgtgaaggatctgttaaggtatcccatttgaatttggttgatcttgcaggcagtgaaagagctgctcaaacaggcgctgcaggtgtgcggctcaaggaaggctgtaatataaatcgaagcttatttattttgggacaagtgatcaagaaacttagtgatggacaagttggtggtttcataaattatcgagatagcaagttaacacgaattctccagaattccttgggaggaaatgcaaagacacgtattatctgcacaattactccagtatcttttgatgaaacacttactgctctccagtttgccagtactgctaaatatatgaagaatactccttatgttaatgaggtatcaactgatgaagctctcctgaaaaggtatagaaaagaaataatggatcttaaaaaacaattagaggaggtttctttagagacgcgggctcaggcaatggaaaaagaccaattggcccaacttttggaagaaaaagatttgcttcagaaagtacagaatgagaaaattgaaaacttaacacggatgctggtgacctcttcttccctcacgttgcaacaggaattaaaggctaaaagaaaacgaagagttacttggtgccttggcaaaattaacaaaatgaagaactcaaactatgcagatcaatttaatataccaacaaatataacaacaaaaacacataagctttctataaatttattacgagaaattgatgaatctgtctgttcagagtctgatgttttcagtaacactcttgatacattaagtgagatagaatggaatccagcaacaaagctactaaatcaggagaatatagaaagtgagttgaactcacttcgtgctgactatgataatctggtattagactatgaacaactacgaacagaaaaagaagaaatggaattgaaattaaaagaaaagaatgatttggatgaatttgaggctctagaaagaaaaactaaaaaagatcaagagatgcaactaattcatgaaatttcgaacttaaagaatttagttaagcatgcagaagtatataatcaagatcttgagaatgaactcagttcaaaagtagagctgcttagagaaaaggaagaccagattaagaagctacaggaatacatagactctcaaaagctagaaaatataaaaatggacttgtcatactcattggaaagcattgaagacccaaaacaaatgaagcagactctgtttgatgctgaaactgtagcccttgatgccaagagagaatcagcctttcttagaagtgaaaatctggagctgaaggagaaaatgaaagaacttgcaactacatacaagcaaatggaaaatgatattcagttatatcaaagccagttggaggcaaaaaagaaaatgcaagttgatctggagaaagaattacaatctgcttttaatgagataacaaaactcacctcccttatagatggcaaagttccaaaagatttgctctgtaatttggaattggaaggaaagattactgatcttcagaaagaactaaataaagaagttgaagaaaatgaagctttgcgggaagaagtcattttgctttcagaattgaaatctttaccttctgaagtagaaaggctgaggaaagagatacaagacaaatctgaagagctccatataataacatcagaaaaagataaattgttttctgaagtagttcataaggagagtagagttcaaggtttacttgaagaaattgggaaaacaaaagatgacctagcaactacacagtcgaattataaaagcactgatcaagaattccaaaatttcaaaacccttcatatggactttgagcaaaagtataagatggtccttgaggagaatgagagaatgaatcaggaaatagttaatctctctaaagaagcccaaaaatttgattcgagtttgggtgctttgaagaccgagctttcttacaagacccaagaacttcaggagaaaacacgtgaggttcaagaaagactaaatgagatggaacagctgaaggaacaattagaaaatagagattctacgctgcaaactgtagaaagggagaaaacactgattactgagaaactgcagcaaactttagaagaagtaaaaactttaactcaagaaaaagatgatctaaaacaactccaagaaagcttgcaaattgagagggaccaactcaaaagtgatattcacgatactgttaacatgaatatagatactcaagaacaattacgaaatgctcttgagtctctgaaacaacatcaagaaacaattaatacactaaaatcgaaaatttctgaggaagtttccaggaatttgcatatggaggaaaatacaggagaaactaaagatgaatttcagcaaaagatggttggcatagataaaaaacaggatttggaagctaaaaatacccaaacactaactgcagatgttaaggataatgagataattgagcaacaaaggaagatattttctttaatacaggagaaaaatgaactccaacaaatgttagagagtgttatagcagaaaaggaacaattgaagactgacctaaaggaaaatattgaaatgaccattgaaaaccaggaagaattaagacttcttggggatgaacttaaaaagcaacaagagatagttgcacaagaaaagaaccatgccataaagaaagaaggagagctttctaggacctgtgacagactggcagaagttgaagaaaaactaaaggaaaagagccagcaactccaagaaaaacagcaacaacttcttaatgtacaagaagagatgagtgagatgcagaaaaagattaatgaaatagagaatttaaagaatgaattaaagaacaaagaattgacattggaacatatggaaacagagaggcttgagttggctcagaaacttaatgaaaattatgaggaagtgaaatctataaccaaagaaagaaaagttctaaaggaattacagaagtcatttgaaacagagagagaccaccttagaggatatataagagaaattgaagctacaggcctacaaaccaaagaagaactaaaaattgctcatattcacctaaaagaacaccaagaaactattgatgaactaagaagaagcgtatctgagaagacagctcaaataataaatactcaggacttagaaaaatcccataccaaattacaagaagagatcccagtgcttcatgaggaacaagagttactgcctaatgtgaaagaagtcagtgagactcaggaaacaatgaatgaactggagttattaacagaacagtccacaaccaaggactcaacaacactggcaagaatagaaatggaaaggctcaggttgaatgaaaaatttcaagaaagtcaggaagagataaaatctctaaccaaggaaagagacaaccttaaaacgataaaagaagcccttgaagttaaacatgaccagctgaaagaacatattagagaaactttggctaaaatccaggagtctcaaagcaaacaagaacagtccttaaatatgaaagaaaaagacaatgaaactaccaaaatcgtgagtgagatggagcaattcaaacccaaagattcagcactactaaggatagaaatagaaatgctcggattgtccaaaagacttcaagaaagtcatgatgaaatgaaatctgtagctaaggagaaagatgacctacagaggctgcaagaagttcttcaatctgaaagtgaccagctcaaagaaaacataaaagaaattgtagctaaacacctggaaactgaagaggaacttaaagttgctcattgttgcctgaaagaacaagaggaaactattaatgagttaagagtgaatctttcagagaaggaaactgaaatatcaaccattcaaaagcagttagaagcaatcaatgataaattacagaacaagatccaagagatttatgagaaagaggaacaatttaatataaaacaaattagtgaggttcaggaaaaagtgaatgaactgaaacaattcaaggagcatcgcaaagccaaggattcagcactacaaagtatagaaagtaagatgctcgagttgaccaacagacttcaagaaagtcaagaagaaatacaaattatgattaaggaaaaagaggaaatgaaaagagtacaggaggcccttcagatagagagagaccaactgaaagaaaacactaaagaaattgtagctaaaatgaaagaatctcaagaaaaagaatatcagtttcttaagatgacagctgtcaatgagactcaggagaaaatgtgtgaaatagaacacttgaaggagcaatttgagacccagaagttaaacctggaaaacatagaaacggagaatataaggttgactcagatactacatgaaaaccttgaagaaatgagatctgtaacaaaagaaagagatgaccttaggagtgtggaggagactctcaaagtagagagagaccagctcaaggaaaaccttagagaaactataactagagacctagaaaaacaagaggagctaaaaattgttcacatgcatctgaaggagcaccaagaaactattgataaactaagagggattgtttcagagaaaacaaatgaaatatcaaatatgcaaaaggacttagaacactcaaatgatgccttaaaagcacaggatctgaaaatacaagaggaactaagaattgctcacatgcatctgaaagagcagcaggaaactattgacaaactcagaggaattgtttctgagaagacagataaactatcaaatatgcaaaaagatttagaaaattcaaatgctaaattacaagaaaagattcaagaacttaaggcaaatgaacatcaacttattacgttaaaaaaagatgtcaatgagacacagaaaaaagtgtctgaaatggagcaactaaagaaacaaataaaagaccaaagcttaactctgagtaaattagaaatagagaatttaaatttggctcagaaacttcatgaaaaccttgaagaaatgaaatctgtaatgaaagaaagagataatctaagaagagtagaggagacactcaaactggagagagaccaactcaaggaaagcctgcaagaaaccaaagctagagatctggaaatacaacaggaactaaaaactgctcgtatgctatcaaaagaacacaaagaaactgttgataaacttagagaaaaaatttcagaaaagacaattcaaatttcagacattcaaaaggatttagataaatcaaaagatgaattacagaaaaagatccaagaacttcagaaaaaagaacttcaactgcttagagtgaaagaagatgtcaatatgagtcataaaaaaattaatgaaatggaacagttgaagaagcaatttgaggcccaaaacttatctatgcaaagtgtgagaatggataacttccagttgactaagaaacttcatgaaagccttgaagaaataagaattgtagctaaagaaagagatgagctaaggaggataaaagaatctctcaaaatggaaagggaccaattcatagcaaccttaagggaaatgatagctagagaccgacagaaccaccaagtaaaacctgaaaaaaggttactaagtgatggacaacagcaccttacggaaagcctgagagaaaagtgctctagaataaaagagcttttgaagagatactcagagatggatgatcattatgagtgcttgaatagattgtctcttgacttggagaaggaaattgaattccaaaaagagctttcaatgagagttaaagcaaacctctcacttccctatttacaaaccaaacacattgaaaaactttttactgcaaaccagagatgctccatggaattccacagaatcatgaagaaactgaagtatgtgttaagctatgttacaaaaataaaagaagaacaacatgaatccatcaataaatttgaaatggattttattgatgaagtggaaaagcaaaaggaattgctaattaaaatacagcaccttcaacaagattgtgatgtaccatccagagaattaagggatctcaaattgaaccagaatatggatctacatattgaggaaattctcaaagatttctcagaaagtgagttccctagcataaagactgaatttcaacaagtactaagtaataggaaagaaatgacacagtttttggaagagtggttaaatactcgttttgatatagaaaagcttaaaaatggcatccagaaagaaaatgataggatttgtcaagtgaataacttctttaataacagaataattgccataatgaatgaatcaacagagtttgaggaaagaagtgctaccatatccaaagagtgggaacaggacctgaaatcactgaaagagaaaaatgaaaaactatttaaaaactaccaaacattgaagacttccttggcatctggtgcccaggttaatcctaccacacaagacaataagaatcctcatgttacatcaagagctacacagttaaccacagagaaaattcgagagctggaaaattcactgcatgaagctaaagaaagtgctatgcataaggaaagcaagattataaagatgcagaaagaacttgaggtgactaatgacataatagcaaaacttcaagccaaagttcatgaatcaaataaatgccttgaaaaaacaaaagagacaattcaagtacttcaggacaaagttgctttaggagctaagccatataaagaagaaattgaagatctcaaaatgaagcttgtgaaaatagacctagagaaaatgaaaaatgccaaagaatttgaaaaggaaatcagtgctacaaaagccactgtagaatatcaaaaggaagttataaggctattgagagaaaatctcagaagaagtcaacaggcccaagatacctcagtgatatcagaacatactgatcctcagccttcaaataaacccttaacttgtggaggtggcagcggcattgtacaaaacacaaaagctcttattttgaaaagtgaacatataaggctagaaaaagaaatttctaagttaaagcagcaaaatgaacagctaataaaacaaaagaatgaattgttaagcaataatcagcatctttccaatgaggtcaaaacttggaaggaaagaacccttaaaagagaggctcacaaacaagtaacttgtgagaattctccaaagtctcctaaagtgactggaacagcttctaaaaagaaacaaattacaccctctcaatgcaaggaacggaatttacaagatcctgtgccaaaggaatcaccaaaatcttgtttttttgatagccgatcaaagtctttaccatcacctcatccagttcgctattttgataactcaagtttaggcctttgtccagaggtgcaaaatgcaggagcagagagtgtggattctcagccaggtccttggcacgcctcctcaggcaaggatgtgcctgagtgcaaaactcagtagactcctctttgtcacttctctggagatccagcattccttatttggaaatgactttgtttatgtgtctatccctggtaatgatgttgtagtgcagcttaatttcaattcagtctttactttgccactagagttgaaagataagggaacaggaaatgaatgcattgtggtaatttagaatggtgatagcaataccttcttcttgcatatggtaatacttttaaaagttgaattgttttatttatttgtatattttgtaaagaataaagttattgaaagaaatgtaaagttatctacatgacttagcatattccaaagcataatacatacattaatataaaacatcattttattaacaaaattgtaaatgtttttaataccttacacattcaataaatgtttagtagttctgaatcacc

SEQ ID NO: 3911 - protein, 2701 aa, Homo sapiens; identical to SEQ ID NO: 449

SEQ ID NO: 3912 - DNA, 8371 bp, Homo sapiens
taaatttaaaggcggggcggcctgtgagccctgaagtgccggccgcggagggtcctggccattttcctgggaccagttcagcctgataggatggcggaggaaggagccgtggccgtctgcgtgcgagtgcggccgctgaacagcagagaagaatcacttggagaaactgcccaagtttactggaaaactgacaataatgtcatttatcaagttgatggaagtaaatccttcaattttgatcgtgtctttcatggtaatgaaactaccaaaaatgtgtatgaagaaatagcagcaccaatcatcgattctgccatacaaggctacaatggtactatatttgcctatggacagactgcttcaggaaaaacatataccatgatgggttcagaagatcatttgggagttatacccagggcaattcatgacattttccaaaaaattaagaagtttcctgatagggaatttctcttacgtgtatcttacatggaaatatacaatgaaaccattacagatttactctgtggcactcaaaaaatgaaacctttaattattcgagaagatgtcaataggaatgtgtatgttgctgatctcacagaagaagttgtatatacatcagaaatggctttgaaatggattacaaagggagaaaagagcaggcattatggagaaacaaaaatgaatcaaagaagcagtcgttctcataccatctttaggatgattttggaaagcagagagaagggtgaaccttctaattgtgaaggatctgttaaggtatcccatttgaatttggttgatcttgcaggcagtgaaagagctgctcaaacaggcgctgcaggtgtgcggctcaaggaaggctgtaatataaatcgaagcttatttattttgggacaagtgatcaagaaacttagtgatggacaagttggtggtttcataaattatcgagatagcaagttaacacgaattctccagaattccttgggaggaaatgcaaagacacgtattatctgcacaattactccagtatcttttgatgaaacacttactgctctccagtttgccagtactgctaaatatatgaagaatactccttatgttaatgaggtatcaactgatgaagctctcctgaaaaggtatagaaaagaaataatggatcttaaaaaacaattagaggaggtttctttagagacgcgggctcaggcaatggaaaaagaccaattggcccaacttttggaagaaaaagatttgcttcagaaagtacagaatgagaaaattgaaaacttaacacggatgctggtgacctcttcttccctcacgttgcaacaggaattaaaggctaaaagaaaacgaagagttacttggtgccttggcaaaattaacaaaatgaagaactcaaactatgcagatcaatttaatataccaacaaatataacaacaaaaacacataagctttctataaatttattacgagaaattgatgaatctgtctgttcagagtctgatgttttcagtaacactcttgatacattaagtgagatagaatggaatccagcaacaaagctactaaatcaggagaatatagaaagtgagttgaactcacttcgtgctgactatgataatctggtattagactatgaacaactacgaacagaaaaagaagaaatggaattgaaattaaaagaaaagaatgatttggatgaatttgaggctctagaaagaaaaactaaaaaagatcaagagatgcaactaattcatgaaatttcgaacttaaagaatttagttaagcatgcagaagtatataatcaagatcttgagaatgaactcagttcaaaagtagagctgcttagagaaaaggaagaccagattaagaagctacaggaatacatagactctcaaaagctagaaaatataaaaatggacttgtcatactcattggaaagcattgaagacccaaaacaaatgaagcagactctgtttgatgctgaaactgtagcccttgatgccaagagagaatcagcctttcttagaagtgaaaatctggagctgaaggagaaaatgaaagaacttgcaactacatacaagcaaatggaaaatgatattcagttatatcaaagccagttggaggcaaaaaagaaaatgcaagttgatctggagaaagaattacaatctgcttttaatgagataacaaaactcacctcccttatagatggcaaagttccaaaagatttgctctgtaatttggaattggaaggaaagattactgatcttcagaaagaactaaataaagaagttgaagaaaatgaagctttgcgggaagaagtcattttgctttcagaattgaaatctttaccttctgaagtagaaaggctgaggaaagagatacaagacaaatctgaagagctccatataataacatcagaaaaagataaattgttttctgaagtagttcataaggagagtagagttcaaggtttacttgaagaaattgggaaaacaaaagatgacctagcaactacacagtcgaattataaaagcactgatcaagaattccaaaatttcaaaacccttcatatggactttgagcaaaagtataagatggtccttgaggagaatgagagaatgaatcaggaaatagttaatctctctaaagaagcccaaaaatttgattcgagtttgggtgctttgaagaccgagctttcttacaagacccaagaacttcaggagaaaacacgtgaggttcaagaaagactaaatgagatggaacagctgaaggaacaattagaaaatagagattctacgctgcaaactgtagaaagggagaaaacactgattactgagaaactgcagcaaactttagaagaagtaaaaactttaactcaagaaaaagatgatctaaaacaactccaagaaagcttgcaaattgagagggaccaactcaaaagtgatattcacgatactgttaacatgaatatagatactcaagaacaattacgaaatgctcttgagtctctgaaacaacatcaagaaacaattaatacactaaaatcgaaaatttctgaggaagtttccaggaatttgcatatggaggaaaatacaggagaaactaaagatgaatttcagcaaaagatggttggcatagataaaaaacaggatttggaagctaaaaatacccaaacactaactgcagatgttaaggataatgagataattgagcaacaaaggaagatattttctttaatacaggagaaaaatgaactccaacaaatgttagagagtgttatagcagaaaaggaacaattgaagactgacctaaaggaaaatattgaaatgaccattgaaaaccaggaagaattaagacttcttggggatgaacttaaaaagcaacaagagatagttgcacaagaaaagaaccatgccataaagaaagaaggagagctttctaggacctgtgacagactggcagaagttgaagaaaaactaaaggaaaagagccagcaactccaagaaaaacagcaacaacttcttaatgtacaagaagagatgagtgagatgcagaaaaagattaatgaaatagagaatttaaagaatgaattaaagaacaaagaattgacattggaacatatggaaacagagaggcttgagttggctcagaaacttaatgaaaattatgaggaagtgaaatctataaccaaagaaagaaaagttctaaaggaattacagaagtcatttgaaacagagagagaccaccttagaggatatataagagaaattgaagctacaggcctacaaaccaaagaagaactaaaaattgctcatattcacctaaaagaacaccaagaaactattgatgaactaagaagaagcgtatctgagaagacagctcaaataataaatactcaggacttagaaaaatcccataccaaattacaagaagagatcccagtgcttcatgaggaacaagagttactgcctaatgtgaaagaagtcagtgagactcaggaaacaatgaatgaactggagttattaacagaacagtccacaaccaaggactcaacaacactggcaagaatagaaatggaaaggctcaggttgaatgaaaaatttcaagaaagtcaggaagagataaaatctctaaccaaggaaagagacaaccttaaaacgataaaagaagcccttgaagttaaacatgaccagctgaaagaacatattagagaaactttggctaaaatccaggagtctcaaagcaaacaagaacagtccttaaatatgaaagaaaaagacaatgaaactaccaaaatcgtgagtgagatggagcaattcaaacccaaagattcagcactactaaggatagaaatagaaatgctcggattgtccaaaagacttcaagaaagtcatgatgaaatgaaatctgtagctaaggagaaagatgacctacagaggctgcaagaagttcttcaatctgaaagtgaccagctcaaagaaaacataaaagaaattgtagctaaacacctggaaactgaagaggaacttaaagttgctcattgttgcctgaaagaacaagaggaaactattaatgagttaagagtgaatctttcagagaaggaaactgaaatatcaaccattcaaaagcagttagaagcaatcaatgataaattacagaacaagatccaagagatttatgagaaagaggaacaatttaatataaaacaaattagtgaggttcaggaaaaagtgaatgaactgaaacaattcaaggagcatcgcaaagccaaggattcagcactacaaagtatagaaagtaagatgctcgagttgaccaacagacttcaagaaagtcaagaagaaatacaaattatgattaaggaaaaagaggaaatgaaaagagtacaggaggcccttcagatagagagagaccaactgaaagaaaacactaaagaaattgtagctaaaatgaaagaatctcaagaaaaagaatatcagtttcttaagatgacagctgtcaatgagactcaggagaaaatgtgtgaaatagaacacttgaaggagcaatttgagacccagaagttaaacctggaaaacatagaaacggagaatataaggttgactcagatactacatgaaaaccttgaagaaatgagatctgtaacaaaagaaagagatgaccttaggagtgtggaggagactctcaaagtagagagagaccagctcaaggaaaaccttagagaaactataactagagacctagaaaaacaagaggagctaaaaattgttcacatgcatctgaaggagcaccaagaaactattgataaactaagagggattgtttcagagaaaacaaatgaaatatcaaatatgcaaaaggacttagaacactcaaatgatgccttaaaagcacaggatctgaaaatacaagaggaactaagaattgctcacatgcatctgaaagagcagcaggaaactattgacaaactcagaggaattgtttctgagaagacagataaactatcaaatatgcaaaaagatttagaaaattcaaatgctaaattacaagaaaagattcaagaacttaaggcaaatgaacatcaacttattacgttaaaaaaagatgtcaatgagacacagaaaaaagtgtctgaaatggagcaactaaagaaacaaataaaagaccaaagcttaactctgagtaaattagaaatagagaatttaaatttggctcagaaacttcatgaaaaccttgaagaaatgaaatctgtaatgaaagaaagagataatctaagaagagtagaggagacactcaaactggagagagaccaactcaaggaaagcctgcaagaaaccaaagctagagatctggaaatacaacaggaactaaaaactgctcgtatgctatcaaaagaacacaaagaaactgttgataaacttagagaaaaaatttcagaaaagacaattcaaatttcagacattcaaaaggatttagataaatcaaaagatgaattacagaaaaagatccaagaacttcagaaaaaagaacttcaactgcttagagtgaaagaagatgtcaatatgagtcataaaaaaattaatgaaatggaacagttgaagaagcaatttgaggcccaaaacttatctatgcaaagtgtgagaatggataacttccagttgactaagaaacttcatgaaagccttgaagaaataagaattgtagctaaagaaagagatgagctaaggaggataaaagaatctctcaaaatggaaagggaccaattcatagcaaccttaagggaaatgatagctagagaccgacagaaccaccaagtaaaacctgaaaaaaggttactaagtgatggacaacagcaccttacggaaagcctgagagaaaagtgctctagaataaaagagcttttgaagagatactcagagatggatgatcattatgagtgcttgaatagattgtctcttgacttggagaaggaaattgaattccaaaaaaatcatgaagaaactgaagtatgtgttaagctatgttacaaaaataaaagaagaacaacatgaatccatcaataaatttgaaatggattttattgatgaagtggaaaagcaaaaggaattgctaattaaaatacagcaccttcaacaagattgtgatgtaccatccagagaattaagggatctcaaattgaaccagaatatggatctacatattgaggaaattctcaaagatttctcagaaagtgagttccctagcataaagactgaatttcaacaagtactaagtaataggaaagaaatgacacagtttttggaagagtggttaaatactcgttttgatatagaaaagcttaaaaatggcatccagaaagaaaatgataggatttgtcaagtgaataacttctttaataacagaataattgccataatgaatgaatcaacagagtttgaggaaagaagtgctaccatatccaaagagtgggaacaggacctgaaatcactgaaagagaaaaatgaaaaactatttaaaaactaccaaacattgaagacttccttggcatctggtgcccaggttaatcctaccacacaagacaataagaatcctcatgttacatcaagagctacacagttaaccacagagaaaattcgagagctggaaaattcactgcatgaagctaaagaaagtgctatgcataaggaaagcaagattataaagatgcagaaagaacttgaggtgactaatgacataatagcaaaacttcaagccaaagttcatgaatcaaataaatgccttgaaaaaacaaaagagacaattcaagtacttcaggacaaagttgctttaggagctaagccatataaagaagaaattgaagatctcaaaatgaagcttgtgaaaatagacctagagaaaatgaaaaatgccaaagaatttgaaaaggaaatcagtgctacaaaagccactgtagaatatcaaaaggaagttataaggctattgagagaaaatctcagaagaagtcaacaggcccaagatacctcagtgatatcagaacatactgatcctcagccttcaaataaacccttaacttgtggaggtggcagcggcattgtacaaaacacaaaagctcttattttgaaaagtgaacatataaggctagaaaaagaaatttctaagttaaagcagcaaaatgaacagctaataaaacaaaagaatgaattgttaagcaataatcagcatctttccaatgaggtcaaaacttggaaggaaagaacccttaaaagagaggctcacaaacaagtaacttgtgagaattctccaaagtctcctaaagtgactggaacagcttctaaaaagaaacaaattacaccctctcaatgcaaggaacggaatttacaagatcctgtgccaaaggaatcaccaaaatcttgtttttttgatagccgatcaaagtctttaccatcacctcatccagttcgctattttgataactcaagtttaggcctttgtccagaggtgcaaaatgcaggagcagagagtgtggattctcagccaggtccttggcacgcctcctcaggcaaggatgtgcctgagtgcaaaactcagtagactcctctttgtcacttctctggagatccagcattccttatttggaaatgactttgtttatgtgtctatccctggtaatgatgttgtagtgcagcttaatttcaattcagtctttactttgccactagagttgaaagataagggaacaggaaatgaatgcattgtggtaatttagaatggtgatagcaataccttcttcttgcatatggtaatacttttaaaagttgaattgttttatttatttgtatattttgtaaagaataaagttattgaaagaaatgt

SEQ ID NO: 3913 - protein, 2152 aa, Homo sapiens; identical to SEQ ID NO: 3909

SEQ ID NO: 3914 - DNA, 291 bp, Homo sapiens
atattattataaaccctaaatatttggaaaggggagttaattacaacaaaatagttataatgtttctataaatttattggaatttcctctaataataaagcacctggaaactgaagaggaacttaaagttgctcattgttgcctgaaagaacaagaggaaactattaatgagttaagagtgaatctttcagagaaggaaactgaaatatcaaccattcaaaagcagttagaagcaatcaatgataaattacagaacaagatccaagagatttatgagaaagaggaacaatt

SEQ ID NO: 3915 - protein, 82 aa, Homo sapiens
LQQNSYNVSINLLEFPLIIKHLETEEELKVAHCCLKEQEETINELRVNLSEKETEISTIQKQLEAINDKLQNKIQEIYEKEE

SEQ ID NO: 3916 - DNA, 834 bp, Homo sapiens
aaatttaaaggcggggcggcctgtgagccctgaagtgccggccgcggagggtcctggccattttcctgggaccagttcagcctgataggatggcggaggaaggagccgtggccgtctgcgtgcgagtgcggccgctgaacagcagagaagaatcacttggagaaactgcccaagtttactggaaaactgacaataatgtcatttatcaagttgatggaagtaaatccttcaattttgatcgtgtctttcatggtaatgaaactaccaaaaatgtgtatgaagaaatagcagcaccaatcatcgattctgccatacaaggctacaatggtactatatttgcctatggacagactgcttcaggaaaaacatataccatgatgggttcagaagatcatttgggagttatacccagggcaattcatgacattttccaaaaaattaagaagtttcctgatagggaatttctcttacgtgtatcttacatggaaatatacaatgaaaccattacagatttactctgtggcactcaaaaaatgaaacctttaattattcgagaagatgtcaataggaatgtgtatgttgctgatctcacagaagaagttgtatatacatcagaaatggctttgaaatggattacaaagggagaaaagagcaggcattatggagaaacaaaaatgaatcaaagaagcagtcgttctcataccatctttaggatggtaggtaattctatctatctgttagatctttccaagtaagaatgcactaatttttctacagcttgccttttctatctagattttggaaagcagagagaagggtgaaccttctaattgt

SEQ ID NO: 3917 - protein, 221 aa, Homo sapiens
MAEEGAVAVCVRVRPLNSREESLGETAQVYWKTDNNVIYQVDGSKSFNFDRVFHGNETTKNVYEEIAAPIIDSAIQGYNGTIFAYGQTASGKTYTMMGSEDHLGVIPRAIHDIFQKIKKFPDREFLLRVSYMEIYNETITDLLCGTQKMKPLIIREDVNRNVYVADLTEEVVYTSEMALKWITKGEKSRHYGETKMNQRSSRSHTIFRMVGNSIYLLDLSK

SEQ ID NO: 3918 - DNA, 3265 bp, Homo sapiens
atatttaactcgctgcagtgcaggaggggtaggggtggagatgcgtcgtttataaggggagctgtgacaatcttcttgccagccctcttcctcccactcggctcctcttacggagtcctcattccaccccccttgtttccgcattcatcctgagtggctggtgggaacgtgaaaagggagaggaaaaggcgcaagaagccagagagaggggtgtgggaaaagcgaaaacaggctgccaaatcaggggattccttccaatttaaaaaggaagtctgctgacgttagttagttaaatttaacatctttttatgtgtaacacttgactttggaagcaaaaatgaactttgcggagagagagggctctaagagatactgcattcaaacgaaacatgtggccattctctgtgcggtggtggtgggtgtaggattaatagtgggacttgccgtgggcttgaccagatcgtgtgactccagcggggacggcgggccgggcactgcgccagctccttcccacctgccttcttccacggccagcccctcaggtcctcctgcccaggaccaggacatctgcccggccagtgaggatgagagcggacagtggaaaaactttcgactgccggacttcgtcaacccagtccactacgacctgcacgtgaagcccctgttggaggaggacacctacacgggcaccgtgagcatctccatcaacctgagcgctcccacccggtacctgtggctgcacctccgggagaccaggatcacccggctcccggagctgaagaggccctctggggaccaggtgcaagtccggaggtgtttcgagtacaaaaagcaggagtacgtggtggtcgaggcggaggaagagcttacccccagcagtggagatggcctgtatctcctgaccatggagttcgccggctggctgaacggctccctcgtgggattttatagaaccacctacacggagaacggacaagtcaagagcatagtggccaccgatcatgaaccaacagatgccaggaaatcttttccttgttttgatgagcccaacaaaaaggcaacttatacaatatctatcacccatcccaaagaatacggagcactttcaaatatgccagtggcgtgtgacaacccctgatgaaataacatctgtttttgatggaatatcctatagcaagggatcttctattttgagaatgcttgaagactggataaaaccagagaattttcaaaaaggatgtcagatgtacttggaaaaataccaattcaagaatgcaaaaacttctgatttttgggcagcactggaagaggcaagtaggctaccagtgaaagaagtaatggacacctggaccagacagatgggttatcctgtgcttaacgtgaacggtgtcaagaacatcacacagaaacgctttttgttggacccaagagctaacccttctcagcccccttcagatcttggttatacatggaatatcccagttaaatggactgaagataatataacaagcagtgtgttatttaataggtcagaaaaagaaggaatcactttgaactcctctaatcctagtggaaatgcttttctcaaaataaacccagatcatattgggttttatcgtgtaaattatgaagtagcaacttgggactcgatagctacagcgctctccttgaaccacaagacattttcttcagcagatcgtgcaagtcttattgatgatgcttttgccttggcaagagctcaacttctagattataaggtggctttgaacttgaccaagtatctcaaaagggaagagaattttttaccatggcagagagtaatttcagctgtaacctacatcattagcatgtttgaagatgataaagagctatatcctatgattgaggaatacttccaaggtcaagtgaagcctattgcagattctctgggatggaatgatgctggagaccatgtcacaaagttactccgttcctccgtgttagggtttgcgtgcaagatgggagacagagaagccttgaacaatgcttcctcgttatttgagcagtggctaaatgggactgtaagccttcccgtaaatctcaggcttctggtgtatcggtatgggatgcagaactctggcaatgagatttcatggaactacactcttgagcaataccagaaaacttcattagctcaagaaaaagaaaaactgctgtatggattagcatcagtgaagaacgttactcttttgtcaaggtatttggatttgctcaaggacacgaaccttattaaaactcaggatgtgtttacagtcattcgatatatctcatataacagctatgggaagaacatggcctggaattggatacaactcaactgggactatctagtcaacagatatacactcaataacagaaaccttggccgaattgtcacaatagcagagccattcaacactgaactgcaactgtggcagatggagagcttttttgcaaaatatccacaagctggagcaggagaaaaacctagggaacaagtgctggaaacagtgaaaaacaatatagagtggctaaaacaacatagaaacaccatcagagaatggttttttaatttacttgagagtggttaatgtattcaaatgttagagtttaattttgtgaatctattgtttctcctctgaagcatttggtggcctaatttacaagcacgatggagagagccttataaacagataatgcttttactaagcactgtgtttatatgtcttgcaaagcctttaaattgttcctctttgtttatgaagaaagatactaatagagtacttaatatactcagggattccttctaagtgtacttcataagatattctttacaaactgaagataatgaaatagttattttaatacctttaaatatcattctttgtatcttaaatctgtgaagtagaacaatttggtcttagctttacattttcagtaccaaagaaacaccacttaatcttctctcttgattgatttttaaagtttaaataccagtacttgagggaccaatattaccatcttaatctttattttattattcagaattatacagacctaatatcattttattcacatatgtcttactactttaaatcctaccaaagtaacctgggcttaagttttacttgaggatcatatgaattagccaaaagaatggctgactgttgcctttgctcttataaaatcaataagagaactctcctctttttttaaaaataaatctaaatgattatcttgaaaaagt

SEQ ID NO: 3919 - protein, 535 aa, Homo sapiens
MNQQMPGNLFLVLMSPTKRQLIQYLSPIPKNTEHFQICQWRVTTPDEITSVFDGISYSKGSSILRMLEDWIKPENFQKGCQMYLEKYQFKNAKTSDFWAALEEASRLPVKEVMDTWTRQMGYPVLNVNGVKNITQKRFLLDPRANPSQPPSDLGYTWNIPVKWTEDNITSSVLFNRSEKEGITLNSSNPSGNAFLKINPDHIGFYRVNYEVATWDSIATALSLNHKTFSSADRASLIDDAFALARAQLLDYKVALNLTKYLKREENFLPWQRVISAVTYIISMFEDDKELYPMIEEYFQGQVKPIADSLGWNDAGDHVTKLLRSSVLGFACKMGDREALNNASSLFEQWLNGTVSLPVNLRLLVYRYGMQNSGNEISWNYTLEQYQKTSLAQEKEKLLYGLASVKNVTLLSRYLDLLKDTNLIKTQDVFTVIRYISYNSYGKNMAWNWIQLNWDYLVNRYTLNNRNLGRIVTIAEPFNTELQLWQMESFFAKYPQAGAGEKPREQVLETVKNNIEWLKQHRNTIREWFFNLLESG

SEQ ID NO: 3920 - DNA, 3867 bp, Homo sapiens
atatttaactcgctgcagtgcaggaggggtaggggtggagatgcgtcgtttataaggggagctgtgacaatcttcttgccagccctcttcctcccactcggctcctcttacggagtcctcattccaccccccttgtttccgcattcatcctgagtggctggtgggaacgtgaaaagggagaggaaaaggcgcaagaagccagagagaggggtgtgggaaaagcgaaaacaggctgccaaatcaggggattccttccaatttaaaaaggaagtctgctgacgttagttagttaaatttaacatctttttatgtgtaacacttgactttggaagcaaaaatgaactttgcggagagagagggctctaagagatactgcattcaaacgaaacatgtggccattctctgtgcggtggtggtgggtgtaggattaatagtgggacttgccgtgggcttgaccagatcgtgtgactccagcggggacggcgggccgggcactgcgccagctccttcccacctgccttcttccacggccagcccctcaggtcctcctgcccaggaccaggacatctgcccggccagtgaggatgagagcggacagtggaaaaactttcgactgccggacttcgtcaacccagtccactacgacctgcacgtgaagcccctgttggaggaggacacctacacgggcaccgtgagcatctccatcaacctgagcgctcccacccggtacctgtggctgcacctccgggagaccaggatcacccggctcccggagctgaagaggccctctggggaccaggtgcaagtccggaggtgtttcgagtacaaaaagcaggagtacgtggtggtcgaggcggaggaagagcttacccccagcagtggagatggcctgtatctcctgaccatggagttcgccggctggctgaacggctccctcgtgggattttatagaaccacctacacggagaacggacaagtcaagagcatagtggccaccgatcatgaaccaacagatgccaggaaatcttttccttgttttgatgagcccaacaaaaaggcaacttatacaatatctatcacccatcccaaagaatacggagcactttcaaatatgccagtggcgaaagaagagtcagtggatgataaatggactcgaacaacttttgagaagtctgtccccatgagcacgtacctggtgtgctttgctgtacatcaatttgactctgtaaagagaatatcaaatagtggaaaacctcttacaatttatgtccagccagagcaaaagcacacagccgaatatgctgcaaacataactaaaagtgtgtttgattattttgaagaatactttgctatgaattattctcttcctaaattagataaaatcgctattccagattttggcactggtgccatggagaactggggactcatcacgtacagagaaacgaacctgctttatgaccctaaggaatcagcctcatcaaaccaacagagggtggccactgtggttgcccatgaacttgtgcatcagtggtttggaaatattgtgaccatggactggtgggaagacttgtggctaaatgaaggatttgcttctttctttgagtttctgggagtaaaccatgcagaaacagactggcaaatgcgtgaccaaatgttacttgaagatgtattacctgttcaagaggatgattctttgatgtcttcgcatccaattattgtgactgtgacaacccctgatgaaataacatctgtttttgatggaatatcctatagcaagggatcttctattttgagaatgcttgaagactggataaaaccagagaattttcaaaaaggatgtcagatgtacttggaaaaataccaattcaagaatgcaaaaacttctgatttttgggcagcactggaagaggcaagtaggctaccagtgaaagaagtaatggacacctggaccagacagatgggttatcctgtgcttaacgtgaacggtgtcaagaacatcacacagaaacgctttttgttggacccaagagctaacccttctcagcccccttcagatcttggttatacatggaatatcccagttaaatggactgaagataatataacaagcagtgtgttatttaataggtcagaaaaagaaggaatcactttgaactcctctaatcctagtggaaatgcttttctcaaaataaacccagatcatattgggttttatcgtgtaaattatgaagtagcaacttgggactcgatagctacagcgctctccttgaaccacaagacattttcttcagcagatcgtgcaagtcttattgatgatgcttttgccttggcaagagctcaacttctagattataaggtggctttgaacttgaccaagtatctcaaaagggaagagaattttttaccatggcagagagtaatttcagctgtaacctacatcattagcatgtttgaagatgataaagagctatatcctatgattgaggaatacttccaaggtcaagtgaagcctattgcagattctctgggatggaatgatgctggagaccatgtcacaaagttactccgttcctccgtgttagggtttgcgtgcaagatgggagacagagaagccttgaacaatgcttcctcgttatttgagcagtggctaaatgggactgtaagccttcccgtaaatctcaggcttctggtgtatcggtatgggatgcagaactctggcaatgagatttcatggaactacactcttgagcaataccagaaaacttcattagctcaagaaaaagaaaaactgctgtatggattagcatcagtgaagaacgttactcttttgtcaaggtatttggatttgctcaaggacacgaaccttattaaaactcaggatgtgtttacagtcattcgatatatctcatataacagctatgggaagaacatggcctggaattggatacaactcaactgggactatctagtcaacagatatacactcaataacagaaaccttggccgaattgtcacaatagcagagccattcaacactgaactgcaactgtggcagatggagagcttttttgcaaaatatccacaagctggagcaggagaaaaacctagggaacaagtgctggaaacagtgaaaaacaatatagagtggctaaaacaacatagaaacaccatcagagaatggttttttaatttacttgagagtggttaatgtattcaaatgttagagtttaattttgtgaatctattgtttctcctctgaagcatttggtggcctaatttacaagcacgatggagagagccttataaacagataatgcttttactaagcactgtgtttatatgtcttgcaaagcctttaaattgttcctctttgtttatgaagaaagatactaatagagtacttaatatactcagggattccttctaagtgtacttcataagatattctttacaaactgaagataatgaaatagttattttaatacctttaaatatcattctttgtatcttaaatctgtgaagtagaacaatttggtcttagctttacattttcagtaccaaagaaacaccacttaatcttctctcttgattgatttttaaagtttaaataccagtacttgagggaccaatattaccatcttaatctttattttattattcagaattatacagacctaatatcattttattcacatatgtcttactactttaaatcctaccaaagtaacctgggcttaagttttacttgaggatcatatgaattagccaaaagaatggctgactgttgcctttgctcttataaaatcaataagagaactctcctctttttttaaaaataaatctaaatgattatcttgaaaaagt

SEQ ID NO: 3921 - protein, 957 aa, Homo sapiens; identical to SEQ ID NO: 451

SEQ ID NO: 3922 - DNA, 3953 bp, Homo sapiens
atatttaactcgctgcagtgcaggaggggtaggggtggagatgcgtcgtttataaggggagctgtgacaatcttcttgccagccctcttcctcccactcggctcctcttacggagtcctcattccaccccccttgtttccgcattcatcctgagtggctggtgggaacgtgaaaagggagaggaaaaggcgcaagaagccagagagaggggtgtgggaaaagcgaaaacaggctgccaaatcaggggattccttccaatttaaaaaggaagtctgctgacgttagttagttaaatttaacatctttttatgtgtaacacttgactttggaagcaaaaatgaactttgcggagagagagggctctaagagatactgcattcaaacgaaacatgtggccattctctgtgcggtggtggtgggtgtaggattaatagtgggacttgccgtgggcttgaccagatcgtgtgactccagcggggacggcgggccgggcactgcgccagctccttcccacctgccttcttccacggccagcccctcaggtcctcctgcccaggaccaggacatctgcccggccagtgaggatgagagcggacagtggaaaaactttcgactgccggacttcgtcaacccagtccactacgacctgcacgtgaagcccctgttggaggaggacacctacacgggcaccgtgagcatctccatcaacctgagcgctcccacccggtacctgtggctgcacctccgggagaccaggatcacccggctcccggagctgaagaggccctctggggaccaggtgcaagtccggaggtgtttcgagtacaaaaagcaggagtacgtggtggtcgaggcggaggaagagcttacccccagcagtggagatggcctgtatctcctgaccatggagttcgccggctggctgaacggctccctcgtgggattttatagaaccacctacacggagaacggacaagtcaagagcatagtggccaccgatcatgaaccaacagatgccaggaaatcttttccttgttttgatgagcccaacaaaaaggcaacttatacaatatctatcacccatcccaaagaatacggagcactttcaaatatgccagtggcgaaagaagagtcagtggatgataaatggactcgaacaacttttgagaagtctgtccccatgagcacgtacctggtgtgctttgctgtacatcaatttgactctgtaaagagaatatcaaatagtggaaaacctcttacaatttatgtccagccagagcaaaagcacacagccgaatatgctgcaaacataactaaaagtgtgtttgattattttgaagaatactttgctatgaattattctcttcctaaattagataaaatcgctattccagattttggcactggtgccatggagaactggggactcatcacgtacagagaaacgaacctgctttatgaccctaaggaatcagcctcatcaaaccaacagagggtggccactgtggttgcccatgaacttgtgcatcagtggtttggaaatattgtgaccatggactggtgggaagacttgtggctaaatgaaggatttgcttctttctttgagtttctgggagtaaaccatgcagaaacagactggcaaatgcgtgaccaaatgttacttgaagatgtattacctgttcaagaggatgattctttgatgtcttcgcatccaattattgtgactgtgacaacccctgatgaaataacatctgtttttgatggaatatcctatagcaagggatcttctattttgagaatgcttgaagactggataaaaccagagaattttcaaaaaggatgtcagatgtacttggaaaaataccaattcaagaatgcaaaaacttctgatttttgggcagcactggaagaggcaagtaggctaccagtgaaagaagtaatggacacctggaccagacagatgggttatcctgtgcttaacgtgaacggtgtcaagaacatcacacagaaacgctttttgttggacccaagagctaacccttctcagcccccttcagatcttggttatacatggaatatcccagttaaatggactgaagataatataacaagcagtgtgttatttaataggtcagaaaaagaaggaatcactttgaactcctctaatcctagtggaaatgcttttctcaaaataaacccagatcatattgggttttatcgtgtaaattatgaagtagcaacttgggactcgatagctacagcgctctccttgaaccacaagacattttcttcagcagatcgtgcaagtcttattgatgatgcttttgccttggcaagagctcaacttctagattataaggtggctttgaacttgaccaagtatctcaaaagggaagagaattttttaccatggcagagagtaatttcagctgtaacctacatcattagcatgtttgaagatgataaagagctatatcctatgattgaggaatacttccaaggtcaagtgaagcctattgcagattctctgggatggaatgatgctggagaccatgtcacaaagttactccgttcctccgtgttagggtttgcgtgcaagatgggagacagagaagccttgaacaatgcttcctcgttatttgagcagtggctaaatgggactgtaagccttcccgtaaatctcaggcttctggtgtatcggtatgggatgcagaactctggcaatgagatttcatggaactacactcttgagcaataccagaaaacttcattagctcaagaaaaagaaaaactgctgtatggattagcatcagtgaagaacgttactcttttgtcaaggtatttggatttgctcaaggacacgaaccttattaaaactcaggatgtgtttacagtcattcgatatatctcatataacagctatgggaagaacatggcctggaattggatacaactcaactgggactatctagtcaacagatatacactcaataacagaaaccttggccgaattgtcacaatagcagagccattcaacactgaactgcaactgtggcagatggagagcttttttgcaaaatatccacaagctggagcaggagaaaaacctagggaacaagtgctggaaacagtgaaaaacaatatagagtggctaaaacaacatagaaacaccatcagagaatggttttttaatttacttgagagtggttaatgtattcaaatgttagagtttaattttgtgaatctattgtttctcctctgaagcatttggtggcctaatttacaagcacgatggagagagccttataaacagataatgcttttactaagcactgtgtttatatgtcttgcaaagcctttaaattgttcctctttgtttatgaagaaagatactaatagagtacttaatatactcagggattccttctaagtgtacttcataagatattctttacaaactgaagataatgaaatagttattttaatacctttaaatatcattctttgtatcttaaatctgtgaagtagaacaatttggtcttagctttacattttcagtaccaaagaaacaccacttaatcttctctcttgattgatttttaaagtttaaataccagtacttgagggaccaatattaccatcttaatctttattttattattcagaattatacagacctaatatcattttattcacatatgtcttactactttaaatcctaccaaagtaacctgggcttaagttttacttgaggatcatatgaattagccaaaagaatggctgactgttgcctttgctcttataaaatcaataagagaactctcctctttttttaaaaataaatctaaatgattatcttgaaaaagtattgttttccagtgtcacttgactcttgaataaaaataactgcagtgttccccaaataatttaacacattgcaaatatgattcaag

SEQ ID NO: 3923 - protein, 957 aa, Homo sapiens; identical to SEQ ID NO: 451

SEQ ID NO: 3924 - DNA, 4992 bp, Homo sapiens
atatttaactcgctgcagtgcaggaggggtaggggtggagatgcgtcgtttataaggggagctgtgacaatcttcttgccagccctcttcctcccactcggctcctcttacggagtcctcattccaccccccttgtttccgcattcatcctgagtggctggtgggaacgtgaaaagggagaggaaaaggcgcaagaagccagagagaggggtgtgggaaaagcgaaaacaggctgccaaatcaggggattccttccaatttaaaaaggaagtctgctgacgttagttagttaaatttaacatctttttatgtgtaacacttgactttggaagcaaaaatgaactttgcggagagagagggctctaagagatactgcattcaaacgaaacatgtggccattctctgtgcggtggtggtgggtgtaggattaatagtgggacttgccgtgggcttgaccagatcgtgtgactccagcggggacggcgggccgggcactgcgccagctccttcccacctgccttcttccacggccagcccctcaggtcctcctgcccaggaccaggacatctgcccggccagtgaggatgagagcggacagtggaaaaactttcgactgccggacttcgtcaacccagtccactacgacctgcacgtgaagcccctgttggaggaggacacctacacgggcaccgtgagcatctccatcaacctgagcgctcccacccggtacctgtggctgcacctccgggagaccaggatcacccggctcccggagctgaagaggccctctggggaccaggtgcaagtccggaggtgtttcgagtacaaaaagcaggagtacgtggtggtcgaggcggaggaagagcttacccccagcagtggagatggcctgtatctcctgaccatggagttcgccggctggctgaacggctccctcgtgggattttatagaaccacctacacggagaacggacaagtcaagagcatagtggccaccgatcatgaaccaacagatgccaggaaatcttttccttgttttgatgagcccaacaaaaaggcaacttatacaatatctatcacccatcccaaagaatacggagcactttcaaatatgccagtggcgaaagaagagtcagtggatgataaatggactcgaacaacttttgagaagtctgtccccatgagcacgtacctggtgtgctttgctgtacatcaatttgactctgtaaagagaatatcaaatagtggaaaacctcttacaatttatgtccagccagagcaaaagcacacagccgaatatgctgcaaacataactaaaagtgtgtttgattattttgaagaatactttgctatgaattattctcttcctaaattagataaaatcgctattccagattttggcactggtgccatggagaactggggactcatcacgtacagagaaacgaacctgctttatgaccctaaggaatcagcctcatcaaaccaacagagggtggccactgtggttgcccatgaacttgtgcatcagtggtttggaaatattgtgaccatggactggtgggaagacttgtggctaaatgaaggatttgcttctttctttgagtttctgggagtaaaccatgcagaaacagactggcaaatgcgtgaccaaatgttacttgaagatgtattacctgttcaagaggatgattctttgatgtcttcgcatccaattattgtgactgtgacaacccctgatgaaataacatctgtttttgatggaatatcctatagcaagggatcttctattttgagaatgcttgaagactggataaaaccagagaattttcaaaaaggatgtcagatgtacttggaaaaataccaattcaagaatgcaaaaacttctgatttttgggcagcactggaagaggcaagtaggctaccagtgaaagaagtaatggacacctggaccagacagatgggttatcctgtgcttaacgtgaacggtgtcaagaacatcacacagaaacgctttttgttggacccaagagctaacccttctcagcccccttcagatcttggttatacatggaatatcccagttaaatggactgaagataatataacaagcagtgtgttatttaataggtcagaaaaagaaggaatcactttgaactcctctaatcctagtggaaatgcttttctcaaaataaacccagatcatattgggttttatcgtgtaaattatgaagtagcaacttgggactcgatagctacagcgctctccttgaaccacaagacattttcttcagcagatcgtgcaagtcttattgatgatgcttttgccttggcaagagctcaacttctagattataaggtggctttgaacttgaccaagtatctcaaaagggaagagaattttttaccatggcagagagtaatttcagctgtaacctacatcattagcatgtttgaagatgataaagagctatatcctatgattgaggaatacttccaaggtcaagtgaagcctattgcagattctctgggatggaatgatgctggagaccatgtcacaaagttactccgttcctccgtgttagggtttgcgtgcaagatgggagacagagaagccttgaacaatgcttcctcgttatttgagcagtggctaaatgggactgtaagccttcccgtaaatctcaggcttctggtgtatcggtatgggatgcagaactctggcaatgagatttcatggaactacactcttgagcaataccagaaaacttcattagctcaagaaaaagaaaaactgctgtatggattagcatcagtgaagaacgttactcttttgtcaaggtatttggatttgctcaaggacacgaaccttattaaaactcaggatgtgtttacagtcattcgatatatctcatataacagctatgggaagaacatggcctggaattggatacaactcaactgggactatctagtcaacagatatacactcaataacagaaaccttggccgaattgtcacaatagcagagccattcaacactgaactgcaactgtggcagatggagagcttttttgcaaaatatccacaagctggagcaggagaaaaacctagggaacaagtgctggaaacagtgaaaaacaatatagagtggctaaaacaacatagaaacaccatcagagaatggttttttaatttacttgagagtggttaatgtattcaaatgttagagtttaattttgtgaatctattgtttctcctctgaagcatttggtggcctaatttacaagcacgatggagagagccttataaacagataatgcttttactaagcactgtgtttatatgtcttgcaaagcctttaaattgttcctctttgtttatgaagaaagatactaatagagtacttaatatactcagggattccttctaagtgtacttcataagatattctttacaaactgaagataatgaaatagttattttaatacctttaaatatcattctttgtatcttaaatctgtgaagtagaacaatttggtcttagctttacattttcagtaccaaagaaacaccacttaatcttctctcttgattgatttttaaagtttaaataccagtacttgagggaccaatattaccatcttaatctttattttattattcagaattatacagacctaatatcattttattcacatatgtcttactactttaaatcctaccaaagtaacctgggcttaagttttacttgaggatcatatgaattagccaaaagaatggctgactgttgcctttgctcttataaaatcaataagagaactctcctctttttttaaaaataaatctaaatgattatcttgaaaaagtattgttttccagtgtcacttgactcttgaataaaaataactgcagtgttccccaaataatttaacacattgcaaatatgattcaagaatctggcctttttcatgcttggtactctcttctcttgctccattccttacaaagctccttcaaatatgctatgaaattagagggaacatagtgcttaactctgctccatggattttagaggaaaaaagctaaataattggaaactgttcaggaaagagagaaggcagattatttcttaaaactaaatggaattagaatttagctttgacctcacctagcaatctaagtgtgaaaatggggagacctgtgggcatccccagcatgactctgcatatctgagcatatatctccttatagatcaattttatgtataaacccttagatcctaatccatacagaatagcactgatcaaatttaaatgcatgacttgattaaagacatcaatttcatagaagctggtggcaagaatatgtttaatatggcacttgatacctcctagatccataatgtaagtccaataggcagaaaagatggtaagttactatgtttcaatctgctatatctagaaaatctaaatttatttggaactttcaaaaatgtaaggtaatttagaatcggcttgatgagaattgaagcatatggaaacaaaaccttagctttaactttatttatacaataatgtgccctaatcatgtactctgaaactttataaactttcctgttgctgtttcttaattatcacttctcaatccgtacagccaaactagtaaattcaaatgtagactgggttgtgggtggcagatatagaagaagaaatttccagaccaaaaaatattaaatattattttaaattatttcagaagcaaaaacatattaacatcataacttaccagaaaaaccccactatcctcataagattaacttaaaattctgaccacaatcagaaccagcacttgaagtctatgtattgtttcaagtaggacatattatgaggtgagatggtttatccttctgttttatgaaattaatacattttaaaagaaaaatgttagtttaagggggtggtaaataaaacagatttcaacttgcctacaaga

SEQ ID NO: 3925 - protein, 957 aa, Homo sapiens; identical to SEQ ID NO: 451

SEQ ID NO: 3926 - DNA, 875 bp, Homo sapiens
ttctgggagaagacaaccgtcatatcatgtcatgaagatactcatgcagtcctatggagaatttcattggatattccatcaaaaacagatgttatttcatcaggggttgtcacagtcacaataattggatgcgaagacatcaaagaatcatcctcttgaacagatgacaggccgagaagacatcaacttctgtgaattctgcttctgcgacttctgtgtgacttttggatatgtgccaaacttttcaagccctatttctatatctgtgcaatgagaatgatgacatcactccacagatttggtctaagaattaagagaggttgcatatcaatttgccaaatattgatgttcaggtttttctaatattaacttgttattggaatttggatacttcataattaatgaaagaaaatattggcagtttatcctttagttctaatcacctctcgtttccctcctaggtcttgtcagcaatacagactggttgacaggcctagcagtactgtcagatttccttggttcaaagctcagtctttttactttctagatatataagtttaagcaagtttcctcacccattaaatagaagtaattatggcctgtactttttggaactgtgcacaggactcagtgataaaattcatggttagtacttggcatagtacctggcacagaatgagaacctaacccattagctgctatagttattttgactcttaagcagtaagattctgaaatctaactctgctaaatcactactaactttaaaaatttcattggctctacttaattaaaaatatttccaaaacaggagtatgttgtattggcttacattttccaattatgcgggtttcatttataacaggaaaggtact

SEQ ID NO: 3927 - protein, 37 aa, Homo sapiens [sequence omitted]

SEQ ID NO: 3928 - DNA, 579 bp, Homo sapiens
cactttttaacaactaaaattcatttaacatttgttttttgttttaagacttgttgaaaagtgcttaaggccctggatttgtgtttgtttgttttttaaggttactccgttcctccgtgttagggtttgcgtgcaagatgggagacagagaagccttgaacaatgcttcctcgttatttgagcagtggctaaatgggactgtaagccttcccgtaaatctcaggcttctggtgtatcggtatgggatgcagaactctggcaatgagatttcatggaactacactcttgagcaataccagaaaacttcattagctcaagaaaaagaaaaactgctgtatggattagcatcagtgaagaacgttactcttttgtcaaggtatttggatttgctcaaggacacgaaccttattaaaactcaggatgtgtttacagtcattcgatatatctcatataacagctatgggaagaacatggcctggaattggatacaactcaactgggactatctagtcaacaggtgggatgatctgatgatggtctgctgttttctttgtttcatactatctactggttccttca

SEQ ID NO: 3929 - protein, 146 aa, Homo sapiens
MGDREALNNASSLFEQWLNGTVSLPVNLRLLVYRYGMQNSGNEISWNYTLEQYQKTSLAQEKEKLLYGLASVKNVTLLSRYLDLLKDTNLIKTQDVFTVIRYISYNSYGKNMAWNWIQLNWDYLVNRWDDLMMVCCFLCFILSTGS

SEQ ID NO: 3930 - DNA, 670 bp, Homo sapiens
aagttgttagcgtgcttctgctctgtgaggccaggccagtatcctgtctgcatggctgaagacgaatcactgatatacactcaataacagaaaccttggccgaattgtcacaatagcagagccattcaacactgaactgcaactgtggcagatggagagcttttttgcaaaatatccacaagctggagcaggagaaaaacctagggaacaagtgctggaaacagtgaaaaacaatatagagtggctaaaacaacatagaaacaccatcagagaatgaagcaaaaacatattaacatcataacttaccagaaaaaccccactatcctcataagattaacttaaaattctgaccacaatcagaaccagcacttgaagtctatgtattgtttcaagtaggacatattatgaggcagaaacgtccagagccagcacttggtttgccatgttctccgtgtttcttctgctcctagatgcagcagtattccagatagaggccgcactatgagcctgaattccaggataaaaacaacatggaatagaacttagccagcacagagtacacatgtgctgtaaatgagaaatacccctttgttattgtaaatcactgagattttgaggttgtctgttactgcagcataatctagcctaatataaacaccaaactaatata

SEQ ID NO: 3931 - protein, 41 aa, Homo sapiens
MESFFAKYPQAGAGEKPREQVLETVKNNIEWLKQHRNTIRE

SEQ ID NO: 3932 - DNA, 447 bp, Homo sapiens
cccatccagcgagagaaacctagctcccagagccggtgcagtcagtcccctcgcccctcccgcccctgcacgggtccccctctagccgtcgctgcaaccaccacctcggttccactcaaccgatttttgctgcatgtcaacacttattaccgatcactcattctgggagaagacaaccgtcatatcatgtcatgaagatactcatgcagtcctatggagaatttcattggtaagaaactgagctagaatgaacttgacagccttgtgagagagccatcttagaagcagaccttcagcctcagacagctttcagaggattgtagccccagctgaaacatcaaccacaatctcatgagagacactgaaccagaatcacccagccaagctgttcccaaattcctgagccatagaaactgtgtgagataataaatgtttattgttgttctc

SEQ ID NO: 3933 - protein, 35 aa, Homo sapiens
MSTLITDHSFWEKTTVISCHEDTHAVLWRISLVRN

SEQ ID NO: 3934 - DNA, 2758 bp, Homo sapiens
cgcgcaccctcctccggcgccaggcagcccagctcttccacggcttctgccgccggtccagttggcgtccgcgttgcaggtgggcatgctgacgggaaagtgtgtgtgtttcgttttcagagaaagataaaagccagcaggggaagaatgaggacgtgggcgccgaggacccgtctaagaagaagcggcaaaggcggcagcggactcactttaccagccagcagctccaggagctggaggccactttccagaggaaccgctacccggacatgtccacacgcgaagaaatcgctgtgtggaccaaccttacggaagcccgagtccgggtaggagccagcacggagtctgggagggatggggggaggatgttgtggaggtacaggccaagtagaccaggagagaatgtggaaggcagcgccgcctgggagggcgccggtggggcgcagctttgcaaaggcagaaggcctcgcggcggcctggttgcgagattacagttccctctccgaggccgacaggactgccgccctggctcaggctcccagagcggcaccggctcactgccccgccatcccgcgatctcacgagctgggctgcatgggcaatcccctgcacaggacattgtgttcctggcttgcagttgccagagcagagctaataaaatccctaccaggccaagagccgcgaacaggctccaacctgtgagcctttaacaaggaaaacccgccagagacacggaagagttggccctccctgggaaacctttgtcccggccctggcccagctttttccctcctgggctcgcgcttcttacaccttctttacggttgtttcggccattcaggtctctcccacacaccctatttcctagttttgtgatctccgggagcaaagttttaatacacaactactagtcctcttagaaggagaaagaaaaaaagaagaaagacttttctgcttggtttatttatcttctctcaggagttgaactctggaaattgaaactcacaccccctcttctaaattataatcatagttttgtaaaaagggcttaccttaactttgtagcaaatctgtactttatggattggcaaaaatgagctcaaataaataacccaatagcaacgtcctggtttatgctggtcggtggaagattccaaatttgttaggattctggaagcagaaaacagaatcaagcaaatcaagcggcatccagaggctttgctgttaaaaaaaaaaaattaagtgctctgggtagaaaaaataaagcccccggttagagcagagcaaacaaaaagaagaaaacaacgataaaaagaataaagaccaaaatgctctcccaaatcagagggaatgaagacactctctgggtggcatttgtgcaaggcatgaggctatgctggtggataaaaggccgggaagaagttgaaaatggttttagtttaactgtccagagccagagctgggtcctgggcggcgtggttttgagcaaggtttggttcaagaatcgtcgggccaaatggagaaagagggagcgcaaccagcaggccgagctatgcaagaatggcttcgggccgcagttcaatgggctcatgcagccctacgacgacatgtacccaggctattcctacaacaactgggccgccaagggccttacatccgcctccctatccaccaagagcttccccttcttcaactctatgaacgtcaaccccctgtcatcacagagcatgttttccccacccaactctatctcgtccatgagcatgtcgtccagcatggtgccctcagcagtgacaggcgtcccgggctccagtctcaacagcctgaataacttgaacaacctgagtagcccgtcgctgaattccgcggtgccgacgcctgcctgtccttacgcgccgccgactcctccgtatgtttatagggacacgtgtaactcgagcctggccagcctgagactgaaagcaaagcagcactccagcttcggctacgccagcgtgcagaacccggcctccaacctgagtgcttgccagtatgcagtggaccggcccgtgtgagccgcacccacagcgccgggatcctaggaccttgccggatggggcaactccgcccttgaaagactgggaattatgctagaaggtcgtgggcactaaagaaagggagagaaagagaagctatatagagaaaaggaaaccactgaatcaaagagagagctcctttgatttcaaagggatgtcctcagtgtctgacatctttcactacaagtatttctaacagttgcaaggacacatacacaaacaaatgtttgactggatatgacattttaacattactataagcttgttattttttaagtttagcattgttaacatttaaatgactgaaaggatgtatatatatcgaaatgtcaaattaattttataaaagcagttgttagtaatatcacaacagtgtttttaaaggttaggctttaaaataaagcatgttatacagaagcgattaggatttttcgcttgcgagcaagggagtgtatatactaaatgccacactgtatgtttctaacatattattattattataaaaaatgtgtgaatatcagttttagaatagtttctctggtggatgcaatgatgtttctgaaactgctatgtacaacctaccctgtgtataacatttcgtacaatattattgttttacttttcagcaaatatgaaacaaatgtgttttatttcatgggagtaaaatatactgcatacaaatt

SEQ ID NO: 3935 - protein, 241 aa, Homo sapiens
MLSQIRGNEDTLWVAFVQGMRLCWWIKGREEVENGFSLTVQSQSWVLGGVVLSKVWFKNRRAKWRKRERNQQAELCKNGFGPQFNGLMQPYDDMYPGYSYNNWAAKGLTSASLSTKSFPFFNSMNVNPLSSQSMFSPPNSISSMSMSSSMVPSAVTGVPGSSLNSLNNLNNLSSPSLNSAVPTPACPYAPPTPPYVYRDTCNSSLASLRLKAKQHSSFGYASVQNPASNLSACQYAVDRPV

SEQ ID NO: 3936 - DNA, 2332 bp, Homo sapiens
ctctggttttaagatgttaggccaacagggaagcgcggagccgcagatctggtccgtcgctcgcctgggtgcctggagctgagctgcggcaaggcccggctcctgttcgaccgcccgaggggtgtgcgtgtgcgcgttgcggagggtgcgctcagagggccgcgtcgtggctgcagcggctgctgccgccgcaggggatctaatatcacctacctgtccctgtcactcttgacacttctctgtcagggctgccgcgtggggggggggcgggcagagcgcggtcggcgttagctttccttattggaggggttcttgggggagggagggagagaagaagggggtctttgcccactcttgtttcgctttggagcttggaagcctgctccctaaagacgctctgagtggtgcccttctgcccacatcccatgtcttcgtttgcccgctgactttccgtctccggactttttcgcttgagccttccggaggagacgggggcagcttggcttgagaactcggcgggggttgcgtcccctggctctccccgcagcggggaaactccgcgcctagagcgcgacccggagcgggcagcggcggctacgggggctcggcggggcagtagccaaggactagtagagcgtcgcgctccctcgtccatgaactgcatgaaaggcccgcttcacttggagcaccgagcagcggggaccaagctgtcggccgtctcctcatcttcctgtcaccatccccagccgttagccatggcttcggttctggctcccggtcagccccggtcgctggactcctccaagcacaggctggaggtgcacaccatctccgacacctccagcccggaggccgcagagaaagataaaagccagcaggggaagaatgaggacgtgggcgccgaggacccgtctaagaagaagcggcaaaggcggcagcggactcactttaccagccagcagctccaggagctggaggccactttccagaggaaccgctacccggacatgtccacacgcgaagaaatcgctgtgtggaccaaccttacggaagcccgagtccgggtttggttcaagaatcgtcgggccaaatggagaaagagggagcgcaaccagcaggccgagctatgcaagaatggcttcgggccgcagttcaatgggctcatgcagccctacgacgacatgtacccaggctattcctacaacaactgggccgccaagggccttacatccgcctccctatccaccaagagcttccccttcttcaactctatgaacgtcaaccccctgtcatcacagagcatgttttccccacccaactctatctcgtccatgagcatgtcgtccagcatggtgccctcagcagtgacaggcgtcccgggctccagtctcaacagcctgaataacttgaacaacctgagtagcccgtcgctgaattccgcggtgccgacgcctgcctgtccttacgcgccgccgactcctccgtatgtttatagggacacgtgtaactcgagcctggccagcctgagactgaaagcaaagcagcactccagcttcggctacgccagcgtgcagaacccggcctccaacctgagtgcttgccagtatgcagtggaccggcccgtgtgagccgcacccacagcgccgggatcctaggaccttgccggatggggcaactccgcccttgaaagactgggaattatgctagaaggtcgtgggcactaaagaaagggagagaaagagaagctatatagagaaaaggaaaccactgaatcaaagagagagctcctttgatttcaaagggatgtcctcagtgtctgacatctttcactacaagtatttctaacagttgcaaggacacatacacaaacaaatgtttgactggatatgacattttaacattactataagcttgttattttttaagtttagcattgttaacatttaaatgactgaaaggatgtatatatatcgaaatgtcaaattaattttataaaagcagttgttagtaatatcacaacagtgtttttaaaggttaggctttaaaataaagcatgttatacagaagcgattaggatttttcgcttgcgagcaagggagtgtatatactaaatgccacactgtatgtttctaacatattattattattataaaaaatgtgtgaatatcagttttagaatagtttctctggtggatgcaatgatgtttctgaaactgctatgtacaacctaccctgtgtataacatttcgtacaatattattgttttacttttcagcaaatatgaaacaaatgtgttttatttcatgggagtaaaatatactgcatacaaatt

SEQ ID NO: 3937 - protein, 324 aa, Homo sapiens; identical to SEQ ID NO: 453

SEQ ID NO: 3938 - DNA, 1738 bp, Homo sapiens
gagggaagagagagggatgagagggagggagaggagagagagtgcgagaccgagcgagaaagctggagaggagcagaaagaaactgccagtggcggctagatttcggaggccccagtgcacccgtggactccttcggaacttggcaccctcaggagccctgcagtcctctcaggcccggctttcgggcgcttgccgtgcagccggaggctcggctcgctggaaatcgccccgggaagcagtgggacgcggagacagcagctctctcccggtagccgataacggggaatggagaccaactgccgcaaactggtgtcggcgtgtgtgcaattaggcgtgcagccggcggccgttgaatgtctcttctccaaagactccgaaatcaaaaaggtcgagttcacggactctcctgagagccgaaaagaggcagccagcagcaagttcttcccgcggcagcatcctggcgccaatggtttggttcaagaatcgtcgggccaaatggagaaagagggagcgcaaccagcaggccgagctatgcaagaatggcttcgggccgcagttcaatgggctcatgcagccctacgacgacatgtacccaggctattcctacaacaactgggccgccaagggccttacatccgcctccctatccaccaagagcttccccttcttcaactctatgaacgtcaaccccctgtcatcacagagcatgttttccccacccaactctatctcgtccatgagcatgtcgtccagcatggtgccctcagcagtgacaggcgtcccgggctccagtctcaacagcctgaataacttgaacaacctgagtagcccgtcgctgaattccgcggtgccgacgcctgcctgtccttacgcgccgccgactcctccgtatgtttatagggacacgtgtaactcgagcctggccagcctgagactgaaagcaaagcagcactccagcttcggctacgccagcgtgcagaacccggcctccaacctgagtgcttgccagtatgcagtggaccggcccgtgtgagccgcacccacagcgccgggatcctaggaccttgccggatggggcaactccgcccttgaaagactgggaattatgctagaaggtcgtgggcactaaagaaagggagagaaagagaagctatatagagaaaaggaaaccactgaatcaaagagagagctcctttgatttcaaagggatgtcctcagtgtctgacatctttcactacaagtatttctaacagttgcaaggacacatacacaaacaaatgtttgactggatatgacattttaacattactataagcttgttattttttaagtttagcattgttaacatttaaatgactgaaaggatgtatatatatcgaaatgtcaaattaattttataaaagcagttgttagtaatatcacaacagtgtttttaaaggttaggctttaaaataaagcatgttatacagaagcgattaggatttttcgcttgcgagcaagggagtgtatatactaaatgccacactgtatgtttctaacatattattattattataaaaaatgtgtgaatatcagttttagaatagtttctctggtggatgcaatgatgtttctgaaactgctatgtacaacctaccctgtgtataacatttcgtacaatattattgttttacttttcagcaaatatgaaacaaatgtgttttatttcatgggagtaaaatatactgcatacaaatt

SEQ ID NO: 3939 - protein, 188 aa, Homo sapiens
MVWFKNRRAKWRKRERNQQAELCKNGFGPQFNGLMQPYDDMYPGYSYNNWAAKGLTSASLSTKSFPFFNSMNVNPLSSQSMFSPPNSISSMSMSSSMVPSAVTGVPGSSLNSLNNLNNLSSPSLNSAVPTPACPYAPPTPPYVYRDTCNSSLASLRLKAKQHSSFGYASVQNPASNLSACQYAVDRPV

SEQ ID NO: 3940 - DNA, 2240 bp, Homo sapiens
tgggagtccgtgctcctgctcctcggttggctcctaagtgccccgccaggtcccctctcctttcgctctcccggctccggctcccgactcttcggcccgctggcatctgcttccctcccctgcctcgtttctcgtcgcccctgctcgctccccccggcgctcgcccgggcgctgtgctcgctcctggatcgccagccgcgcagccgggctcggccggccgcccgcgcgccactgtgcagtggagtttggtggaatctctgctgacgtcacgtcactccccacacggagtaggagcagagggaagagagagggatgagagggagggagaggagagagagtgcgagaccgagcgagaaagctggagaggagcagaaagaaactgccagtggcggctagatttcggaggccccagtgcacccgtggactccttcggaacttggcaccctcaggagccctgcagtcctctcaggcccggctttcgggcgcttgccgtgcagccggaggctcggctcgctggaaatcgccccgggaagcagtgggacgcggagacagcagctctctcccggtagccgataacggggaatggagaccaactgccgcaaactggtgtcggcgtgtgtgcaattaggcgtgcagccggcggccgttgaatgtctcttctccaaagactccgaaatcaaaaaggtcgagttcacggactctcctgagagccgaaaagaggcagccagcagcaagttcttcccgcggcagcatcctggcgccaatgagaaagataaaagccagcaggggaagaatgaggacgtgggcgccgaggacccgtctaagaagaagcggcaaaggcggcagcggactcactttaccagccagcagctccaggagctggaggccactttccagaggaaccgctacccggacatgtccacacgcgaagaaatcgctgtgtggaccaaccttacggaagcccgagtccgggtttggttcaagaatcgtcgggccaaatggagaaagagggagcgcaaccagcaggccgagctatgcaagaatggcttcgggccgcagttcaatgggctcatgcagccctacgacgacatgtacccaggctattcctacaacaactgggccgccaagggccttacatccgcctccctatccaccaagagcttccccttcttcaactctatgaacgtcaaccccctgtcatcacagagcatgttttccccacccaactctatctcgtccatgagcatgtcgtccagcatggtgccctcagcagtgacaggcgtcccgggctccagtctcaacagcctgaataacttgaacaacctgagtagcccgtcgctgaattccgcggtgccgacgcctgcctgtccttacgcgccgccgactcctccgtatgtttatagggacacgtgtaactcgagcctggccagcctgagactgaaagcaaagcagcactccagcttcggctacgccagcgtgcagaacccggcctccaacctgagtgcttgccagtatgcagtggaccggcccgtgtgagccgcacccacagcgccgggatcctaggaccttgccggatggggcaactccgcccttgaaagactgggaattatgctagaaggtcgtgggcactaaagaaagggagagaaagagaagctatatagagaaaaggaaaccactgaatcaaagagagagctcctttgatttcaaagggatgtcctcagtgtctgacatctttcactacaagtatttctaacagttgcaaggacacatacacaaacaaatgtttgactggatatgacattttaacattactataagcttgttattttttaagtttagcattgttaacatttaaatgactgaaaggatgtatatatatcgaaatgtcaaattaattttataaaagcagttgttagtaatatcacaacagtgtttttaaaggttaggctttaaaataaagcatgttatacagaagcgattaggatttttcgcttgcgagcaagggagtgtatatactaaatgccacactgtatgtttctaacatattattattattataaaaaatgtgtgaatatcagttttagaatagtttctctggtggatgcaatgatgtttctgaaactgctatgtacaacctaccctgtgtataacatttcgtacaatattattgttttacttttcagcaaatatgaaacaaatgtgttttatttcatgggagtaaaatatactgcatacaaatt

SEQ ID NO: 3941 - protein, 317 aa, Homo sapiens; identical to SEQ ID NO: 455

SEQ ID NO: 3942 - DNA, 2102 bp, Homo sapiens
tgggagtccgtgctcctgctcctcggttggctcctaagtgccccgccaggtcccctctcctttcgctctcccggctccggctcccgactcttcggcccgctggcatctgcttccctcccctgcctcgtttctcgtcgcccctgctcgctccccccggcgctcgcccgggcgctgtgctcgctcctggatcgccagccgcgcagccgggctcggccggccgcccgcgcgccactgtgcagtggagtttggtggaatctctgctgacgtcacgtcactccccacacggagtaggagcagagggaagagagagggatgagagggagggagaggagagagagtgcgagaccgagcgagaaagctggagaggagcagaaagaaactgccagtggcggctagatttcggaggccccagtgcacccgtggactccttcggaacttggcaccctcaggagccctgcagtcctctcaggcccggctttcgggcgcttgccgtgcagccggaggctcggctcgctggaaatcgccccgggaagcagtgggacgcggagacagcagctctctcccggtagccgataacggggaatggagaccaactgccgcaaactggtgtcggcgtgtgtgcaattagagaaagataaaagccagcaggggaagaatgaggacgtgggcgccgaggacccgtctaagaagaagcggcaaaggcggcagcggactcactttaccagccagcagctccaggagctggaggccactttccagaggaaccgctacccggacatgtccacacgcgaagaaatcgctgtgtggaccaaccttacggaagcccgagtccgggtttggttcaagaatcgtcgggccaaatggagaaagagggagcgcaaccagcaggccgagctatgcaagaatggcttcgggccgcagttcaatgggctcatgcagccctacgacgacatgtacccaggctattcctacaacaactgggccgccaagggccttacatccgcctccctatccaccaagagcttccccttcttcaactctatgaacgtcaaccccctgtcatcacagagcatgttttccccacccaactctatctcgtccatgagcatgtcgtccagcatggtgccctcagcagtgacaggcgtcccgggctccagtctcaacagcctgaataacttgaacaacctgagtagcccgtcgctgaattccgcggtgccgacgcctgcctgtccttacgcgccgccgactcctccgtatgtttatagggacacgtgtaactcgagcctggccagcctgagactgaaagcaaagcagcactccagcttcggctacgccagcgtgcagaacccggcctccaacctgagtgcttgccagtatgcagtggaccggcccgtgtgagccgcacccacagcgccgggatcctaggaccttgccggatggggcaactccgcccttgaaagactgggaattatgctagaaggtcgtgggcactaaagaaagggagagaaagagaagctatatagagaaaaggaaaccactgaatcaaagagagagctcctttgatttcaaagggatgtcctcagtgtctgacatctttcactacaagtatttctaacagttgcaaggacacatacacaaacaaatgtttgactggatatgacattttaacattactataagcttgttattttttaagtttagcattgttaacatttaaatgactgaaaggatgtatatatatcgaaatgtcaaattaattttataaaagcagttgttagtaatatcacaacagtgtttttaaaggttaggctttaaaataaagcatgttatacagaagcgattaggatttttcgcttgcgagcaagggagtgtatatactaaatgccacactgtatgtttctaacatattattattattataaaaaatgtgtgaatatcagttttagaatagtttctctggtggatgcaatgatgtttctgaaactgctatgtacaacctaccctgtgtataacatttcgtacaatattattgttttacttttcagcaaatatgaaacaaatgtgttttatttcatgggagtaaaatatactgcatacaaatt

SEQ ID NO: 3943 - protein, 271 aa, Homo sapiens; identical to SEQ ID NO: 457

SEQ ID NO: 3944 - DNA, 3364 bp, Homo sapiens
tcagagggatcaatatacaggccctaccacggaaaggcggggaaaaggttcgaatagaaaactgctgcagaagggaagccactgagaggagcaaatgtggacttgagggaaactctctcccccacccccacttctatcccgtgcaatttaataccatcctcgccaggaaccttaacctcgtcattttaaaaaatgagatatccgtgacccagggtgaacttgttgaatgtaggtacagcagaggaaattctagactctatgagcgtctgagccttgtccagtgcaaacccttcgtgaacactgggtcagtgcgtggccgtgcccacctgtgcgccgacactctcagcatgcctggtccacccgccttgacctcgggcgcggtgtcccagctaagctgggcccagcgtcccggccttccccagctgacaagcctagctcgttcgctcccggctgtggccctcccaccctctcccactagctcactccattcttctagatttctcttcactcatcctctcccatccccaccgcgcccacctccactcccgccctctaccggtctctcactttcctccctccgcagtccctctttgctgtgacctctttcctcaactctgcaggcctgaaagaaggtcacacacgcacgctcacacccacactccacacgcctcgtcccaaacaaccccatgaacattgtcctttgttccgtctcttgggccactttccctgtcgcttcctcccagcccgtcctgatttgctccccaaaagtacgtttctgtctccccgctgccctggcgctccccctttgatttattagggctgccgggttggcgcagattgctttttcttctcttccatcccatcctcccttctggtcctcctttccacagtgggagtccgtgctcctgctcctcggttggctcctaagtgccccgccaggtcccctctcctttcgctctcccggctccggctcccgactcttcggcccgctggcatctgcttccctcccctgcctcgtttctcgtcgcccctgctcgctccccccggcgctcgcccgggcgctgtgctcgctcctggatcgccagccgcgcagccgggctcggccggccgcccgcgcgccactgtgcagtggagtttggtggaatctctgctgacgtcacgtcactccccacacggagtaggagcagagggaagagagagggatgagagggagggagaggagagagagtgcgagaccgagcgagaaagctggagaggagcagaaagaaactgccagtggcggctagatttcggaggccccagtgcacccgtggactccttcggaacttggcaccctcaggagccctgcagtcctctcaggcccggctttcgggcgcttgccgtgcagccggaggctcggctcgctggaaatcgccccgggaagcagtgggacgcggagacagcagctctctcccggtagccgaatcactaaatctggagccgccaaactgctacttctgggcccacgggcccacaaggatcgaatcggcagagtccccgcccgcgttctcgctagcgggtgggggaaccgcctggccgtccccaccctggatccccacgccacagcgccgggcagcccctcctgtaggcagcgaccttggccagaggctccccagggcccagctcccttcaggagaggccgagacgcagggaaacgataacggggaatggagaccaactgccgcaaactggtgtcggcgtgtgtgcaattaggcgtgcagccggcggccgttgaatgtctcttctccaaagactccgaaatcaaaaaggtcgagttcacggactctcctgagagccgaaaagaggcagccagcagcaagttcttcccgcggcagcatcctggcgccaatgagaaagataaaagccagcaggggaagaatgaggacgtgggcgccgaggacccgtctaagaagaagcggcaaaggcggcagcggactcactttaccagccagcagctccaggagctggaggccactttccagaggaaccgctacccggacatgtccacacgcgaagaaatcgctgtgtggaccaaccttacggaagcccgagtccgggtttggttcaagaatcgtcgggccaaatggagaaagagggagcgcaaccagcaggccgagctatgcaagaatggcttcgggccgcagttcaatgggctcatgcagccctacgacgacatgtacccaggctattcctacaacaactgggccgccaagggccttacatccgcctccctatccaccaagagcttccccttcttcaactctatgaacgtcaaccccctgtcatcacagagcatgttttccccacccaactctatctcgtccatgagcatgtcgtccagcatggtgccctcagcagtgacaggcgtcccgggctccagtctcaacagcctgaataacttgaacaacctgagtagcccgtcgctgaattccgcggtgccgacgcctgcctgtccttacgcgccgccgactcctccgtatgtttatagggacacgtgtaactcgagcctggccagcctgagactgaaagcaaagcagcactccagcttcggctacgccagcgtgcagaacccggcctccaacctgagtgcttgccagtatgcagtggaccggcccgtgtgagccgcacccacagcgccgggatcctaggaccttgccggatggggcaactccgcccttgaaagactgggaattatgctagaaggtcgtgggcactaaagaaagggagagaaagagaagctatatagagaaaaggaaaccactgaatcaaagagagagctcctttgatttcaaagggatgtcctcagtgtctgacatctttcactacaagtatttctaacagttgcaaggacacatacacaaacaaatgtttgactggatatgacattttaacattactataagcttgttattttttaagtttagcattgttaacatttaaatgactgaaaggatgtatatatatcgaaatgtcaaattaattttataaaagcagttgttagtaatatcacaacagtgtttttaaaggttaggctttaaaataaagcatgttatacagaagcgattaggatttttcgcttgcgagcaagggagtgtatatactaaatgccacactgtatgtttctaacatattattattattataaaaaatgtgtgaatatcagttttagaatagtttctctggtggatgcaatgatgtttctgaaactgctatgtacaacctaccctgtgtataacatttcgtacaatattattgttttacttttcagcaaatatgaaacaaatgtgttttatttcatgggagtaaaatatactgcatacaaatt

SEQ ID NO: 3945 - protein, 317 aa, Homo sapiens; identical to SEQ ID NO: 455

SEQ ID NO: 3946 - DNA, 1628 bp, Homo sapiens
gtgccaaaggtcagagggatcaatatacaggccctaccacggaaaggcggggaaaaggttcgaatagaaaactgctgcagaagggaagccactgagagataacggggaatggagaccaactgccgcaaactggtgtcggcgtgtgtgcaattagagaaagataaaagccagcaggggaagaatgaggacgtgggcgccgaggacccgtctaagaagaagcggcaaaggcggcagcggactcactttaccagccagcagctccaggagctggaggccactttccagaggaaccgctacccggacatgtccacacgcgaagaaatcgctgtgtggaccaaccttacggaagcccgagtccgggtttggttcaagaatcgtcgggccaaatggagaaagagggagcgcaaccagcaggccgagctatgcaagaatggcttcgggccgcagttcaatgggctcatgcagccctacgacgacatgtacccaggctattcctacaacaactgggccgccaagggccttacatccgcctccctatccaccaagagcttccccttcttcaactctatgaacgtcaaccccctgtcatcacagagcatgttttccccacccaactctatctcgtccatgagcatgtcgtccagcatggtgccctcagcagtgacaggcgtcccgggctccagtctcaacagcctgaataacttgaacaacctgagtagcccgtcgctgaattccgcggtgccgacgcctgcctgtccttacgcgccgccgactcctccgtatgtttatagggacacgtgtaactcgagcctggccagcctgagactgaaagcaaagcagcactccagcttcggctacgccagcgtgcagaacccggcctccaacctgagtgcttgccagtatgcagtggaccggcccgtgtgagccgcacccacagcgccgggatcctaggaccttgccggatggggcaactccgcccttgaaagactgggaattatgctagaaggtcgtgggcactaaagaaagggagagaaagagaagctatatagagaaaaggaaaccactgaatcaaagagagagctcctttgatttcaaagggatgtcctcagtgtctgacatctttcactacaagtatttctaacagttgcaaggacacatacacaaacaaatgtttgactggatatgacattttaacattactataagcttgttattttttaagtttagcattgttaacatttaaatgactgaaaggatgtatatatatcgaaatgtcaaattaattttataaaagcagttgttagtaatatcacaacagtgtttttaaaggttaggctttaaaataaagcatgttatacagaagcgattaggatttttcgcttgcgagcaagggagtgtatatactaaatgccacactgtatgtttctaacatattattattattataaaaaatgtgtgaatatcagttttagaatagtttctctggtggatgcaatgatgtttctgaaactgctatgtacaacctaccctgtgtataacatttcgtacaatattattgttttacttttcagcaaatatgaaacaaatgtgttttatttcatgggagtaaaatatactgcatacaaatt

SEQ ID NO: 3947 - protein, 271 aa, Homo sapiens; identical to SEQ ID NO: 457

SEQ ID NO: 3948 - DNA, 1873 bp, Homo sapiens
gcagtctgtgtaagttttcatatctctgagtgtgtgcacacagtggagagggtggagcctgccatcctcaaatctgaaaagattgagagatttcagagggcccagatgtgccaaaggtcagagggatcaatatacaggccctaccacggaaaggcggggaaaaggttcgaatagaaaactgctgcagaagggaagccactgagagataacggggaatggagaccaactgccgcaaactggtgtcggcgtgtgtgcaattaggcgtgcagccggcggccgttgaatgtctcttctccaaagactccgaaatcaaaaaggtcgagttcacggactctcctgagagccgaaaagaggcagccagcagcaagttcttcccgcggcagcatcctggcgccaatgagaaagataaaagccagcaggggaagaatgaggacgtgggcgccgaggacccgtctaagaagaagcggcaaaggcggcagcggactcactttaccagccagcagctccaggagctggaggccactttccagaggaaccgctacccggacatgtccacacgcgaagaaatcgctgtgtggaccaaccttacggaagcccgagtccgggtttggttcaagaatcgtcgggccaaatggagaaagagggagcgcaaccagcaggccgagctatgcaagaatggcttcgggccgcagttcaatgggctcatgcagccctacgacgacatgtacccaggctattcctacaacaactgggccgccaagggccttacatccgcctccctatccaccaagagcttccccttcttcaactctatgaacgtcaaccccctgtcatcacagagcatgttttccccacccaactctatctcgtccatgagcatgtcgtccagcatggtgccctcagcagtgacaggcgtcccgggctccagtctcaacagcctgaataacttgaacaacctgagtagcccgtcgctgaattccgcggtgccgacgcctgcctgtccttacgcgccgccgactcctccgtatgtttatagggacacgtgtaactcgagcctggccagcctgagactgaaagcaaagcagcactccagcttcggctacgccagcgtgcagaacccggcctccaacctgagtgcttgccagtatgcagtggaccggcccgtgtgagccgcacccacagcgccgggatcctaggaccttgccggatggggcaactccgcccttgaaagactgggaattatgctagaaggtcgtgggcactaaagaaagggagagaaagagaagctatatagagaaaaggaaaccactgaatcaaagagagagctcctttgatttcaaagggatgtcctcagtgtctgacatctttcactacaagtatttctaacagttgcaaggacacatacacaaacaaatgtttgactggatatgacattttaacattactataagcttgttattttttaagtttagcattgttaacatttaaatgactgaaaggatgtatatatatcgaaatgtcaaattaattttataaaagcagttgttagtaatatcacaacagtgtttttaaaggttaggctttaaaataaagcatgttatacagaagcgattaggatttttcgcttgcgagcaagggagtgtatatactaaatgccacactgtatgtttctaacatattattattattataaaaaatgtgtgaatatcagttttagaatagtttctctggtggatgcaatgatgtttctgaaactgctatgtacaacctaccctgtgtataacatttcgtacaatattattgttttacttttcagcaaatatgaaacaaatgtgttttatttcatgggagtaaaatatactgcatacaaatt

SEQ ID NO: 3949 - protein, 317 aa, Homo sapiens; identical to SEQ ID NO: 455

SEQ ID NO: 3950 - DNA, 797 bp, Homo sapiens
tctgactgtcttatttcagaaaggcagccatcaagctctgagattctttcctccacttggtctattctgctactaatacttcagctcagcccagttcagaactcctgttggagagatgattcagctgtttgcaggaaaaaaggccctctgactttcaccccaagatgagaccatctagttgcaggaaagcaagctcagggatcccacagattctgcactatggagtggaccagcctttcaacccccaccatcatcagtcattgcctcagagcagtccacaggaaacataaccttgacccaaataaggattgtgaaggaagagagaaatgtggaagagaagaggaagcagaagaaaagaaaaggaatcaagatcttacactacctgaaaagcctaaaatatttacctttatacaaatctttccctttgtagaaaaattttgacaatccctgctctagagagaggaagaaaactccaaggatttaccaggtttctgaaggtaaactactgaggaacaaaaccactaataaaattcctgcaagaataatgtattttttgagtttatcacatggagtttttttcttaaccaaaggataattgagcccacaaataaagacaaaatatccactaaaaatatatcacgtagaaaccattttgaaaattatgaaaagagtatttaactagcctaaatgtaggtagaactatatgtctgataaaaaataaaaagcacacacttaaagcacacaacttgctaagttgttgaaattctcaacacaatcaagattatatattcatatac

SEQ ID NO: 3951 - protein, 73 aa, Homo sapiens
MEWTSLSTPTIISHCLRAVHRKHNLDPNKDCEGREKCGREEEAEEKKRNQDLTLPEKPKIFTFIQIFPFVEKF

SEQ ID NO: 3952 - DNA, 1106 bp, Homo sapiens
gcacttaaaggaagaaacgctccggaagaggctacgccgcgaggtaggccccagcagcacgcaggcctgcagctccacgttagcaacgcgtctggaggaagcgcctgcagccgcctctccccagattacttctctggtatcagaggccgagctgtgggcctactgagccgtcacgactccgttccccccgatatattggcctgcgcgagaacttacagaagaactcggccacgatttcggcgctcccgcgcagggtgattccctgctcccgggagagctgcagcgccatggccagggacacaaacaaaagcacgcgcttccactccgcggacagcaaccacagcggctccaacagcacttccccgccaagcgtttcaaaagtaacgacgcagcacgtcgtcaggtcctttgcgcaggcgcgacgagcctttaagcccagccccacgcagcggggacctgccctttctctcagccttcctgtgatgtcgcgggagcggccggttcgcgcaggcgcagttggtggacctggtcgcgctgtgccgggtgtgacactacggagagcagattacattatcaaaagcaccaagttgaaacatttgcaaggtgtgcatcatttcacaattattggcaatggttcaatggtttcatctgctttgaacggtttcttctctatcattaagaggtgaggaaactgagcactaagacactaaataacttgcccagggtcatacgacagacatgagaggtttatatcaggcagtctccacccctgttccgaagtcaagaggctgactcgggttgctacttcttgacagaccggaccccagatcgccgaagaccatttggacacacttctatcaaatcctggcggtctccttctaacaggtatgcagttttctctgtagacccttaatacacagataagacttgaaggaatttatctgcattccctgattggtgtggcaatggaagtcccgccctgcatcccgacactgagcacagctgcagctttcgcttgttcattcattcagtagatattattttcatgcctactctatgccaagcactgctgttctttgaaataaaccttcgcctcacctctcacc

SEQ ID NO: 3953 - protein, 132 aa, Homo sapiens
MARDTNKSTRFHSADSNHSGSNSTSPPSVSKVTTQHVVRSFAQARRAFKPSPTQRGPALSLSLPVMSRERPVRAGAVGGPGRAVPGVTLRRADYIIKSTKLKHLQGVHHFTIIGNGSMVSSALNGFFSIIKR

SEQ ID NO: 3954 - DNA, 3059 bp, Homo sapiens
gcaagaggcgccaccgtctccaaggagtggtccggggcaccggtttcaaagtcgcagggcgggccgagtggacttccgctgctggcctggggcttcccagccgtcttggcgttgtcctctccaacccccgccgctccgcgtagaacgccgctctcaggctgccgtcaagctcccgcggcactctcctaggtggcccgacgagacccagagtgacccgcgggacgcctgtatcgaccgcgtcctcttcccaccagcgtgggattcggttgaacgtggagtccccagcaatcttcagtctctcaccagggccagggactcgtctggggcgcgggggaaagaagcgtggcggggctgtagatgccgcgtgagtaggatgcagattgcaccgctggagcgcttgacaaccaaccgagcgttggcttagttttgttttcccgcacagcaagctctctgtctttcagaggaaggtaaaggtggtgaaagctctaaactaaaattgtatcgaaatggctgcagaaatcgactttctgagagagcaaaatcgaagactaaatgaagattttaggcggtatcaaatggaaagtttttccaaatattcatctgtacagaaagctgtctgccaaggagaaggagacgacacatttgaaaacctagtatttgaccaaagctttttagctcctcttgttactgagtatgataaacacctaggagaactaaatgggcagctgaaatattaccagaaacaggtgggtgagatgaaattacaacttgaaaatgtcatcaaggaaaatgaaaggttgcacagtgaattaaaagatgctgttgaaaaaaaattggaggcctttcccctgggcacagaggtaggaactgacatatatgcagatgatgaaacagtcagaaaccttcaagaacaattgcagctagccaatcaagaaaaaactcaggctgtggaactctggcagactgtttctcaggagttggacagactacacaagctttaccaggaacatatgactgaggcccagattcatgtatttgaaagtcaaaaacaaaaggatcagctatttgattttcaacaactgaccaaacaacttcatgttactaatgagaacatggaagtgactaaccaacagtttctgaaaacagtaactgaacaaagtgtgataatcgaacaactccgaaaaaaacttaggcaagccaaattagagctgagagttgctgtagcaaaagtggaagagttaactaatgtgactgaagatctgcagggacagatgaaaaagaaggagaaggatgtggtgtctgcccatggaagagaggaagcatcagataggcgtttacagcagttacagtctagtataaaacaattagaaataagattatgtgtgacaatccaagaagccaaccaattaagaaccgaaaatacacatctggaaaaacagaccagagagctacaagcaaagtgcaatgaattagaaaatgagagatatgaggctattgtaagagccagaaatagcatgcaactcttagaagaagctaaccttcaaaaaagtcaggctctacttgaggagaagcaaaaagaagaagacatagagaaaatgaaagagacagtttctcggtttgtacaagatgctaccataagaaccaagaaagaagttgcaaacaccaaaaaacaatgtaatatacaaatttctcgattaacagaagaactttcagcccttcaaatggagtgtgctgaaaaacaaggccaaattgaacgagtcattaaggaaaaaaaagcagtggaagaagaactagaaaagatttaccgtgaaggcagaggaaatgagagtgattacagaaaactggaagaaatgcaccaaagattcctggtttcagagcgttcaaaagatgatcttcagctaagacttacgagagcagaaaatagaataaaacaacttgaaactgactcctcagaagaaatatcacgttaccaagaaatgattcagaaacttcaaaatgtattggagtctgagagagagaactgtgggcttgtcagtgaacaaaggctaaaacttcagcaagaaaataaacagttacggaaagagactgagagtttaaggaagattgccctggaggctcaaaaaaaagccaaagtaaagatcagtacaatggaacatgaattttcaataaaggaacgtggatttgaagttcaattgagagagatggaagacagtaatagaaattccattgttgaactgaggcatctcctagcgactcaacagaaggcagccaataggtggaaagaagaaacgaagaaacttactgaaagtgcagaaattagaatcaataatctaaagagtgagctgagtcgacagaaacttcatacccaagagctgctttctcagctggaaatggcaaatgaaaaggtagctgagaatgaaaagctaattctagagcatcaagaaaaagccaacagacttcaaaggcgtctaagtcaggcagaagagagagctgcttcagcttcccagcagctcagtgtgattacagtgcagagaagaaaagcagcctccctgatgaatctggaaaatatttaaaaatattcatagttcactcacagaactttagagttgggaaagcagttggactagaagtgtattgaaatggtaaagcctgcaaagtataatagttaaggcttgtgttatttcgcgtaagcattgttgttctgttttgagggttattggaaaacagagcagtgaccacttcctgtaagtaaagaaaatataatcctatattgagcttcagtggagaataaaccagctgagaagaactcattgccttcatcaatgtgtctgttttttaattcctcctttttcccttgaaaggacataataattttcaaactatgcaaatttctctttcataagaaagagtttttaagaaaattctagaatttaatatttcagtttccaagatttgagaattttacatctaattgttacttctaactcatttttaaagttcctaagtatccattttattatgaactcataaatgtaataaattgtgcactttctaaaatg

SEQ ID NO: 3955 - protein, 688 aa, Homo sapiens; identical to SEQ ID NO: 459

SEQ ID NO: 3956 - DNA, 2329 bp, Homo sapiens
gcaagaggcgccaccgtctccaaggagtggtccggggcaccggtttcaaagtcgcagggcgggccgagtggacttccgctgctggcctggggcttcccagccgtcttggcgttgtcctctccaacccccgccgctccgcgtagaacgccgctctcaggctgccgtcaagctcccgcggcactctcctaggtggcccgacgagacccagagtgacccgcgggacgcctgtatcgaccgcgtcctcttcccaccagcgtgggattcggttgaacgtggagtccccagcaatcttcagtctctcaccagggccagggactcgtctggggcgcgggggaaagaagcgtggcggggctgtagatgccgcgtgagtaggatgcagattgcaccgctggagcgcttgacaaccaaccgagcgttggcttagttttgttttcccgcacagcaagctctctgtctttcagaggaaggtaaaggtggtgaaagctctaaactaaaattgtatcgaaatggctgcagaaatcgactttctgagagagcaaaatcgaagactaaatgaagattttaggcggtatcaaatggaaagtttttccaaatattcatctgtacagaaagctgtctgccaaggagaaggagacgacacatttgaaaacctagtatttgaccaaagctttttagctcctcttgttactgagtatgataaacacctaggagaactaaatgggcagctgaaatattaccagaaacaggtgggtgagatgaaattacaacttgaaaatgtcatcaaggaaaatgaaagagtcttgctctgtctcccaggctggagtgcagtggtgcgatctcggctcactgcaagctccgcctcccggattcgtgccattctcctgcctcagcctccccagtagctgggactacaggtgcccgtcaccacgcccatctaattttttttgtattttcagtagagacggggtttcaccatattagccaggatggtctcgatttcttgacctcatgatctgcccgcctcagcctcccattgttgaccatttttatatgtttatttacctatgtggttttcttttctcataaaatgcttgttcatatattttccccatttctacttatcttgttcttattaaattgccaaagtgcatatgtgatctgtattctgaaaatttgttgatgtgctggtcagtctcaacacagtaaacaataaccattctagaaatttgaaacaagaaaggatttaattcacttacatttaagtgctactaaatcattagttttacagttacacctcagagactataatcctggggttaggaatttatggtgctaccaccatccctggtgctaccaccatccctattactaccatggcagcattatttccataaaactggagacttgatattggaaaaagggtcataggatattgactacaagagacatttttgtctatccagttttacttaccagccaccatatcaacagaaaaaatggtctcagctcacttctaccttttatatctcccttaaatgcctctcactggtaaaattttaatcttatccacaacttcagctgcaagacatctgggcaatgtagttttggactttccgcccctgggacagaggccagaatgtggaagggaacagaaataaataatgagtgccagtggttcatacaacacattagataataggtgtttcaaatgtatattcccagactgtggtgtgtttgatgaacagaatttttttttcttttttttttttaacttaaagtaaatctctcactcttctcctgtggttattgttctttgtatctcctgtaagaagtcctttctcagcctaatgtcatagagatcttctcttatatttgctactaaaaaatgtttaaagcttttccataccaagtttcttaactttaacccataaaattcatataactggactgaaatctgatacatcattttttgttgacttttaactagactaaaaatccaaaattttttgagttctaaatttattcaaaacatgggctcttttaaagtttgacattcttttatttgtatttttctatgttatgtagtaattttattttattttgattatatttatttttattttagtgtagctatatttaaattaatacatgctgttccttaaaattacatagcacacccacggaattgtcttgcctttggctatttcatgattttctctcttccttgtattttccattagttttctttccttctaatttccaaaaacttcatatatttaagctgtcagtgtttactgaagtgcaaaataaagtacatcttttaattggg

SEQ ID NO: 3957 - protein, 131 aa, Homo sapiens
MAAEIDFLREQNRRLNEDFRRYQMESFSKYSSVQKAVCQGEGDDTFENLVFDQSFLAPLVTEYDKHLGELNGQLKYYQKQVGEMKLQLENVIKENERVLLCLPGWSAVVRSRLTASSASRIRAILLPQPPQ

SEQ ID NO: 3958 - DNA, 1757 bp, Homo sapiens
gcaagaggcgccaccgtctccaaggagtggtccggggcaccggtttcaaagtcgcagggcgggccgagtggacttccgctgctggcctggggcttcccagccgtcttggcgttgtcctctccaacccccgccgctccgcgtagaacgccgctctcaggctgccgtcaagctcccgcggcactctcctaggtggcccgacgagacccagagtgacccgcgggacgcctgtatcgaccgcgtcctcttcccaccagcgtgggattcggttgaacgtggagtccccagcaatcttcagtctctcaccagggccagggactcgtctggggcgcgggggaaagaagcgtggcggggctgtagatgccgcgtgagtaggatgcagattgcaccgctggagcgcttgacaaccaaccgagcgttggcttagttttgttttcccgcacagcaagctctctgtctttcagaggaaggtaaaggtggtgaaagctctaaactaaaattgtatcgaaatggctgcagaaatcgactttctgagagagcaaaatcgaagactaaatgaagattttaggcggtatcaaatggaaagtttttccaaatattcatctgtacagaaagctgtctgccaaggagaaggagacgacacatttgaaaacctagtatttgaccaaagctttttagctcctcttgttactgagtatgataaacacctaggagaactaaatgggcagctgaaatattaccaggcataacgaggaccttggaaaagttcacctttcaaaccaaatttatagttagaatttgctattctgatctcctagaccaagcttccttgatcttctcggttgaaagagagagaaaaaggctggcagaactgcctgttccacctggcccttgcgaaagtgtactccaggataagcttctctcctttagcttaggaagcacaatcaagactaatacacaatcatgaattagttaccgttttaagtgagattttgcatgcttttacatgtaaattcagggttttgtgtgtgtgtgtgtgtgtgtgtgtgtgtgtgcgcgcgcgcacactctccatttgctcattcacacttactgagagttgactacttattttttgctattttgcttttactcatattttcgccaactttaaatgctttcttttcttttgaaatcctaacatctttttactccttcagagaacgttaatcagaccttcatttaattccctttctggtgtgcattttattctgccttgtattttagttaggattttttttaaccatctttcctactatttttcaatgagcatgtctgtttaccttagcgccttgtatggtacggagagtttagatagttaatgaaggtggtgaatcagaaactgaatgaatgactgctaaaaaagacctccattttcttctttactgttagcattttaccttttgaaatactagaaaaatatacatacttatatgggcttcacctaaactgaggtgaattaactaagatatacattcaagatacaggaaccatctggtatttgttatagtgacatactccagaatatctttcatctgtttttcacaactacaagtcataggaattacatttataaacatttctcaccatgttacataaaatatttctattttatttatattctacttaaaatgaatgttttattgtgttctgtttattagtaaattatccatattaattatccctttgttataaataaagaataagtctttcttatctgt

SEQ ID NO: 3959 - protein, 79 aa, Homo sapiens
MAAEIDFLREQNRRLNEDFRRYQMESFSKYSSVQKAVCQGEGDDTFENLVFDQSFLAPLVTEYDKHLGELNGQLKYYQA

SEQ ID NO: 3960 - DNA, 1667 bp, Homo sapiens
gcaagaggcgccaccgtctccaaggagtggtccggggcaccggtttcaaagtcgcagggcgggccgagtggacttccgctgctggcctggggcttcccagccgtcttggcgttgtcctctccaacccccgccgctccgcgtagaacgccgctctcaggctgccgtcaagctcccgcggcactctcctaggtggcccgacgagacccagagtgacccgcgggacgcctgtatcgaccgcgtcctcttcccaccagcgtgggattcggttgaacgtggagtccccagcaatcttcagtctctcaccagggccagggactcgtctggggcgcgggggaaagaagcgtggcggggctgtagatgccgcgtgagtaggatgcagattgcaccgctggagcgcttgacaaccaaccgagcgttggcttagttttgttttcccgcacagcaagctctctgtctttcagaggaagatcgaagactaaatgaagattttaggcggtatcaaatggaaagtttttccaaatattcatctgtacagaaagctgtctgccaaggagaaggagacgacacatttgaaaacctagtatttgaccaaagctttttagctcctcttgttactgagtatgataaacacctaggagaactaaatgggcagctgaaatattaccaggcataacgaggaccttggaaaagttcacctttcaaaccaaatttatagttagaatttgctattctgatctcctagaccaagcttccttgatcttctcggttgaaagagagagaaaaaggctggcagaactgcctgttccacctggcccttgcgaaagtgtactccaggataagcttctctcctttagcttaggaagcacaatcaagactaatacacaatcatgaattagttaccgttttaagtgagattttgcatgcttttacatgtaaattcagggttttgtgtgtgtgtgtgtgtgtgtgtgtgtgtgtgcgcgcgcgcacactctccatttgctcattcacacttactgagagttgactacttattttttgctattttgcttttactcatattttcgccaactttaaatgctttcttttcttttgaaatcctaacatctttttactccttcagagaacgttaatcagaccttcatttaattccctttctggtgtgcattttattctgccttgtattttagttaggattttttttaaccatctttcctactatttttcaatgagcatgtctgtttaccttagcgccttgtatggtacggagagtttagatagttaatgaaggtggtgaatcagaaactgaatgaatgactgctaaaaaagacctccattttcttctttactgttagcattttaccttttgaaatactagaaaaatatacatacttatatgggcttcacctaaactgaggtgaattaactaagatatacattcaagatacaggaaccatctggtatttgttatagtgacatactccagaatatctttcatctgtttttcacaactacaagtcataggaattacatttataaacatttctcaccatgttacataaaatatttctattttatttatattctacttaaaatgaatgttttattgtgttctgtttattagtaaattatccatattaattatccctttgttataaataaagaat

SEQ ID NO: 3961 - protein, 56 aa, Homo sapiens
MESFSKYSSVQKAVCQGEGDDTFENLVFDQSFLAPLVTEYDKHLGELNGQLKYYQA

SEQ ID NO: 3962 - DNA, 745 bp, Homo sapiens
gcaagaggcgccaccgtctccaaggagtggtccggggcaccggtttcaaagtcgcagggcgggccgagtggacttccgctgctggcctggggcttcccagccgtcttggcgttgtcctctccaacccccgccgctccgcgtagaacgccgctctcaggctgccgtcaagctcccgcggcactctcctaggtggcccgacgagacccagagtgacccgcgggacgcctgtatcgaccgcgtcctcttcccaccagcgtgggattcggttgaacgtggagtccccagcaatcttcagtctctcaccagggccagggactcgtctggggcgcgggggaaagaagcgtggcggggctgtagatgccgcgtgagtaggatgcagattgcaccgctggagcgcttgacaaccaaccgagcgttggcttagttttgttttcccgcacagcaagctctctgtctttcagaggaaggtaaaggtggtgaaagctctaaactaaaattgtatcgaaatggctgcagaaatcgactttctgagagagcaaaatcgaagactaaatgaagattttaggcggtatcaaatggaaagtttttccaaatattcatctgtacagaacgactacaggaataagtcaggaaatccaagaggacccatagaccctctgaaggaagcagattgcaggacccaggagacatcccaaataccatggtatgcatggctgagagacccacagatggttcacatcacagg

SEQ ID NO: 3963 - protein, 78 aa, Homo sapiens
MAAEIDFLREQNRRLNEDFRRYQMESFSKYSSVQNDYRNKSGNPRGPIDPLKEADCRTQETSQIPWYAWLRDPQMVHI

SEQ ID NO: 3964 - DNA, 2217 bp, Homo sapiens
gaagattgctggggactccacgttcaaccgaatcccacgctggtgggaagaggacgcggtcgatacaggcgtcccgcgggtcactctgggtctcgtcgggccacctaggagagtgccgcgggagcttgacggcagcctgagagcggcgttctacgcggagcggcgggggttggagaggacaacgccaagacggctgggaagccccaggccagcagcggaagtccactcggcccgccctgcgactttgaaaccggtgccccggaccactccttggagacggtggcgcctcttgcgtcatcacgcgggcgttggagcttacgccatcgcgcgtcctagagtcctagcacgctattggctggctgtcaagcaatgggaggagtcgtgagaacctggatgacagcgggctgagccaccggcttggcgcggcggccaaactggtgggacagtgtctccaggtagtgaggcccaacctctttaaaacaaacaaacaaacaaacaaaaaaccaaaatgcaaacgtgagtagagaatgaaatacacagtttaaatgccctcactatctttgggttactaatatactaagcctttctggactaagtaaaagatgcaggttcctgcggctagggatagaagccagactggcgtcttcagaatctcccaccaaggctgtacctctggaggagttctaggtttggatttggtcatctcaagaagagacttcagatggattttaaaattgaacacacttgggatggttttccagtgaagcatgagcccgtatttatcaggctgaatccaggtgacagaggagtgatgatggacattagtgctccatttttcagggatcctccagccccacttggagaaccaggaaaacctttcaatgaactgtgggattatgaagttgtggaagcatttttcttgaatgatataactgagcaatatttagaagttgaactttgtccccacggacagcatttagtgcttttactttctggaagaagaaatgtgtggaaacaagaacttcctttatcgttcagaatgtccagaggagagacaaaatgggaaggcaaagcttatctcccttggagttattttccaccaaatgtgacaaaattcaattcatttgcaattcatggatcaaaagataaacgaagttatgaagctctttaccctgtacctcagcatgaactgcagcaaggacaaaaacctgatttccattgcctagaatacttcaagtctttcaattttaacacactgcttggagaagagtggaaacaaccggaatcagacctgtggctaatagagaaatgtgatatataggagtaatagataaccataccgatcattttttcctctataccttttaagataaacaaaaaataaatatcaattttttaagatgtcatgcatacatttcaacaacaaatatcttcatagaagtcactgaaaatatagtatctgtggcaaattgtatatgattaacaagaaaatatatgattctttgtagatgatttcatctgtaaagtcacaatgtttctcagagtcacttagtccaggatgttgcattcccagcacacagtacagttattcttgaaaactacaagtgaaaaagggggaacaattgaggttgtccaaggccacctagaggactgtcttgcactaccttgtgattcaaccatttcattcctagatatataccccagaaaaatgactgctcatagcagctttattcataatagcacaaaattgtaaacagtgaaatttccatccataggaaaatggatagacaaactacaatatagtcagtggaatactgttcatttaaaaaaggactgctgatacatgcaacaacctgtatgaatctcaaaaacattaagttgagcaaaacaaaccaaacataacatactatctaattacttttatattaaagccacttccaggcaaaactaatatttgatgatagataccagaacagtggctgcttagagtgagggcagggaattcaaattgaatggaaaaggggcctgaggaaattttccggggtgattgaaatgttttgtattttgatctggatgatggttatgtagctgcatatatttgtcaacattcctcatgctgtatgtttagatttgtgattttactatatgtaaattaattccttaataaaatactattataaaataagctgtaaattaaatggaattaacttcaagttt

SEQ ID NO: 3965 - protein, 199 aa, Homo sapiens; identical to SEQ ID NO: 461

SEQ ID NO: 3966 - DNA, 2857 bp, Homo sapiens
gaagattgctggggactccacgttcaaccgaatcccacgctggtgggaagaggacgcggtcgatacaggcgtcccgcgggtcactctgggtctcgtcgggccacctaggagagtgccgcgggagcttgacggcagcctgagagcggcgttctacgcggagcggcgggggttggagaggacaacgccaagacggctgggaagccccaggccagcagcggaagtccactcggcccgccctgcgactttgaaaccggtgccccggaccactccttggagacggtggcgcctcttgcgtcatcacgcgggcgttggagcttacgccatcgcgcgtcctagagtcctagcacgctattggctggctgtcaagcaatgggaggagtcgtgagaacctggatgacagcgggctgagccaccggcttggcgcggcggccaaactggtgggacagtgtctccaggtagtgaggcccaacctctttaaaacaaacaaacaaacaaacaaaaaaccaaaatgcaaacgtgagtagagaatgaaatacacagtttaaatgccctcactatctttgggttactaatatactaagcctttctggactaagtaaaagatgcaggttcctgcggctagggatagaagccagactggcgtcttcagaatctcccaccaaggctgtacctctggaggagttctaggtttggatttggtcatctcaagaagagacttcagatggattttaaaattgaacacacttgggatggttttccagtgaagcatgagcccgtatttatcaggctgaatccaggtgacagaggagtgatgatggacattagtgctccatttttcagggatcctccagccccacttggagaaccaggaaaacctttcaatgaactgtgggattatgaagttgtggaagcatttttcttgaatgatataactgagcaatatttagaagttgaactttgtccccacggacagcatttagtgcttttactttctggaagaagaaatgtgtggaaacaagaacttcctttatcgttcagaatgtccagaggagagacaaaatgggaaggcaaagcttatctcccttggagttattttccaccaaatgtgacaaaattcaattcatttgcaattcatggatcaaaagataaacgaagttatgaagctctttaccctgtacctcagcatgaactgcagcaaggacaaaaacctgatttccattgcctagaatacttcaagtctttcaattttaacacactgcttggagaagagtggaaacaaccggaatcagacctgtggctaatagagaaatgtgatatataggagtaatagataaccataccgatcattttttcctctataccttttaagataaacaaaaaataaatatcaattttttaagatgtcatgcatacatttcaacaacaaatatcttcatagaagtcactgaaaatatagtatctgtggcaaattgtatatgattaacaagaaaatatatgattctttgtagatgatttcatctgtaaagtcacaatgtttctcagagtcacttagtccaggatgttgcattcccagcacacagtacagttattcttgaaaactacaagtgaaaaagggggaacaattgaggttgtccaaggccacctagaggactgtcttgcactaccttgtgattcaaccatttcattcctagatatataccccagaaaaatgactgctcatagcagctttattcataatagcacaaaattgtaaacagtgaaatttccatccataggaaaatggatagacaaactacaatatagtcagtggaatactgttcatttaaaaaaggactgctgatacatgcaacaacctgtatgaatctcaaaaacattaagttgagcaaaacaaaccaaacataacatactatctaattacttttatattaaagccacttccaggcaaaactaatatttgatgatagataccagaacagtggctgcttagagtgagggcagggaattcaaattgaatggaaaaggggcctgaggaaattttccggggtgattgaaatgttttgtattttgatctggatgatggttatgtagctgcatatatttgtcaacattcctcatgctgtatgtttagatttgtgattttactatatgtaaattaattccttaataaaatactattataaaataagctgtaaattaaatggaattaacttcaagtttacattgagtttatatgtttccattgaacaatcactagtgatggttaaatgtggcttatcgacttactcatttcttatatatgttctctatctaaaaagagagctggtgtaagataaatgctaacttttacaaaaggtattattaagtatcctgactacacatcatggtggcagtgttaggcatcttagataaattgagaaattattcttaaaactgacaatagcaactaattaatttgatatagaaacgatctgcctgttttagatacgaatggcatattttaaataacctaggacgatttatttataaattacctgaataattttataaatgcatataaaactatcaaaataaaaacaagatatattttagagcatcttgattttagaagcgaatcgaacactgtgaatcacagtttcagatataaatcataactatttataatatggataaaaatgaagcacaaatatgatagatacaatcacaacaatataaaatactgaatttgaatgttgtagcttgtgagctttctcaaatctaatgtgtatctttttaaaatttgtttagatgttttttaaacatctcttaactttctttcatctagataaggcatttccttttcttccaataccaagcaagc

SEQ ID NO: 3967 - protein, 199 aa, Homo sapiens; identical to SEQ ID NO: 461

SEQ ID NO: 3968 - DNA, 1753 bp, Homo sapiens
caccggcttggcgcggcggccaaactggtgggacagtgtctccaggtagtgaggcccaacctctttaaaacaaacaaacaaacaaacaaaaaaccaaaatgcaaacgtgagtagagaatgaaatacacagtttaaatgccctcactatctttgggttactaatatactaagcctttctggactaagtaaaagatgcaggttcctgcggctagggatagaagccagactggcgtcttcagaatctcccaccaaggctgtacctctggaggagttctaggtttggatttggttttccagtgaagcatgagcccgtatttatcaggctgaatccaggtgacagaggagtgatgatggacattagtgctccatttttcagggatcctccagccccacttggagaaccaggaaaacctttcaatgaactgtgggattatgaagttgtggaagcatttttcttgaatgatataactgagcaatatttagaagttgaactttgtccccacggacagcatttagtgcttttactttctggaagaagaaatgtgtggaaacaagaacttcctttatcgttcagaatgtccagaggagagacaaaatgggaaggcaaagcttatctcccttggagttattttccaccaaatgtgacaaaattcaattcatttgcaattcatggatcaaaagataaacgaagttatgaagctctttaccctgtacctcagcatgaactgcagcaaggacaaaaacctgatttccattgcctagaatacttcaagtctttcaattttaacacactgcttggagaagagtggaaacaaccggaatcagacctgtggctaatagagaaatgtgatatataggagtaatagataaccataccgatcattttttcctctataccttttaagataaacaaaaaataaatatcaattttttaagatgtcatgcatacatttcaacaacaaatatcttcatagaagtcactgaaaatatagtatctgtggcaaattgtatatgattaacaagaaaatatatgattctttgtagatgatttcatctgtaaagtcacaatgtttctcagagtcacttagtccaggatgttgcattcccagcacacagtacagttattcttgaaaactacaagtgaaaaagggggaacaattgaggttgtccaaggccacctagaggactgtcttgcactaccttgtgattcaaccatttcattcctagatatataccccagaaaaatgactgctcatagcagctttattcataatagcacaaaattgtaaacagtgaaatttccatccataggaaaatggatagacaaactacaatatagtcagtggaatactgttcatttaaaaaaggactgctgatacatgcaacaacctgtatgaatctcaaaaacattaagttgagcaaaacaaaccaaacataacatactatctaattacttttatattaaagccacttccaggcaaaactaatatttgatgatagataccagaacagtggctgcttagagtgagggcagggaattcaaattgaatggaaaaggggcctgaggaaattttccggggtgattgaaatgttttgtattttgatctggatgatggttatgtagctgcatatatttgtcaacattcctcatgctgtatgtttagatttgtgattttactatatgtaaattaattccttaataaaatactattataaaataagctgtaaattaaatggaattaacttcaagttt

SEQ ID NO: 3969 - protein, 169 aa, Homo sapiens
MMDISAPFFRDPPAPLGEPGKPFNELWDYEVVEAFFLNDITEQYLEVELCPHGQHLVLLLSGRRNVWKQELPLSFRMSRGETKWEGKAYLPWSYFPPNVTKFNSFAIHGSKDKRSYEALYPVPQHELQQGQKPDFHCLEYFKSFNFNTLLGEEWKQPESDLWLIEKCDI

SEQ ID NO: 3970 - DNA, 2393 bp, Homo sapiens
caccggcttggcgcggcggccaaactggtgggacagtgtctccaggtagtgaggcccaacctctttaaaacaaacaaacaaacaaacaaaaaaccaaaatgcaaacgtgagtagagaatgaaatacacagtttaaatgccctcactatctttgggttactaatatactaagcctttctggactaagtaaaagatgcaggttcctgcggctagggatagaagccagactggcgtcttcagaatctcccaccaaggctgtacctctggaggagttctaggtttggatttggttttccagtgaagcatgagcccgtatttatcaggctgaatccaggtgacagaggagtgatgatggacattagtgctccatttttcagggatcctccagccccacttggagaaccaggaaaacctttcaatgaactgtgggattatgaagttgtggaagcatttttcttgaatgatataactgagcaatatttagaagttgaactttgtccccacggacagcatttagtgcttttactttctggaagaagaaatgtgtggaaacaagaacttcctttatcgttcagaatgtccagaggagagacaaaatgggaaggcaaagcttatctcccttggagttattttccaccaaatgtgacaaaattcaattcatttgcaattcatggatcaaaagataaacgaagttatgaagctctttaccctgtacctcagcatgaactgcagcaaggacaaaaacctgatttccattgcctagaatacttcaagtctttcaattttaacacactgcttggagaagagtggaaacaaccggaatcagacctgtggctaatagagaaatgtgatatataggagtaatagataaccataccgatcattttttcctctataccttttaagataaacaaaaaataaatatcaattttttaagatgtcatgcatacatttcaacaacaaatatcttcatagaagtcactgaaaatatagtatctgtggcaaattgtatatgattaacaagaaaatatatgattctttgtagatgatttcatctgtaaagtcacaatgtttctcagagtcacttagtccaggatgttgcattcccagcacacagtacagttattcttgaaaactacaagtgaaaaagggggaacaattgaggttgtccaaggccacctagaggactgtcttgcactaccttgtgattcaaccatttcattcctagatatataccccagaaaaatgactgctcatagcagctttattcataatagcacaaaattgtaaacagtgaaatttccatccataggaaaatggatagacaaactacaatatagtcagtggaatactgttcatttaaaaaaggactgctgatacatgcaacaacctgtatgaatctcaaaaacattaagttgagcaaaacaaaccaaacataacatactatctaattacttttatattaaagccacttccaggcaaaactaatatttgatgatagataccagaacagtggctgcttagagtgagggcagggaattcaaattgaatggaaaaggggcctgaggaaattttccggggtgattgaaatgttttgtattttgatctggatgatggttatgtagctgcatatatttgtcaacattcctcatgctgtatgtttagatttgtgattttactatatgtaaattaattccttaataaaatactattataaaataagctgtaaattaaatggaattaacttcaagtttacattgagtttatatgtttccattgaacaatcactagtgatggttaaatgtggcttatcgacttactcatttcttatatatgttctctatctaaaaagagagctggtgtaagataaatgctaacttttacaaaaggtattattaagtatcctgactacacatcatggtggcagtgttaggcatcttagataaattgagaaattattcttaaaactgacaatagcaactaattaatttgatatagaaacgatctgcctgttttagatacgaatggcatattttaaataacctaggacgatttatttataaattacctgaataattttataaatgcatataaaactatcaaaataaaaacaagatatattttagagcatcttgattttagaagcgaatcgaacactgtgaatcacagtttcagatataaatcataactatttataatatggataaaaatgaagcacaaatatgatagatacaatcacaacaatataaaatactgaatttgaatgttgtagcttgtgagctttctcaaatctaatgtgtatctttttaaaatttgtttagatgttttttaaacatctcttaactttctttcatctagataaggcatttccttttcttccaataccaagcaagc

SEQ ID NO: 3971 - protein, 169 aa, Homo sapiens; identical to SEQ ID NO: 3969

SEQ ID NO: 3972 - DNA, 667 bp, Homo sapiens
gcagctgggtggagcctaaagccgagccctctcctgtgacctcggctgaaaagaagaagccagtgtttgagaaaagcttcgtgagacttcagatggattttaaaattgaacacacttgggatggttttccagtgaagcatgagcccgtatttatcaggctgaatccaggtgacagaggagtgatgatggacattagtgctccatttttcagggatcctccagccccacttggagaaccaggaaaacctttcaatgaactgtgggattatgaaggtaagtggaagtactgtattttattgcaaacataaatcttcttataataacctctcacagaactattattttatcttgctgttgggaagtaagtgcttctgagcaattgacatgtacagtttctgatatttcctaccaatctctcattctgactttttctccattacctgtgtgactttaactatataacaaaaacagttaaaaaatggcaattacaaatccagatttttttttttttttttttttgagacagagcttcactctgttgcccaggttggagtgcagtggtgcaatctcggctcactgcaaggtccacgtcctgggttcatgccattatcctgcctcagcctccctagtagctgggactacaggcgcctgccaccacgcctggcta

SEQ ID NO: 3973 - protein, 71 aa, Homo sapiens [sequence omitted]

SEQ ID NO: 3974 - DNA, 396 bp, Homo sapiens
agctgggtggagcctaaagccgagccctctcctgtgacctcggctgaaaagaagaagccagtgtttgagaaaagcttcgtgagacttcagatggattttaaaattgaacacacttgggatggttttccagtgaagcatgagcccgtatttatcaggctgaatccaggtgacagaggagtgatgatggacattagtgctccatttttcagggatcctccagccccacttggagaaccaggaaaacctttcaatgaactgtgggattatgaagttgtggaagcatttttcttgaatgatataactgagcaatatttagaagttgaactttgtcccaagaacttcctttatcgttcagaatgtccagaggagagacaaaatgggaaggcaaagcttatc

SEQ ID NO: 3975 - protein, 101 aa, Homo sapiens
MDFKIEHTWDGFPVKHEPVFIRLNPGDRGVMMDISAPFFRDPPAPLGEPGKPFNELWDYEVVEAFFLNDITEQYLEVELCPKNFLYRSECPEERQNGKAKL

SEQ ID NO: 3976 - DNA, 1586 bp, Homo sapiens
agctgggtggagcctaaagccgagccctctcctgtgacctcggctgaaaagaagaagccagtgtttgagaaaagcttcgtgagacttcagatggattttaaaattgaacacacttgggatggttttccagtgaagcatgagcccgtatttatcaggctgaatccaggtgacagaggagtgatgatggacattagtgctccatttttcagggatcctccagccccacttggagaaccaggaaaacctttcaatgaactgtgggattatgaagttgtggaagcatttttcttgaatgatataactgagcaatatttagaagttgaactttgtccccacggacagcatttagtgcttttactttctggaagaagaaatgtgtggaaacaagaacttcctttatcgttcagaatgtccagaggagagacaaaatgggaaggcaaagcttatctcccttggagttattttccaccaaatgtgacaaaattcaattcatttgcaattcatggatcaaaagataaacgaagttatgaagctctttaccctgtacctcagcatgaactgcagcaaggacaaaaacctgatttccattgcctagaatacttcaagtctttcaattttaacacactgcttggagaagagtggaaacaaccggaatcagacctgtggctaatagagaaatgtgatatataggagtaatagataaccataccgatcattttttcctctataccttttaagataaacaaaaaataaatatcaattttttaagatgtcatgcatacatttcaacaacaaatatcttcatagaagtcactgaaaatatagtatctgtggcaaattgtatatgattaacaagaaaatatatgattctttgtagatgatttcatctgtaaagtcacaatgtttctcagagtcacttagtccaggatgttgcattcccagcacacagtacagttattcttgaaaactacaagtgaaaaagggggaacaattgaggttgtccaaggccacctagaggactgtcttgcactaccttgtgattcaaccatttcattcctagatatataccccagaaaaatgactgctcatagcagctttattcataatagcacaaaattgtaaacagtgaaatttccatccataggaaaatggatagacaaactacaatatagtcagtggaatactgttcatttaaaaaaggactgctgatacatgcaacaacctgtatgaatctcaaaaacattaagttgagcaaaacaaaccaaacataacatactatctaattacttttatattaaagccacttccaggcaaaactaatatttgatgatagataccagaacagtggctgcttagagtgagggcagggaattcaaattgaatggaaaaggggcctgaggaaattttccggggtgattgaaatgttttgtattttgatctggatgatggttatgtagctgcatatatttgtcaacattcctcatgctgtatgtttagatttgtgattttactatatgtaaattaattccttaataaaatactattataaaataagctgtaaattaaatggaattaacttcaagttt

SEQ ID NO: 3977 - protein, 199 aa, Homo sapiens; identical to SEQ ID NO: 461

SEQ ID NO: 3978 - DNA, 2226 bp, Homo sapiens
agctgggtggagcctaaagccgagccctctcctgtgacctcggctgaaaagaagaagccagtgtttgagaaaagcttcgtgagacttcagatggattttaaaattgaacacacttgggatggttttccagtgaagcatgagcccgtatttatcaggctgaatccaggtgacagaggagtgatgatggacattagtgctccatttttcagggatcctccagccccacttggagaaccaggaaaacctttcaatgaactgtgggattatgaagttgtggaagcatttttcttgaatgatataactgagcaatatttagaagttgaactttgtccccacggacagcatttagtgcttttactttctggaagaagaaatgtgtggaaacaagaacttcctttatcgttcagaatgtccagaggagagacaaaatgggaaggcaaagcttatctcccttggagttattttccaccaaatgtgacaaaattcaattcatttgcaattcatggatcaaaagataaacgaagttatgaagctctttaccctgtacctcagcatgaactgcagcaaggacaaaaacctgatttccattgcctagaatacttcaagtctttcaattttaacacactgcttggagaagagtggaaacaaccggaatcagacctgtggctaatagagaaatgtgatatataggagtaatagataaccataccgatcattttttcctctataccttttaagataaacaaaaaataaatatcaattttttaagatgtcatgcatacatttcaacaacaaatatcttcatagaagtcactgaaaatatagtatctgtggcaaattgtatatgattaacaagaaaatatatgattctttgtagatgatttcatctgtaaagtcacaatgtttctcagagtcacttagtccaggatgttgcattcccagcacacagtacagttattcttgaaaactacaagtgaaaaagggggaacaattgaggttgtccaaggccacctagaggactgtcttgcactaccttgtgattcaaccatttcattcctagatatataccccagaaaaatgactgctcatagcagctttattcataatagcacaaaattgtaaacagtgaaatttccatccataggaaaatggatagacaaactacaatatagtcagtggaatactgttcatttaaaaaaggactgctgatacatgcaacaacctgtatgaatctcaaaaacattaagttgagcaaaacaaaccaaacataacatactatctaattacttttatattaaagccacttccaggcaaaactaatatttgatgatagataccagaacagtggctgcttagagtgagggcagggaattcaaattgaatggaaaaggggcctgaggaaattttccggggtgattgaaatgttttgtattttgatctggatgatggttatgtagctgcatatatttgtcaacattcctcatgctgtatgtttagatttgtgattttactatatgtaaattaattccttaataaaatactattataaaataagctgtaaattaaatggaattaacttcaagtttacattgagtttatatgtttccattgaacaatcactagtgatggttaaatgtggcttatcgacttactcatttcttatatatgttctctatctaaaaagagagctggtgtaagataaatgctaacttttacaaaaggtattattaagtatcctgactacacatcatggtggcagtgttaggcatcttagataaattgagaaattattcttaaaactgacaatagcaactaattaatttgatatagaaacgatctgcctgttttagatacgaatggcatattttaaataacctaggacgatttatttataaattacctgaataattttataaatgcatataaaactatcaaaataaaaacaagatatattttagagcatcttgattttagaagcgaatcgaacactgtgaatcacagtttcagatataaatcataactatttataatatggataaaaatgaagcacaaatatgatagatacaatcacaacaatataaaatactgaatttgaatgttgtagcttgtgagctttctcaaatctaatgtgtatctttttaaaatttgtttagatgttttttaaacatctcttaactttctttcatctagataaggcatttccttttcttccaataccaagcaagc

SEQ ID NO: 3979 - protein, 199 aa, Homo sapiens; identical to SEQ ID NO: 461

SEQ ID NO: 3980 - DNA, 1791 bp, Homo sapiens
aatattgcatctttttttttttgagacagagtctcgctttgttgccacgctggagtacagtggcgctatcttggctcactgcaacctccacctcccgggttcaagcgattcccctgcctcagcctcccaagttgctgggactacaggcacacgccaccatgcctggctaattttttctttgtattttagtagagacggagtttcaccatgttggccaggatggtcttgatctcctgacctcgtgatccacccgccttggcctcccaaagtgctgggttacaggcgtaagccaccatgctcagcctgcatcttttaattatttggaaaattagttgcaagcacacacattccatgtataaaggatagtgaagaaaataacattcatgtttttcaaacactcatgaggaatcttaattttgacagccacggacagcatttagtgcttttactttctggaagaagaaatgtgtggaaagtaagtaaataaaaataggaggcaaaatcattacgtacacagtaatacacatatttctatgtttaaagtgtaagcccaattttatcttttgtgtttcacatgttgtttctgtagcaagaacttcctttatcgttcagaatgtccagaggagagacaaaatgggaaggcaaagcttatctcccttggagttattttccaccaaatgtgacaaaattcaattcatttgcaattcatggatcaaaagataaacgaagttatgaagctctttaccctgtacctcagcatgaactgcagcaaggacaaaaacctgatttccattgcctagaatacttcaagtctttcaattttaacacactgcttggagaagagtggaaacaaccggaatcagacctgtggctaatagagaaatgtgatatataggagtaatagataaccataccgatcattttttcctctataccttttaagataaacaaaaaataaatatcaattttttaagatgtcatgcatacatttcaacaacaaatatcttcatagaagtcactgaaaatatagtatctgtggcaaattgtatatgattaacaagaaaatatatgattctttgtagatgatttcatctgtaaagtcacaatgtttctcagagtcacttagtccaggatgttgcattcccagcacacagtacagttattcttgaaaactacaagtgaaaaagggggaacaattgaggttgtccaaggccacctagaggactgtcttgcactaccttgtgattcaaccatttcattcctagatatataccccagaaaaatgactgctcatagcagctttattcataatagcacaaaattgtaaacagtgaaatttccatccataggaaaatggatagacaaactacaatatagtcagtggaatactgttcatttaaaaaaggactgctgatacatgcaacaacctgtatgaatctcaaaaacattaagttgagcaaaacaaaccaaacataacatactatctaattacttttatattaaagccacttccaggcaaaactaatatttgatgatagataccagaacagtggctgcttagagtgagggcagggaattcaaattgaatggaaaaggggcctgaggaaattttccggggtgattgaaatgttttgtattttgatctggatgatggttatgtagctgcatatatttgtcaacattcctcatgctgtatgtttagatttgtgattttactatatgtaaattaattccttaataaaatactattataaaataagctgtaaattaaatggaattaacttcaagttt

SEQ ID NO: 3981 - protein, 93 aa, Homo sapiens [sequence omitted]

SEQ ID NO: 3982 - DNA, 2167 bp, Homo sapiens
aatattgcatctttttttttttgagacagagtctcgctttgttgccacgctggagtacagtggcgctatcttggctcactgcaacctccacctcccgggttcaagcgattcccctgcctcagcctcccaagttgctgggactacaggcacacgccaccatgcctggctaattttttctttgtattttagtagagacggagtttcaccatgttggccaggatggtcttgatctcctgacctcgtgatccacccgccttggcctcccaaagtgctgggttacaggcgtaagccaccatgctcagcctgcatcttttaattatttggaaaattagttgcaagcacacacattccatgtataaaggatagtgaagaaaataacattcatgtttttcaaacactcatgaggaatcttaattttgacagccacggacagcatttagtgcttttactttctggaagaagaaatgtgtggaaagtaagtaaataaaaataggaggcaaaatcattacgtacacagtaatacacatatttctatgtttaaagtgtaagcccaattttatcttttgtgtttcacatgttgtttctgtagcaagaacttcctttatcgttcagaatgtccagaggagagacaaaatgggaaggcaaagcttatctcccttggagttattttccaccaaatgtgacaaaattcaattcatttgcaattcatggatcaaaagataaacgaagttatgaagctctttaccctgtacctcagcatgaactgcagcaaggacaaaaacctgatttccattgcctagaatacttcaagtctttcaattttaacacactgcttggagaagagtggaaacaaccggaatcagacctgtggctaatagagaaatgtgatatataggagtaatagataaccataccgatcattttttcctctataccttttaagataaacaaaaaataaatatcaattttttaagatgtcatgcatacatttcaacaacaaatatcttcatagaagtcactgaaaatatagtatctgtggcaaattgtatatgattaacaagaaaatatatgattctttgtagatgatttcatctgtaaagtcacaatgtttctcagagtcacttagtccaggatgttgcattcccagcacacagtacagttattcttgaaaactacaagtgaaaaagggggaacaattgaggttgtccaaggccacctagaggactgtcttgcactaccttgtgattcaaccatttcattcctagatatataccccagaaaaatgactgctcatagcagctttattcataatagcacaaaattgtaaacagtgaaatttccatccataggaaaatggatagacaaactacaatatagtcagtggaatactgttcatttaaaaaaggactgctgatacatgcaacaacctgtatgaatctcaaaaacattaagttgagcaaaacaaaccaaacataacatactatctaattacttttatattaaagccacttccaggcaaaactaatatttgatgatagataccagaacagtggctgcttagagtgagggcagggaattcaaattgaatggaaaaggggcctgaggaaattttccggggtgattgaaatgttttgtattttgatctggatgatggttatgtagctgcatatatttgtcaacattcctcatgctgtatgtttagatttgtgattttactatatgtaaattaattccttaataaaatactattataaaataagctgtaaattaaatggaattaacttcaagtttacattgagtttatatgtttccattgaacaatcactagtgatggttaaatgtggcttatcgacttactcatttcttatatatgttctctatctaaaaagagagctggtgtaagataaatgctaacttttacaaaaggtattattaagtatcctgactacacatcatggtggcagtgttaggcatcttagataaattgagaaattattcttaaaactgacaatagcaactaattaatttgatatagaaacgatctgcctgttttagatacgaatggcatattttaaataacctaggacgatttatttataaattacctgaataattttataaatgcatataaaactatcaaaataaaaacaagatatattttagagca

SEQ ID NO: 3983 - protein, 93 aa, Homo sapiens [sequence omitted]

SEQ ID NO: 3984 - DNA, 1087 bp, Homo sapiens
gttccctgtgggaaccctggaagctatggctatggagttattccaagagatattgctctcatggggcagcaggcatttgagccaaccattgcctagaatacttcaagtctttcaattttaacacactgcttggagaagagtggaaacaaccggaatcagacctgtggctaatagagaaatgtgatatataggagtaatagataaccataccgatcattttttcctctataccttttaagataaacaaaaaataaatatcaattttttaagatgtcatgcatacatttcaacaacaaatatcttcatagaagtcactgaaaatatagtatctgtggcaaattgtatatgattaacaagaaaatatatgattctttgtagatgatttcatctgtaaagtcacaatgtttctcagagtcacttagtccaggatgttgcattcccagcacacagtacagttattcttgaaaactacaagtgaaaaagggggaacaattgaggttgtccaaggccacctagaggactgtcttgcactaccttgtgattcaaccatttcattcctagatatataccccagaaaaatgactgctcatagcagctttattcataatagcacaaaattgtaaacagtgaaatttccatccataggaaaatggatagacaaactacaatatagtcagtggaatactgttcatttaaaaaaggactgctgatacatgcaacaacctgtatgaatctcaaaaacattaagttgagcaaaacaaaccaaacataacatactatctaattacttttatattaaagccacttccaggcaaaactaatatttgatgatagataccagaacagtggctgcttagagtgagggcagggaattcaaattgaatggaaaaggggcctgaggaaattttccggggtgattgaaatgttttgtattttgatctggatgatggttatgtagctgcatatatttgtcaacattcctcatgctgtatgtttagatttgtgattttactatatgtaaattaattccttaataaaatactattataaaataagctgtaaattaaatggaattaacttcaagttt

SEQ ID NO: 3985 - protein, 31 aa, Homo sapiens
MAMELFQEILLSWGSRHLSQPLPRILQVFQF

SEQ ID NO: 3986 - DNA, 1463 bp, Homo sapiens
gttccctgtgggaaccctggaagctatggctatggagttattccaagagatattgctctcatggggcagcaggcatttgagccaaccattgcctagaatacttcaagtctttcaattttaacacactgcttggagaagagtggaaacaaccggaatcagacctgtggctaatagagaaatgtgatatataggagtaatagataaccataccgatcattttttcctctataccttttaagataaacaaaaaataaatatcaattttttaagatgtcatgcatacatttcaacaacaaatatcttcatagaagtcactgaaaatatagtatctgtggcaaattgtatatgattaacaagaaaatatatgattctttgtagatgatttcatctgtaaagtcacaatgtttctcagagtcacttagtccaggatgttgcattcccagcacacagtacagttattcttgaaaactacaagtgaaaaagggggaacaattgaggttgtccaaggccacctagaggactgtcttgcactaccttgtgattcaaccatttcattcctagatatataccccagaaaaatgactgctcatagcagctttattcataatagcacaaaattgtaaacagtgaaatttccatccataggaaaatggatagacaaactacaatatagtcagtggaatactgttcatttaaaaaaggactgctgatacatgcaacaacctgtatgaatctcaaaaacattaagttgagcaaaacaaaccaaacataacatactatctaattacttttatattaaagccacttccaggcaaaactaatatttgatgatagataccagaacagtggctgcttagagtgagggcagggaattcaaattgaatggaaaaggggcctgaggaaattttccggggtgattgaaatgttttgtattttgatctggatgatggttatgtagctgcatatatttgtcaacattcctcatgctgtatgtttagatttgtgattttactatatgtaaattaattccttaataaaatactattataaaataagctgtaaattaaatggaattaacttcaagtttacattgagtttatatgtttccattgaacaatcactagtgatggttaaatgtggcttatcgacttactcatttcttatatatgttctctatctaaaaagagagctggtgtaagataaatgctaacttttacaaaaggtattattaagtatcctgactacacatcatggtggcagtgttaggcatcttagataaattgagaaattattcttaaaactgacaatagcaactaattaatttgatatagaaacgatctgcctgttttagatacgaatggcatattttaaataacctaggacgatttatttataaattacctgaataattttataaatgcatataaaactatcaaaataaaaacaagatatattttagagca

SEQ ID NO: 3987 - protein, 31 aa, Homo sapiens; identical to SEQ ID NO: 3985

SEQ ID NO: 3988 - DNA, 305 bp, Homo sapiens
attctgaggacttctcctggcatgtggaactgtaagaccaaatacaagaggattcactccaaattgtacaccacactcaggcatgggactaagaacgatctacaatcagaaagtgattcaaaagactctcagctaagtgctacataatgagcaactcgtactcctcaaccaaacggcacagcaagaagacagccattggtgaaacaggaagaagaccttcatcagaacccaatctttgtggcaccctaatcttggacttcccaacctccagagttatgagaaataaatttatgttgtttaagcca

SEQ ID NO: 3989 - protein, 52 aa, Homo sapiens
MSNSYSSTKRHSKKTAIGETGRRPSSEPNLCGTLILDFPTSRVMRNKFMLFK

SEQ ID NO: 3990 - DNA, 280 bp, Homo sapiens
ctgctgagcccacagagtagctgggattacagatgcgtgccacctcacccagttacatcttcctgaggatagagcctacatagaagttcagcaaatatctggtcttttccacacctgggaagatgtgggtataggccactatgtgttttcctttcaaaatggcaagaatttctgacatgacatgggaaaagctgaagaagtcagtctttggggtgtgttttcatctaggaggtggcttgagatggattcatggcaaatcacaataaattatttatcagat

SEQ ID NO: 3991 - protein, 41 aa, Homo sapiens
MCFPFKMARISDMTWEKLKKSVFGVCFHLGGGLRWIHGKSQ

SEQ ID NO: 3992 - DNA, 421 bp, Homo sapiens
aggtgaaagaaaactaaagaaataccagtgcagaaaggaagttctttattttcaggttgctcaagctaaaacaataagcagcatttcatggatgactggcatgtcgccttttactcctcaaggcagactcaagagttttcccagaaacagaggacgagccccttggccatgcagccctaagccaggctgatccagccttgtctcgcccctctctgcaagagactcgtgggtacaggatgattgagggggccccagcctccccagcagctgctgacttgcgcttggaaattcaatcctctcaaggcaagaatttctgacatgacatgggaaaagctgaagaagtcagtctttggggtgtgttttcatctaggaggtggcttgagatggattcatggcaaatcacaataaattatttatcaga

SEQ ID NO: 3993 - protein, 32 aa, Homo sapiens
MTGMSPFTPQGRLKSFPRNRGRAPWPCSPKPG

SEQ ID NO: 3994 - DNA, 5195 bp, Homo sapiens
ggatgtttcctgccctcgaacatcagaatccatgtttttcagcttttgggctcttggacttacaccagtggtttgccagggccccccagccttcgaccacagattgaaggctacactgttggcctccctacttttgaggttttggaacttggactggcttccttgctcctcagtttgcagacagcctattgtggaacttcaccttgtgatcgtagccttgaaaccagcgaaacaataatcaaagagcagttctgtcaaagaaaacaacataaatcaggtacagaatttcagagtgggatatcagatctttagtgtgaagatacatctacattaaaccaggaatcactagaactgacatttggacaagaaaatttggaaaattttaaaactgtgaaggttgatcatggaaattaaagaggaaggggcatcagaagaagggcagcactttcttcctacagcccaggccaatgatcccggggactgtcagttcacaagtatccagaagactccaaatgaaccgcagttggaattcatccttgcatgcaaggatctcgtggctcctgtccgtgatcgtaaactgaatacactggtgcagatctccgtaatccaccccgtggagcagagtctgacaagatactccagcaccgaaattgtggagggaacaagggacccactgtttttgactggtgtcacattcccatctgagtatcccatctatgaggagaccaaaataaaactaacagtctatgatgtcaaggataagtctcatgacaccgttcgaaccagtgtcctaccagaacataaggatcccccgccagaagttgggcgaagtttcttgggctatgccagttttaaagtgggagagctgctgaagtcaaaggagcaattgctggtcctgagcctgagaacttcagatggtggcaaagtggttggcaccatagaagtcagtgtcgtgaagatgggggagattgaggatggggaagccgaccacatcaccacagatgtacagggacaaaagtgtgccctggtatgtgaatgtacagccccggaaagtgtgagcggaaaagataacttaccttttttgaattcagtgttaaagaacccagtatgtaaattatatagatttcccacatctgacaataagtggatgcgaattcgagagcagatgtcagagagcattctttcctttcatattcctaaggaattgatttcccttcacattaaagaagatttgtgcagaaaccaggagataaaagaacttggtgagctttctccacattgggacaatctgcgaaaaaatgtccttactcactgtgatcaaatggtgaatatgtaccaagacattctgacagaacttagcaaggaaacagggtcctctttcaaatcaagcagcagcaaaggagagaaaacattagaatttgttccaataaatctacatctgcaaagaatgcaggtacacagccctcacttgaaagatgctctctacgatgtcatcactgtgggagccccagctgcccattttcagggatttaagaatggtggtcttcggaagctactccatagatttgaaacagaaagaagaaataccggataccagtttatttactattcacctgaaaacacagccaaagcaaaggaagttctcagcaacatcaatcaactacaacctcttatagcaacccatgcagacctactgcttaattctgcaagccagcattctccagacagcttgaagaattctttaaagatgctttcagaaaaaacagagctttttgtacatgccttcaaggatcaacttgtcaggagtgctcttttagcactctacactgcaaggccaggaggcattcttaagaagccaccctctcctaagagcagcacagaggagagcagtccccaagaccaacccccagtgatgagagggcaggactccataccacatcattcagactatgatgaggaagagtgggacagggtgtgggccaatgtggggaagagcctgaactgcattattgctatggtggacaaactgattgaaagagatggtggcagtgaaggcagtggcggcaacaatgatggagaaaaggaaccttcattaacagatgccattccctctcacccaagagaggactggtatgaacagttgtatcccctcatccttaccctgaaggactgcatgggagaagtggtgaaccgagccaagcagtccctgacatttgtgctccttcaggaacttgcgtacagcttgccccagtgtctgatgctgacgctaagaagagacatcgtcttcagccaagcacttgctggattggtttgtggttttatcatcaaattacagacaagtctgtatgacccaggcttcctacagcagcttcacacagtggggttgatagtacaatatgaaggactgctaagtacatacagcgatgaaattggaatgctagaggacatggccgttggcatttccgatttaaagaaagttgcatttaaaataattgaagccaaatccaatgatgtgttgccagttataacaggaagacgagaacattacgtggtagaggtcaagcttccagccagaatgtttgagtcactacctctacagattaaagaaggacagttgcttcatgtgtatccagtactttttaatgttggaatcaatgaacagcaaactctggctgaaaggtttggagatgtctctttgcaagaaagtattaatcaggaaaacttcgaacttctacaagaatattacaagatatttatggaaaagatgcctcctgattatatttcacattttcaggaacaaaatgatttaaaagcattgctagaaaatctccttcaaaatatccaatccaaaaaaagaaagaatgtagaaattatgtggctggctgcaacgatttgccgcaaactgaatggtattcgtttcacctgttgtaaaagtgccaaagacaggacatcgatgtcagtgacacttgaacaatgctcaatcttgagagatgagcaccagttacacaaggacttctttatccgagcgctggattgcatgagaagagaaggatgccgcatagagaatgtactgaagaatatcaaatgcagaaagtatgctttcaacatgctacagctgatggctttccccaagtactacagacctccagaggggacttatggaaaagctgacacctaagtttaccaacatgttaataaacaggaacacaaatacatttcagttggataatcttcaccttggtcttttttgtttgtttttattgtcatgaatttgtggtgggggagatgatcacagatgtttcccaaaatctaggaactacttcaattcatcatcagcatattgctctgaaagaaatccattttaaaaaatcttacatgattcagtactgtcatttctagttctaagcttctatgtgttgagcctagctgattgagattggttcacaaagtgtaaatttcattcatgagtatttaaatgtttctgaggaaacatggatcatttcaataggactaggggtgattcacagagcaccactctccaaccaaatggaagagaggagagggggaaaaggaacatattttttttgtgatacaacttaatagcctatgagaacacagtcaacctgagaatcaatgtaagggatttaaaaaaaatgtgtagccactcaattaggtagagttaactcatgatctggaatactgaggcagtttgcaggtatgttccacaatgatctctatcatccagtcaaggtgtgactcctcccttgcaacaggcatatgcatggagtgagtaaagtggtcaacagacctttcaaaaccatggcatcttttcagaactctgacttgggttgtgtgatctagctgtgaatgtagcaatatagaacgtttaatagaatgataagcaaaacactgcaatgatctaaaattacaaataaaataaaaatgaacaacattttgatacccaaaatgaaaattcccatcagcctgaactttatgttgtgaagttcatgaatgtcagtgaggtatctctgagatgtttcttagcagtcatcctggtgtaagcatgcagttatggcataggtttgtgtgtgttaataagcctttaaaacatatgcaaccacaacaaatgataaagtaaaacaattattttctgttgccctgaatatcaaacttgcccttgcccttactcagcaaaataacatttataagttttccaaaatcccaaagtagaagtttccttaaaaaaatcatcttgtataataccagtattcaaacatgggtaaggttaatcacccccaatcactcaggagatagttgcagaatttgaattacaatctcttcttactttcctagcctgtggcttgtcacttctccaaattgccatgctaaatatgcatgaaaattgagggagaatgctagttaaaaagaaattaggatttatcactggaattgaaactaagagtacaaaagtctgaacgaatgaaacttttctccaaattttacaaattcttgttcctttctcattagaagagcatgctatccaaagcataaatctcccttgaaaataacagaggcttcttaagccctctcttagctatgatcaatggatgatattatgcttcccatagctaatgtgatagctccttgcctaggattcctgttgaaataaggattctagccccatgttaagtttttcaaattactacaaattttagataagcatttggagctttttatactagaattatcaattttttattttagctaattacctgtgggcattatacttgaggcaggtaccaaactacttacagcctttttaatgaaaatgtgctgtgtactttgaatccattcatagacaaaattaccttgatgttctcttaactcattctttattttagtgattaaatacaacctttgagttgttcaatatcatttgaaaatggtaggatttgtggttattttcattaccctattagatttaagataggctgggatgacagaggcctccttgaatagctatgaagcctcattcagcatatcaaatggtagtctgagttctaagaaaccttaagtaatttatcattctgtaaatactcttataagcaataatttttatttgtatttttgaaaacaaactacttaaatatggaaaaatattaactggaaagccagcagtagggttttctattttt

SEQ ID NO: 3995 - protein, 924 aa, Homo sapiens
MEIKEEGASEEGQHFLPTAQANDPGDCQFTSIQKTPNEPQLEFILACKDLVAPVRDRKLNTLVQISVIHPVEQSLTRYSSTEIVEGTRDPLFLTGVTFPSEYPIYEETKIKLTVYDVKDKSHDTVRTSVLPEHKDPPPEVGRSFLGYASFKVGELLKSKEQLLVLSLRTSDGGKVVGTIEVSVVKMGEIEDGEADHITTDVQGQKCALVCECTAPESVSGKDNLPFLNSVLKNPVCKLYRFPTSDNKWMRIREQMSESILSFHIPKELISLHIKEDLCRNQEIKELGELSPHWDNLRKNVLTHCDQMVNMYQDILTELSKETGSSFKSSSSKGEKTLEFVPINLHLQRMQVHSPHLKDALYDVITVGAPAAHFQGFKNGGLRKLLHRFETERRNTGYQFIYYSPENTAKAKEVLSNINQLQPLIATHADLLLNSASQHSPDSLKNSLKMLSEKTELFVHAFKDQLVRSALLALYTARPGGILKKPPSPKSSTEESSPQDQPPVMRGQDSIPHHSDYDEEEWDRVWANVGKSLNCIIAMVDKLIERDGGSEGSGGNNDGEKEPSLTDAIPSHPREDWYEQLYPLILTLKDCMGEVVNRAKQSLTFVLLQELAYSLPQCLMLTLRRDIVFSQALAGLVCGFIIKLQTSLYDPGFLQQLHTVGLIVQYEGLLSTYSDEIGMLEDMAVGISDLKKVAFKIIEAKSNDVLPVITGRREHYVVEVKLPARMFESLPLQIKEGQLLHVYPVLFNVGINEQQTLAERFGDVSLQESINQENFELLQEYYKIFMEKMPPDYISHFQEQNDLKALLENLLQNIQSKKRKNVEIMWLAATICRKLNGIRFTCCKSAKDRTSMSVTLEQCSILRDEHQLHKDFFIRALDCMRREGCRIENVLKNIKCRKYAFNMLQLMAFPKYYRPPEGTYGKADT

SEQ ID NO: 3996 - DNA, 5225 bp, Homo sapiens
acacgctcgcaagcgaacgcaggaaagtcaggctaaaagtgtctgctgctgctgccgccccccactccgcctccgggagagaatacaaagaaatggtgttacctggcaagaggtcttctgtcttttatgaaaaattagacaaaggctttacaggaggcatagtactggaaatctgctcctgatgaggtctcagaaagcttccactcgtggtggaaggcaaaggaggagcaggcacatcacatgagccttgaaaccagcgaaacaataatcaaagagcagttctgtcaaagaaaacaacataaatcaggtacagaatttcagagtgggatatcagatctttagtgtgaagatacatctacattaaaccaggaatcactagaactgacatttggacaagaaaatttggaaaattttaaaactgtgaaggttgatcatggaaattaaagaggaaggggcatcagaagaagggcagcactttcttcctacagcccaggccaatgatcccggggactgtcagttcacaagtatccagaagactccaaatgaaccgcagttggaattcatccttgcatgcaaggatctcgtggctcctgtccgtgatcgtaaactgaatacactggtgcagatctccgtaatccaccccgtggagcagagtctgacaagatactccagcaccgaaattgtggagggaacaagggacccactgtttttgactggtgtcacattcccatctgagtatcccatctatgaggagaccaaaataaaactaacagtctatgatgtcaaggataagtctcatgacaccgttcgaaccagtgtcctaccagaacataaggatcccccgccagaagttgggcgaagtttcttgggctatgccagttttaaagtgggagagctgctgaagtcaaaggagcaattgctggtcctgagcctgagaacttcagatggtggcaaagtggttggcaccatagaagtcagtgtcgtgaagatgggggagattgaggatggggaagccgaccacatcaccacagatgtacagggacaaaagtgtgccctggtatgtgaatgtacagccccggaaagtgtgagcggaaaagataacttaccttttttgaattcagtgttaaagaacccagtatgtaaattatatagatttcccacatctgacaataagtggatgcgaattcgagagcagatgtcagagagcattctttcctttcatattcctaaggaattgatttcccttcacattaaagaagatttgtgcagaaaccaggagataaaagaacttggtgagctttctccacattgggacaatctgcgaaaaaatgtccttactcactgtgatcaaatggtgaatatgtaccaagacattctgacagaacttagcaaggaaacagggtcctctttcaaatcaagcagcagcaaaggagagaaaacattagaatttgttccaataaatctacatctgcaaagaatgcaggtacacagccctcacttgaaagatgctctctacgatgtcatcactgtgggagccccagctgcccattttcagggatttaagaatggtggtcttcggaagctactccatagatttgaaacagaaagaagaaataccggataccagtttatttactattcacctgaaaacacagccaaagcaaaggaagttctcagcaacatcaatcaactacaacctcttatagcaacccatgcagacctactgcttaattctgcaagccagcattctccagacagcttgaagaattctttaaagatgctttcagaaaaaacagagctttttgtacatgccttcaaggatcaacttgtcaggagtgctcttttagcactctacactgcaaggccaggaggcattcttaagaagccaccctctcctaagagcagcacagaggagagcagtccccaagaccaacccccagtgatgagagggcaggactccataccacatcattcagactatgatgaggaagagtgggacagggtgtgggccaatgtggggaagagcctgaactgcattattgctatggtggacaaactgattgaaagagatggtggcagtgaaggcagtggcggcaacaatgatggagaaaaggaaccttcattaacagatgccattccctctcacccaagagaggactggtatgaacagttgtatcccctcatccttaccctgaaggactgcatgggagaagtggtgaaccgagccaagcagtccctgacatttgtgctccttcaggaacttgcgtacagcttgccccagtgtctgatgctgacgctaagaagagacatcgtcttcagccaagcacttgctggattggtttgtggttttatcatcaaattacagacaagtctgtatgacccaggcttcctacagcagcttcacacagtggggttgatagtacaatatgaaggactgctaagtacatacagcgatgaaattggaatgctagaggacatggccgttggcatttccgatttaaagaaagttgcatttaaaataattgaagccaaatccaatgatgtgttgccagttataacaggaagacgagaacattacgtggtagaggtcaagcttccagccagaatgtttgagtcactacctctacagattaaagaaggacagttgcttcatgtgtatccagtactttttaatgttggaatcaatgaacagcaaactctggctgaaaggtttggagatgtctctttgcaagaaagtattaatcaggaaaacttcgaacttctacaagaatattacaagatatttatggaaaagatgcctcctgattatatttcacattttcaggaacaaaatgatttaaaagcattgctagaaaatctccttcaaaatatccaatccaaaaaaagaaagaatgtagaaattatgtggctggctgcaacgatttgccgcaaactgaatggtattcgtttcacctgttgtaaaagtgccaaagacaggacatcgatgtcagtgacacttgaacaatgctcaatcttgagagatgagcaccagttacacaaggacttctttatccgagcgctggattgcatgagaagagaaggatgccgcatagagaatgtactgaagaatatcaaatgcagaaagtatgctttcaacatgctacagctgatggctttccccaagtactacagacctccagaggggacttatggaaaagctgacacctaagtttaccaacatgttaataaacaggaacacaaatacatttcagttggataatcttcaccttggtcttttttgtttgtttttattgtcatgaatttgtggtgggggagatgatcacagatgtttcccaaaatctaggaactacttcaattcatcatcagcatattgctctgaaagaaatccattttaaaaaatcttacatgattcagtactgtcatttctagttctaagcttctatgtgttgagcctagctgattgagattggttcacaaagtgtaaatttcattcatgagtatttaaatgtttctgaggaaacatggatcatttcaataggactaggggtgattcacagagcaccactctccaaccaaatggaagagaggagagggggaaaaggaacatattttttttgtgatacaacttaatagcctatgagaacacagtcaacctgagaatcaatgtaagggatttaaaaaaaatgtgtagccactcaattaggtagagttaactcatgatctggaatactgaggcagtttgcaggtatgttccacaatgatctctatcatccagtcaaggtgtgactcctcccttgcaacaggcatatgcatggagtgagtaaagtggtcaacagacctttcaaaaccatggcatcttttcagaactctgacttgggttgtgtgatctagctgtgaatgtagcaatatagaacgtttaatagaatgataagcaaaacactgcaatgatctaaaattacaaataaaataaaaatgaacaacattttgatacccaaaatgaaaattcccatcagcctgaactttatgttgtgaagttcatgaatgtcagtgaggtatctctgagatgtttcttagcagtcatcctggtgtaagcatgcagttatggcataggtttgtgtgtgttaataagcctttaaaacatatgcaaccacaacaaatgataaagtaaaacaattattttctgttgccctgaatatcaaacttgcccttgcccttactcagcaaaataacatttataagttttccaaaatcccaaagtagaagtttccttaaaaaaatcatcttgtataataccagtattcaaacatgggtaaggttaatcacccccaatcactcaggagatagttgcagaatttgaattacaatctcttcttactttcctagcctgtggcttgtcacttctccaaattgccatgctaaatatgcatgaaaattgagggagaatgctagttaaaaagaaattaggatttatcactggaattgaaactaagagtacaaaagtctgaacgaatgaaacttttctccaaattttacaaattcttgttcctttctcattagaagagcatgctatccaaagcataaatctcccttgaaaataacagaggcttcttaagccctctcttagctatgatcaatggatgatattatgcttcccatagctaatgtgatagctccttgcctaggattcctgttgaaataaggattctagccccatgttaagtttttcaaattactacaaattttagataagcatttggagctttttatactagaattatcaattttttattttagctaattacctgtgggcattatacttgaggcaggtaccaaactacttacagcctttttaatgaaaatgtgctgtgtactttgaatccattcatagacaaaattaccttgatgttctcttaactcattctttattttagtgattaaatacaacctttgagttgttcaatatcatttgaaaatggtaggatttgtggttattttcattaccctattagatttaagataggctgggatgacagaggcctccttgaatagctatgaagcctcattcagcatatcaaatggtagtctgagttctaagaaaccttaagtaatttatcattctgtaaatactcttataagcaataatttttatttgtatttttgaaaacaaactacttaaatatggaaaaatattaactggaaagccagcagtagggttttctattttt

SEQ ID NO: 3997 - protein, 924 aa, Homo sapiens; identical to SEQ ID NO: 3995

SEQ ID NO: 3998 - DNA, 5258 bp, Homo sapiens
gcgcacacgctcacacgctcgcaagcgaacgcaggaaagtcaggctaaaagtgtctgctgctgctgccgccccccactccgcctccgggagagaatacaaagaaatggtgttacctggcaagaggtcttctgtcttttatgaaaaattagacaaagggggcgctgttttggggaaatggcagaactccctcagaggctgatctaagggttcccggcagaaggggccatcttcagaggctctggttgcatgactgtttggagtttgatggcctgaagagccttgaaaccagcgaaacaataatcaaagagcagttctgtcaaagaaaacaacataaatcaggtacagaatttcagagtgggatatcagatctttagtgtgaagatacatctacattaaaccaggaatcactagaactgacatttggacaagaaaatttggaaaattttaaaactgtgaaggttgatcatggaaattaaagaggaaggggcatcagaagaagggcagcactttcttcctacagcccaggccaatgatcccggggactgtcagttcacaagtatccagaagactccaaatgaaccgcagttggaattcatccttgcatgcaaggatctcgtggctcctgtccgtgatcgtaaactgaatacactggtgcagatctccgtaatccaccccgtggagcagagtctgacaagatactccagcaccgaaattgtggagggaacaagggacccactgtttttgactggtgtcacattcccatctgagtatcccatctatgaggagaccaaaataaaactaacagtctatgatgtcaaggataagtctcatgacaccgttcgaaccagtgtcctaccagaacataaggatcccccgccagaagttgggcgaagtttcttgggctatgccagttttaaagtgggagagctgctgaagtcaaaggagcaattgctggtcctgagcctgagaacttcagatggtggcaaagtggttggcaccatagaagtcagtgtcgtgaagatgggggagattgaggatggggaagccgaccacatcaccacagatgtacagggacaaaagtgtgccctggtatgtgaatgtacagccccggaaagtgtgagcggaaaagataacttaccttttttgaattcagtgttaaagaacccagtatgtaaattatatagatttcccacatctgacaataagtggatgcgaattcgagagcagatgtcagagagcattctttcctttcatattcctaaggaattgatttcccttcacattaaagaagatttgtgcagaaaccaggagataaaagaacttggtgagctttctccacattgggacaatctgcgaaaaaatgtccttactcactgtgatcaaatggtgaatatgtaccaagacattctgacagaacttagcaaggaaacagggtcctctttcaaatcaagcagcagcaaaggagagaaaacattagaatttgttccaataaatctacatctgcaaagaatgcaggtacacagccctcacttgaaagatgctctctacgatgtcatcactgtgggagccccagctgcccattttcagggatttaagaatggtggtcttcggaagctactccatagatttgaaacagaaagaagaaataccggataccagtttatttactattcacctgaaaacacagccaaagcaaaggaagttctcagcaacatcaatcaactacaacctcttatagcaacccatgcagacctactgcttaattctgcaagccagcattctccagacagcttgaagaattctttaaagatgctttcagaaaaaacagagctttttgtacatgccttcaaggatcaacttgtcaggagtgctcttttagcactctacactgcaaggccaggaggcattcttaagaagccaccctctcctaagagcagcacagaggagagcagtccccaagaccaacccccagtgatgagagggcaggactccataccacatcattcagactatgatgaggaagagtgggacagggtgtgggccaatgtggggaagagcctgaactgcattattgctatggtggacaaactgattgaaagagatggtggcagtgaaggcagtggcggcaacaatgatggagaaaaggaaccttcattaacagatgccattccctctcacccaagagaggactggtatgaacagttgtatcccctcatccttaccctgaaggactgcatgggagaagtggtgaaccgagccaagcagtccctgacatttgtgctccttcaggaacttgcgtacagcttgccccagtgtctgatgctgacgctaagaagagacatcgtcttcagccaagcacttgctggattggtttgtggttttatcatcaaattacagacaagtctgtatgacccaggcttcctacagcagcttcacacagtggggttgatagtacaatatgaaggactgctaagtacatacagcgatgaaattggaatgctagaggacatggccgttggcatttccgatttaaagaaagttgcatttaaaataattgaagccaaatccaatgatgtgttgccagttataacaggaagacgagaacattacgtggtagaggtcaagcttccagccagaatgtttgagtcactacctctacagattaaagaaggacagttgcttcatgtgtatccagtactttttaatgttggaatcaatgaacagcaaactctggctgaaaggtttggagatgtctctttgcaagaaagtattaatcaggaaaacttcgaacttctacaagaatattacaagatatttatggaaaagatgcctcctgattatatttcacattttcaggaacaaaatgatttaaaagcattgctagaaaatctccttcaaaatatccaatccaaaaaaagaaagaatgtagaaattatgtggctggctgcaacgatttgccgcaaactgaatggtattcgtttcacctgttgtaaaagtgccaaagacaggacatcgatgtcagtgacacttgaacaatgctcaatcttgagagatgagcaccagttacacaaggacttctttatccgagcgctggattgcatgagaagagaaggatgccgcatagagaatgtactgaagaatatcaaatgcagaaagtatgctttcaacatgctacagctgatggctttccccaagtactacagacctccagaggggacttatggaaaagctgacacctaagtttaccaacatgttaataaacaggaacacaaatacatttcagttggataatcttcaccttggtcttttttgtttgtttttattgtcatgaatttgtggtgggggagatgatcacagatgtttcccaaaatctaggaactacttcaattcatcatcagcatattgctctgaaagaaatccattttaaaaaatcttacatgattcagtactgtcatttctagttctaagcttctatgtgttgagcctagctgattgagattggttcacaaagtgtaaatttcattcatgagtatttaaatgtttctgaggaaacatggatcatttcaataggactaggggtgattcacagagcaccactctccaaccaaatggaagagaggagagggggaaaaggaacatattttttttgtgatacaacttaatagcctatgagaacacagtcaacctgagaatcaatgtaagggatttaaaaaaaatgtgtagccactcaattaggtagagttaactcatgatctggaatactgaggcagtttgcaggtatgttccacaatgatctctatcatccagtcaaggtgtgactcctcccttgcaacaggcatatgcatggagtgagtaaagtggtcaacagacctttcaaaaccatggcatcttttcagaactctgacttgggttgtgtgatctagctgtgaatgtagcaatatagaacgtttaatagaatgataagcaaaacactgcaatgatctaaaattacaaataaaataaaaatgaacaacattttgatacccaaaatgaaaattcccatcagcctgaactttatgttgtgaagttcatgaatgtcagtgaggtatctctgagatgtttcttagcagtcatcctggtgtaagcatgcagttatggcataggtttgtgtgtgttaataagcctttaaaacatatgcaaccacaacaaatgataaagtaaaacaattattttctgttgccctgaatatcaaacttgcccttgcccttactcagcaaaataacatttataagttttccaaaatcccaaagtagaagtttccttaaaaaaatcatcttgtataataccagtattcaaacatgggtaaggttaatcacccccaatcactcaggagatagttgcagaatttgaattacaatctcttcttactttcctagcctgtggcttgtcacttctccaaattgccatgctaaatatgcatgaaaattgagggagaatgctagttaaaaagaaattaggatttatcactggaattgaaactaagagtacaaaagtctgaacgaatgaaacttttctccaaattttacaaattcttgttcctttctcattagaagagcatgctatccaaagcataaatctcccttgaaaataacagaggcttcttaagccctctcttagctatgatcaatggatgatattatgcttcccatagctaatgtgatagctccttgcctaggattcctgttgaaataaggattctagccccatgttaagtttttcaaattactacaaattttagataagcatttggagctttttatactagaattatcaattttttattttagctaattacctgtgggcattatacttgaggcaggtaccaaactacttacagcctttttaatgaaaatgtgctgtgtactttgaatccattcatagacaaaattaccttgatgttctcttaactcattctttattttagtgattaaatacaacctttgagttgttcaatatcatttgaaaatggtaggatttgtggttattttcattaccctattagatttaagataggctgggatgacagaggcctccttgaatagctatgaagcctcattcagcatatcaaatggtagtctgagttctaagaaaccttaagtaatttatcattctgtaaatactcttataagcaataatttttatttgtatttttgaaaacaaactacttaaatatggaaaaatattaactggaaagccagcagtagggttttctattttt

SEQ ID NO: 3999 - protein, 924 aa, Homo sapiens; identical to SEQ ID NO: 3995

SEQ ID NO: 4000 - DNA, 5091 bp, Homo sapiens
acagctcctcctgggcgcgcacacgctcacacgctcgcaagcgaacgcaggaaagtcaggctaaaagtgtctgctgctgctgccgccccccactccgcctccgggagagagccttgaaaccagcgaaacaataatcaaagagcagttctgtcaaagaaaacaacataaatcaggtacagaatttcagagtgggatatcagatctttagtgtgaagatacatctacattaaaccaggaatcactagaactgacatttggacaagaaaatttggaaaattttaaaactgtgaaggttgatcatggaaattaaagaggaaggggcatcagaagaagggcagcactttcttcctacagcccaggccaatgatcccggggactgtcagttcacaagtatccagaagactccaaatgaaccgcagttggaattcatccttgcatgcaaggatctcgtggctcctgtccgtgatcgtaaactgaatacactggtgcagatctccgtaatccaccccgtggagcagagtctgacaagatactccagcaccgaaattgtggagggaacaagggacccactgtttttgactggtgtcacattcccatctgagtatcccatctatgaggagaccaaaataaaactaacagtctatgatgtcaaggataagtctcatgacaccgttcgaaccagtgtcctaccagaacataaggatcccccgccagaagttgggcgaagtttcttgggctatgccagttttaaagtgggagagctgctgaagtcaaaggagcaattgctggtcctgagcctgagaacttcagatggtggcaaagtggttggcaccatagaagtcagtgtcgtgaagatgggggagattgaggatggggaagccgaccacatcaccacagatgtacagggacaaaagtgtgccctggtatgtgaatgtacagccccggaaagtgtgagcggaaaagataacttaccttttttgaattcagtgttaaagaacccagtatgtaaattatatagatttcccacatctgacaataagtggatgcgaattcgagagcagatgtcagagagcattctttcctttcatattcctaaggaattgatttcccttcacattaaagaagatttgtgcagaaaccaggagataaaagaacttggtgagctttctccacattgggacaatctgcgaaaaaatgtccttactcactgtgatcaaatggtgaatatgtaccaagacattctgacagaacttagcaaggaaacagggtcctctttcaaatcaagcagcagcaaaggagagaaaacattagaatttgttccaataaatctacatctgcaaagaatgcaggtacacagccctcacttgaaagatgctctctacgatgtcatcactgtgggagccccagctgcccattttcagggatttaagaatggtggtcttcggaagctactccatagatttgaaacagaaagaagaaataccggataccagtttatttactattcacctgaaaacacagccaaagcaaaggaagttctcagcaacatcaatcaactacaacctcttatagcaacccatgcagacctactgcttaattctgcaagccagcattctccagacagcttgaagaattctttaaagatgctttcagaaaaaacagagctttttgtacatgccttcaaggatcaacttgtcaggagtgctcttttagcactctacactgcaaggccaggaggcattcttaagaagccaccctctcctaagagcagcacagaggagagcagtccccaagaccaacccccagtgatgagagggcaggactccataccacatcattcagactatgatgaggaagagtgggacagggtgtgggccaatgtggggaagagcctgaactgcattattgctatggtggacaaactgattgaaagagatggtggcagtgaaggcagtggcggcaacaatgatggagaaaaggaaccttcattaacagatgccattccctctcacccaagagaggactggtatgaacagttgtatcccctcatccttaccctgaaggactgcatgggagaagtggtgaaccgagccaagcagtccctgacatttgtgctccttcaggaacttgcgtacagcttgccccagtgtctgatgctgacgctaagaagagacatcgtcttcagccaagcacttgctggattggtttgtggttttatcatcaaattacagacaagtctgtatgacccaggcttcctacagcagcttcacacagtggggttgatagtacaatatgaaggactgctaagtacatacagcgatgaaattggaatgctagaggacatggccgttggcatttccgatttaaagaaagttgcatttaaaataattgaagccaaatccaatgatgtgttgccagttataacaggaagacgagaacattacgtggtagaggtcaagcttccagccagaatgtttgagtcactacctctacagattaaagaaggacagttgcttcatgtgtatccagtactttttaatgttggaatcaatgaacagcaaactctggctgaaaggtttggagatgtctctttgcaagaaagtattaatcaggaaaacttcgaacttctacaagaatattacaagatatttatggaaaagatgcctcctgattatatttcacattttcaggaacaaaatgatttaaaagcattgctagaaaatctccttcaaaatatccaatccaaaaaaagaaagaatgtagaaattatgtggctggctgcaacgatttgccgcaaactgaatggtattcgtttcacctgttgtaaaagtgccaaagacaggacatcgatgtcagtgacacttgaacaatgctcaatcttgagagatgagcaccagttacacaaggacttctttatccgagcgctggattgcatgagaagagaaggatgccgcatagagaatgtactgaagaatatcaaatgcagaaagtatgctttcaacatgctacagctgatggctttccccaagtactacagacctccagaggggacttatggaaaagctgacacctaagtttaccaacatgttaataaacaggaacacaaatacatttcagttggataatcttcaccttggtcttttttgtttgtttttattgtcatgaatttgtggtgggggagatgatcacagatgtttcccaaaatctaggaactacttcaattcatcatcagcatattgctctgaaagaaatccattttaaaaaatcttacatgattcagtactgtcatttctagttctaagcttctatgtgttgagcctagctgattgagattggttcacaaagtgtaaatttcattcatgagtatttaaatgtttctgaggaaacatggatcatttcaataggactaggggtgattcacagagcaccactctccaaccaaatggaagagaggagagggggaaaaggaacatattttttttgtgatacaacttaatagcctatgagaacacagtcaacctgagaatcaatgtaagggatttaaaaaaaatgtgtagccactcaattaggtagagttaactcatgatctggaatactgaggcagtttgcaggtatgttccacaatgatctctatcatccagtcaaggtgtgactcctcccttgcaacaggcatatgcatggagtgagtaaagtggtcaacagacctttcaaaaccatggcatcttttcagaactctgacttgggttgtgtgatctagctgtgaatgtagcaatatagaacgtttaatagaatgataagcaaaacactgcaatgatctaaaattacaaataaaataaaaatgaacaacattttgatacccaaaatgaaaattcccatcagcctgaactttatgttgtgaagttcatgaatgtcagtgaggtatctctgagatgtttcttagcagtcatcctggtgtaagcatgcagttatggcataggtttgtgtgtgttaataagcctttaaaacatatgcaaccacaacaaatgataaagtaaaacaattattttctgttgccctgaatatcaaacttgcccttgcccttactcagcaaaataacatttataagttttccaaaatcccaaagtagaagtttccttaaaaaaatcatcttgtataataccagtattcaaacatgggtaaggttaatcacccccaatcactcaggagatagttgcagaatttgaattacaatctcttcttactttcctagcctgtggcttgtcacttctccaaattgccatgctaaatatgcatgaaaattgagggagaatgctagttaaaaagaaattaggatttatcactggaattgaaactaagagtacaaaagtctgaacgaatgaaacttttctccaaattttacaaattcttgttcctttctcattagaagagcatgctatccaaagcataaatctcccttgaaaataacagaggcttcttaagccctctcttagctatgatcaatggatgatattatgcttcccatagctaatgtgatagctccttgcctaggattcctgttgaaataaggattctagccccatgttaagtttttcaaattactacaaattttagataagcatttggagctttttatactagaattatcaattttttattttagctaattacctgtgggcattatacttgaggcaggtaccaaactacttacagcctttttaatgaaaatgtgctgtgtactttgaatccattcatagacaaaattaccttgatgttctcttaactcattctttattttagtgattaaatacaacctttgagttgttcaatatcatttgaaaatggtaggatttgtggttattttcattaccctattagatttaagataggctgggatgacagaggcctccttgaatagctatgaagcctcattcagcatatcaaatggtagtctgagttctaagaaaccttaagtaatttatcattctgtaaatactcttataagcaataatttttatttgtatttttgaaaacaaactacttaaatatggaaaaatattaactggaaagccagcagtagggttttctattttt

SEQ ID NO: 4001 - protein, 924 aa, Homo sapiens; identical to SEQ ID NO: 3995

SEQ ID NO: 4002 - DNA, 5372 bp, Homo sapiens
agccggagagccagccgcgctggtgacaacttctctggggcgcgcgcggggctggtaggcgaggagcgagcagggagcgcggccgaagccagaggctgggggagctgctggagcctcgcgaagccgcggccggcgccctgcgccgtcgccgccgcctgctagtttcctccgggttctcagccccgggtactgaggcttcggtctataaatagcaggttacagctcctcctgggcgcgcacacgctcacacgctcgcaagcgaacgcaggaaagtcaggctaaaagtgtctgctgctgctgccgccccccactccgcctccgggagagaatacaaagaaatggtgttacctggcaagaggtcttctgtcttttatgaaaaattagacaaagagccttgaaaccagcgaaacaataatcaaagagcagttctgtcaaagaaaacaacataaatcaggtacagaatttcagagtgggatatcagatctttagtgtgaagatacatctacattaaaccaggaatcactagaactgacatttggacaagaaaatttggaaaattttaaaactgtgaaggttgatcatggaaattaaagaggaaggggcatcagaagaagggcagcactttcttcctacagcccaggccaatgatcccggggactgtcagttcacaagtatccagaagactccaaatgaaccgcagttggaattcatccttgcatgcaaggatctcgtggctcctgtccgtgatcgtaaactgaatacactggtgcagatctccgtaatccaccccgtggagcagagtctgacaagatactccagcaccgaaattgtggagggaacaagggacccactgtttttgactggtgtcacattcccatctgagtatcccatctatgaggagaccaaaataaaactaacagtctatgatgtcaaggataagtctcatgacaccgttcgaaccagtgtcctaccagaacataaggatcccccgccagaagttgggcgaagtttcttgggctatgccagttttaaagtgggagagctgctgaagtcaaaggagcaattgctggtcctgagcctgagaacttcagatggtggcaaagtggttggcaccatagaagtcagtgtcgtgaagatgggggagattgaggatggggaagccgaccacatcaccacagatgtacagggacaaaagtgtgccctggtatgtgaatgtacagccccggaaagtgtgagcggaaaagataacttaccttttttgaattcagtgttaaagaacccagtatgtaaattatatagatttcccacatctgacaataagtggatgcgaattcgagagcagatgtcagagagcattctttcctttcatattcctaaggaattgatttcccttcacattaaagaagatttgtgcagaaaccaggagataaaagaacttggtgagctttctccacattgggacaatctgcgaaaaaatgtccttactcactgtgatcaaatggtgaatatgtaccaagacattctgacagaacttagcaaggaaacagggtcctctttcaaatcaagcagcagcaaaggagagaaaacattagaatttgttccaataaatctacatctgcaaagaatgcaggtacacagccctcacttgaaagatgctctctacgatgtcatcactgtgggagccccagctgcccattttcagggatttaagaatggtggtcttcggaagctactccatagatttgaaacagaaagaagaaataccggataccagtttatttactattcacctgaaaacacagccaaagcaaaggaagttctcagcaacatcaatcaactacaacctcttatagcaacccatgcagacctactgcttaattctgcaagccagcattctccagacagcttgaagaattctttaaagatgctttcagaaaaaacagagctttttgtacatgccttcaaggatcaacttgtcaggagtgctcttttagcactctacactgcaaggccaggaggcattcttaagaagccaccctctcctaagagcagcacagaggagagcagtccccaagaccaacccccagtgatgagagggcaggactccataccacatcattcagactatgatgaggaagagtgggacagggtgtgggccaatgtggggaagagcctgaactgcattattgctatggtggacaaactgattgaaagagatggtggcagtgaaggcagtggcggcaacaatgatggagaaaaggaaccttcattaacagatgccattccctctcacccaagagaggactggtatgaacagttgtatcccctcatccttaccctgaaggactgcatgggagaagtggtgaaccgagccaagcagtccctgacatttgtgctccttcaggaacttgcgtacagcttgccccagtgtctgatgctgacgctaagaagagacatcgtcttcagccaagcacttgctggattggtttgtggttttatcatcaaattacagacaagtctgtatgacccaggcttcctacagcagcttcacacagtggggttgatagtacaatatgaaggactgctaagtacatacagcgatgaaattggaatgctagaggacatggccgttggcatttccgatttaaagaaagttgcatttaaaataattgaagccaaatccaatgatgtgttgccagttataacaggaagacgagaacattacgtggtagaggtcaagcttccagccagaatgtttgagtcactacctctacagattaaagaaggacagttgcttcatgtgtatccagtactttttaatgttggaatcaatgaacagcaaactctggctgaaaggtttggagatgtctctttgcaagaaagtattaatcaggaaaacttcgaacttctacaagaatattacaagatatttatggaaaagatgcctcctgattatatttcacattttcaggaacaaaatgatttaaaagcattgctagaaaatctccttcaaaatatccaatccaaaaaaagaaagaatgtagaaattatgtggctggctgcaacgatttgccgcaaactgaatggtattcgtttcacctgttgtaaaagtgccaaagacaggacatcgatgtcagtgacacttgaacaatgctcaatcttgagagatgagcaccagttacacaaggacttctttatccgagcgctggattgcatgagaagagaaggatgccgcatagagaatgtactgaagaatatcaaatgcagaaagtatgctttcaacatgctacagctgatggctttccccaagtactacagacctccagaggggacttatggaaaagctgacacctaagtttaccaacatgttaataaacaggaacacaaatacatttcagttggataatcttcaccttggtcttttttgtttgtttttattgtcatgaatttgtggtgggggagatgatcacagatgtttcccaaaatctaggaactacttcaattcatcatcagcatattgctctgaaagaaatccattttaaaaaatcttacatgattcagtactgtcatttctagttctaagcttctatgtgttgagcctagctgattgagattggttcacaaagtgtaaatttcattcatgagtatttaaatgtttctgaggaaacatggatcatttcaataggactaggggtgattcacagagcaccactctccaaccaaatggaagagaggagagggggaaaaggaacatattttttttgtgatacaacttaatagcctatgagaacacagtcaacctgagaatcaatgtaagggatttaaaaaaaatgtgtagccactcaattaggtagagttaactcatgatctggaatactgaggcagtttgcaggtatgttccacaatgatctctatcatccagtcaaggtgtgactcctcccttgcaacaggcatatgcatggagtgagtaaagtggtcaacagacctttcaaaaccatggcatcttttcagaactctgacttgggttgtgtgatctagctgtgaatgtagcaatatagaacgtttaatagaatgataagcaaaacactgcaatgatctaaaattacaaataaaataaaaatgaacaacattttgatacccaaaatgaaaattcccatcagcctgaactttatgttgtgaagttcatgaatgtcagtgaggtatctctgagatgtttcttagcagtcatcctggtgtaagcatgcagttatggcataggtttgtgtgtgttaataagcctttaaaacatatgcaaccacaacaaatgataaagtaaaacaattattttctgttgccctgaatatcaaacttgcccttgcccttactcagcaaaataacatttataagttttccaaaatcccaaagtagaagtttccttaaaaaaatcatcttgtataataccagtattcaaacatgggtaaggttaatcacccccaatcactcaggagatagttgcagaatttgaattacaatctcttcttactttcctagcctgtggcttgtcacttctccaaattgccatgctaaatatgcatgaaaattgagggagaatgctagttaaaaagaaattaggatttatcactggaattgaaactaagagtacaaaagtctgaacgaatgaaacttttctccaaattttacaaattcttgttcctttctcattagaagagcatgctatccaaagcataaatctcccttgaaaataacagaggcttcttaagccctctcttagctatgatcaatggatgatattatgcttcccatagctaatgtgatagctccttgcctaggattcctgttgaaataaggattctagccccatgttaagtttttcaaattactacaaattttagataagcatttggagctttttatactagaattatcaattttttattttagctaattacctgtgggcattatacttgaggcaggtaccaaactacttacagcctttttaatgaaaatgtgctgtgtactttgaatccattcatagacaaaattaccttgatgttctcttaactcattctttattttagtgattaaatacaacctttgagttgttcaatatcatttgaaaatggtaggatttgtggttattttcattaccctattagatttaagataggctgggatgacagaggcctccttgaatagctatgaagcctcattcagcatatcaaatggtagtctgagttctaagaaaccttaagtaatttatcattctgtaaatactcttataagcaataatttttatttgtatttttgaaaacaaactacttaaatatggaaaaatattaactggaaagccagcagtagggttttctattttt

SEQ ID NO: 4003 - protein, 924 aa, Homo sapiens; identical to SEQ ID NO: 3995

SEQ ID NO: 4004 - DNA, 5103 bp, Homo sapiens
aaagcgcagatggggagagtcatttgccccacaccctacacagcccggaataaccaggaatacaaagaaatggtgttacctggcaagaggtcttctgtcttttatgaaaaattagacaaagagccttgaaaccagcgaaacaataatcaaagagcagttctgtcaaagaaaacaacataaatcaggtacagaatttcagagtgggatatcagatctttagtgtgaagatacatctacattaaaccaggaatcactagaactgacatttggacaagaaaatttggaaaattttaaaactgtgaaggttgatcatggaaattaaagaggaaggggcatcagaagaagggcagcactttcttcctacagcccaggccaatgatcccggggactgtcagttcacaagtatccagaagactccaaatgaaccgcagttggaattcatccttgcatgcaaggatctcgtggctcctgtccgtgatcgtaaactgaatacactggtgcagatctccgtaatccaccccgtggagcagagtctgacaagatactccagcaccgaaattgtggagggaacaagggacccactgtttttgactggtgtcacattcccatctgagtatcccatctatgaggagaccaaaataaaactaacagtctatgatgtcaaggataagtctcatgacaccgttcgaaccagtgtcctaccagaacataaggatcccccgccagaagttgggcgaagtttcttgggctatgccagttttaaagtgggagagctgctgaagtcaaaggagcaattgctggtcctgagcctgagaacttcagatggtggcaaagtggttggcaccatagaagtcagtgtcgtgaagatgggggagattgaggatggggaagccgaccacatcaccacagatgtacagggacaaaagtgtgccctggtatgtgaatgtacagccccggaaagtgtgagcggaaaagataacttaccttttttgaattcagtgttaaagaacccagtatgtaaattatatagatttcccacatctgacaataagtggatgcgaattcgagagcagatgtcagagagcattctttcctttcatattcctaaggaattgatttcccttcacattaaagaagatttgtgcagaaaccaggagataaaagaacttggtgagctttctccacattgggacaatctgcgaaaaaatgtccttactcactgtgatcaaatggtgaatatgtaccaagacattctgacagaacttagcaaggaaacagggtcctctttcaaatcaagcagcagcaaaggagagaaaacattagaatttgttccaataaatctacatctgcaaagaatgcaggtacacagccctcacttgaaagatgctctctacgatgtcatcactgtgggagccccagctgcccattttcagggatttaagaatggtggtcttcggaagctactccatagatttgaaacagaaagaagaaataccggataccagtttatttactattcacctgaaaacacagccaaagcaaaggaagttctcagcaacatcaatcaactacaacctcttatagcaacccatgcagacctactgcttaattctgcaagccagcattctccagacagcttgaagaattctttaaagatgctttcagaaaaaacagagctttttgtacatgccttcaaggatcaacttgtcaggagtgctcttttagcactctacactgcaaggccaggaggcattcttaagaagccaccctctcctaagagcagcacagaggagagcagtccccaagaccaacccccagtgatgagagggcaggactccataccacatcattcagactatgatgaggaagagtgggacagggtgtgggccaatgtggggaagagcctgaactgcattattgctatggtggacaaactgattgaaagagatggtggcagtgaaggcagtggcggcaacaatgatggagaaaaggaaccttcattaacagatgccattccctctcacccaagagaggactggtatgaacagttgtatcccctcatccttaccctgaaggactgcatgggagaagtggtgaaccgagccaagcagtccctgacatttgtgctccttcaggaacttgcgtacagcttgccccagtgtctgatgctgacgctaagaagagacatcgtcttcagccaagcacttgctggattggtttgtggttttatcatcaaattacagacaagtctgtatgacccaggcttcctacagcagcttcacacagtggggttgatagtacaatatgaaggactgctaagtacatacagcgatgaaattggaatgctagaggacatggccgttggcatttccgatttaaagaaagttgcatttaaaataattgaagccaaatccaatgatgtgttgccagttataacaggaagacgagaacattacgtggtagaggtcaagcttccagccagaatgtttgagtcactacctctacagattaaagaaggacagttgcttcatgtgtatccagtactttttaatgttggaatcaatgaacagcaaactctggctgaaaggtttggagatgtctctttgcaagaaagtattaatcaggaaaacttcgaacttctacaagaatattacaagatatttatggaaaagatgcctcctgattatatttcacattttcaggaacaaaatgatttaaaagcattgctagaaaatctccttcaaaatatccaatccaaaaaaagaaagaatgtagaaattatgtggctggctgcaacgatttgccgcaaactgaatggtattcgtttcacctgttgtaaaagtgccaaagacaggacatcgatgtcagtgacacttgaacaatgctcaatcttgagagatgagcaccagttacacaaggacttctttatccgagcgctggattgcatgagaagagaaggatgccgcatagagaatgtactgaagaatatcaaatgcagaaagtatgctttcaacatgctacagctgatggctttccccaagtactacagacctccagaggggacttatggaaaagctgacacctaagtttaccaacatgttaataaacaggaacacaaatacatttcagttggataatcttcaccttggtcttttttgtttgtttttattgtcatgaatttgtggtgggggagatgatcacagatgtttcccaaaatctaggaactacttcaattcatcatcagcatattgctctgaaagaaatccattttaaaaaatcttacatgattcagtactgtcatttctagttctaagcttctatgtgttgagcctagctgattgagattggttcacaaagtgtaaatttcattcatgagtatttaaatgtttctgaggaaacatggatcatttcaataggactaggggtgattcacagagcaccactctccaaccaaatggaagagaggagagggggaaaaggaacatattttttttgtgatacaacttaatagcctatgagaacacagtcaacctgagaatcaatgtaagggatttaaaaaaaatgtgtagccactcaattaggtagagttaactcatgatctggaatactgaggcagtttgcaggtatgttccacaatgatctctatcatccagtcaaggtgtgactcctcccttgcaacaggcatatgcatggagtgagtaaagtggtcaacagacctttcaaaaccatggcatcttttcagaactctgacttgggttgtgtgatctagctgtgaatgtagcaatatagaacgtttaatagaatgataagcaaaacactgcaatgatctaaaattacaaataaaataaaaatgaacaacattttgatacccaaaatgaaaattcccatcagcctgaactttatgttgtgaagttcatgaatgtcagtgaggtatctctgagatgtttcttagcagtcatcctggtgtaagcatgcagttatggcataggtttgtgtgtgttaataagcctttaaaacatatgcaaccacaacaaatgataaagtaaaacaattattttctgttgccctgaatatcaaacttgcccttgcccttactcagcaaaataacatttataagttttccaaaatcccaaagtagaagtttccttaaaaaaatcatcttgtataataccagtattcaaacatgggtaaggttaatcacccccaatcactcaggagatagttgcagaatttgaattacaatctcttcttactttcctagcctgtggcttgtcacttctccaaattgccatgctaaatatgcatgaaaattgagggagaatgctagttaaaaagaaattaggatttatcactggaattgaaactaagagtacaaaagtctgaacgaatgaaacttttctccaaattttacaaattcttgttcctttctcattagaagagcatgctatccaaagcataaatctcccttgaaaataacagaggcttcttaagccctctcttagctatgatcaatggatgatattatgcttcccatagctaatgtgatagctccttgcctaggattcctgttgaaataaggattctagccccatgttaagtttttcaaattactacaaattttagataagcatttggagctttttatactagaattatcaattttttattttagctaattacctgtgggcattatacttgaggcaggtaccaaactacttacagcctttttaatgaaaatgtgctgtgtactttgaatccattcatagacaaaattaccttgatgttctcttaactcattctttattttagtgattaaatacaacctttgagttgttcaatatcatttgaaaatggtaggatttgtggttattttcattaccctattagatttaagataggctgggatgacagaggcctccttgaatagctatgaagcctcattcagcatatcaaatggtagtctgagttctaagaaaccttaagtaatttatcattctgtaaatactcttataagcaataatttttatttgtatttttgaaaacaaactacttaaatatggaaaaatattaactggaaagccagcagtagggttttctattttt

SEQ ID NO: 4005 - protein, 924 aa, Homo sapiens; identical to SEQ ID NO: 3995

SEQ ID NO: 4006 - DNA, 3234 bp, Homo sapiens
ggatgtttcctgccctcgaacatcagaatccatgtttttcagcttttgggctcttggacttacaccagtggtttgccagggccccccagccttcgaccacagattgaaggctacactgttggcctccctacttttgaggttttggaacttggactggcttccttgctcctcagtttgcagacagcctattgtggaacttcaccttgtgatcgtagccttgaaaccagcgaaacaataatcaaagagcagttctgtcaaagaaaacaacataaatcaggtacagaatttcagagtgggatatcagatctttagtgtgaagatacatctacattaaaccaggaatcactagaactgacatttggacaagaaaatttggaaaattttaaaactgtgaaggttgatcatggaaattaaagaggaaggggcatcagaagaagggcagcactttcttcctacagcccaggccaatgatcccggggactgtcagttcacaagtatccagaagactccaaatgaaccgcagttggaattcatccttgcatgcaaggatctcgtggctcctgtccgtgatcgtaaactgaatacactggtgcagatctccgtaatccaccccgtggagcagagtctgacaagatactccagcaccgaaattgtggagggaacaagggacccactgtttttgactggtgtcacattcccatctgagtatcccatctatgaggagaccaaaataaaactaacagtctatgatgtcaaggataagtctcatgacaccgttcgaaccagtgtcctaccagaacataaggatcccccgccagaagttgggcgaagtttcttgggctatgccagttttaaagtgggagagctgctgaagtcaaaggagcaattgctggtcctgagcctgagaacttcagatggtggcaaagtggttggcaccatagaagtcagtgtcgtgaagatgggggagattgaggatggggaagccgaccacatcaccacagatgtacagggacaaaagtgtgccctggtatgtgaatgtacagccccggaaagtgtgagcggaaaagataacttaccttttttgaattcagtgttaaagaacccagtatgtaaattatatagatttcccacatctgacaataagtggatgcgaattcgagagcagatgtcagagagcattctttcctttcatattcctaaggaattgatttcccttcacattaaagaagatttgtgcagaaaccaggagataaaagaacttggtgagctttctccacattgggacaatctgcgaaaaaatgtccttactcactgtgatcaaatggtgaatatgtaccaagacattctgacagaacttagcaaggaaacagggtcctctttcaaatcaagcagcagcaaaggagagaaaacattagaatttgttccaataaatctacatctgcaaagaatgcaggtacacagccctcacttgaaagatgctctctacgatgtcatcactgtgggagccccagctgcccattttcagggatttaagaatggtggtcttcggaagctactccatagatttgaaacagaaagaagaaataccggataccagtttatttactattcacctgaaaacacagccaaagcaaaggaagttctcagcaacatcaatcaactacaacctcttatagcaacccatgcagacctactgcttaattctgcaagccagcattctccagacagcttgaagaattctttaaagatgctttcagaaaaaacagagctttttgtacatgccttcaaggatcaacttgtcaggagtgctcttttagcactctacactgcaaggccaggaggcattcttaagaagccaccctctcctaagagcagcacagaggagagcagtccccaagaccaacccccagtgatgagagggcaggactccataccacatcattcagactatgatgaggaagagtgggacagggtgtgggccaatgtggggaagagcctgaactgcattattgctatggtggacaaactgattgaaagagatggtggcagtgaaggcagtggcggcaacaatgatggagaaaaggaaccttcattaacagatgccattccctctcacccaagagaggactggtatgaacagttgtatcccctcatccttaccctgaaggactgcatgggagaagtggtgaaccgagccaagcagtccctgacatttgtgctccttcaggaacttgcgtacagcttgccccagtgtctgatgctgacgctaagaagagacatcgtcttcagccaagcacttgctggattggtttgtggttttatcatcaaattacagacaagtctgtatgacccaggcttcctacagcagcttcacacagtggggttgatagtacaatatgaaggactgctaagtacatacagcgatgaaattggaatgctagaggacatggccgttggcatttccgatttaaagaaagttgcatttaaaataattgaagccaaatccaatgatgtgttgccagttataacaggaagacgagaacattacgtggtagaggtcaagcttccagccagaatgtttgagtcactacctctacagattaaagaaggacagttgcttcatgtgtatccagtactttttaatgttggaatcaatgaacagcaaactctggctgaaaggtttggagatgtctctttgcaagaaagtattaatcaggaaaacttcgaacttctacaagaatattacaagatatttatggaaaagatgcctcctgattatatttcacattttcaggaacaaaatgatttaaaagcattgctagaaaatctccttcaaaatatccaatccaaaaaaagaaagaatgtagaaattatgtggctggctgcaacgatttgccgcaaactgaatggtattcgtttcacctgttgtaaaagtgccaaagacaggacatcgatgtcagtgacacttgaacaatgctcaatcttgagagatgagcaccagttacacaaggacttctttatccgagcgctggattgcatgagaagagaaggatgccgcatagagaatgtactgaagaatatcaaatgcagaaagtatgctttcaacatgctacagctgatggctttccccaagtactacagacctccagaggggacttatggaaaagctgacacctaagtttaccaacatgttaataaacaggaacacaaatacatttcagttggataatcttc

SEQ ID NO: 4007 - protein, 924 aa, Homo sapiens; identical to SEQ ID NO: 3995

SEQ ID NO: 4008 - DNA, 3264 bp, Homo sapiens
acacgctcgcaagcgaacgcaggaaagtcaggctaaaagtgtctgctgctgctgccgccccccactccgcctccgggagagaatacaaagaaatggtgttacctggcaagaggtcttctgtcttttatgaaaaattagacaaaggctttacaggaggcatagtactggaaatctgctcctgatgaggtctcagaaagcttccactcgtggtggaaggcaaaggaggagcaggcacatcacatgagccttgaaaccagcgaaacaataatcaaagagcagttctgtcaaagaaaacaacataaatcaggtacagaatttcagagtgggatatcagatctttagtgtgaagatacatctacattaaaccaggaatcactagaactgacatttggacaagaaaatttggaaaattttaaaactgtgaaggttgatcatggaaattaaagaggaaggggcatcagaagaagggcagcactttcttcctacagcccaggccaatgatcccggggactgtcagttcacaagtatccagaagactccaaatgaaccgcagttggaattcatccttgcatgcaaggatctcgtggctcctgtccgtgatcgtaaactgaatacactggtgcagatctccgtaatccaccccgtggagcagagtctgacaagatactccagcaccgaaattgtggagggaacaagggacccactgtttttgactggtgtcacattcccatctgagtatcccatctatgaggagaccaaaataaaactaacagtctatgatgtcaaggataagtctcatgacaccgttcgaaccagtgtcctaccagaacataaggatcccccgccagaagttgggcgaagtttcttgggctatgccagttttaaagtgggagagctgctgaagtcaaaggagcaattgctggtcctgagcctgagaacttcagatggtggcaaagtggttggcaccatagaagtcagtgtcgtgaagatgggggagattgaggatggggaagccgaccacatcaccacagatgtacagggacaaaagtgtgccctggtatgtgaatgtacagccccggaaagtgtgagcggaaaagataacttaccttttttgaattcagtgttaaagaacccagtatgtaaattatatagatttcccacatctgacaataagtggatgcgaattcgagagcagatgtcagagagcattctttcctttcatattcctaaggaattgatttcccttcacattaaagaagatttgtgcagaaaccaggagataaaagaacttggtgagctttctccacattgggacaatctgcgaaaaaatgtccttactcactgtgatcaaatggtgaatatgtaccaagacattctgacagaacttagcaaggaaacagggtcctctttcaaatcaagcagcagcaaaggagagaaaacattagaatttgttccaataaatctacatctgcaaagaatgcaggtacacagccctcacttgaaagatgctctctacgatgtcatcactgtgggagccccagctgcccattttcagggatttaagaatggtggtcttcggaagctactccatagatttgaaacagaaagaagaaataccggataccagtttatttactattcacctgaaaacacagccaaagcaaaggaagttctcagcaacatcaatcaactacaacctcttatagcaacccatgcagacctactgcttaattctgcaagccagcattctccagacagcttgaagaattctttaaagatgctttcagaaaaaacagagctttttgtacatgccttcaaggatcaacttgtcaggagtgctcttttagcactctacactgcaaggccaggaggcattcttaagaagccaccctctcctaagagcagcacagaggagagcagtccccaagaccaacccccagtgatgagagggcaggactccataccacatcattcagactatgatgaggaagagtgggacagggtgtgggccaatgtggggaagagcctgaactgcattattgctatggtggacaaactgattgaaagagatggtggcagtgaaggcagtggcggcaacaatgatggagaaaaggaaccttcattaacagatgccattccctctcacccaagagaggactggtatgaacagttgtatcccctcatccttaccctgaaggactgcatgggagaagtggtgaaccgagccaagcagtccctgacatttgtgctccttcaggaacttgcgtacagcttgccccagtgtctgatgctgacgctaagaagagacatcgtcttcagccaagcacttgctggattggtttgtggttttatcatcaaattacagacaagtctgtatgacccaggcttcctacagcagcttcacacagtggggttgatagtacaatatgaaggactgctaagtacatacagcgatgaaattggaatgctagaggacatggccgttggcatttccgatttaaagaaagttgcatttaaaataattgaagccaaatccaatgatgtgttgccagttataacaggaagacgagaacattacgtggtagaggtcaagcttccagccagaatgtttgagtcactacctctacagattaaagaaggacagttgcttcatgtgtatccagtactttttaatgttggaatcaatgaacagcaaactctggctgaaaggtttggagatgtctctttgcaagaaagtattaatcaggaaaacttcgaacttctacaagaatattacaagatatttatggaaaagatgcctcctgattatatttcacattttcaggaacaaaatgatttaaaagcattgctagaaaatctccttcaaaatatccaatccaaaaaaagaaagaatgtagaaattatgtggctggctgcaacgatttgccgcaaactgaatggtattcgtttcacctgttgtaaaagtgccaaagacaggacatcgatgtcagtgacacttgaacaatgctcaatcttgagagatgagcaccagttacacaaggacttctttatccgagcgctggattgcatgagaagagaaggatgccgcatagagaatgtactgaagaatatcaaatgcagaaagtatgctttcaacatgctacagctgatggctttccccaagtactacagacctccagaggggacttatggaaaagctgacacctaagtttaccaacatgttaataaacaggaacacaaatacatttcagttggataatcttc

SEQ ID NO: 4009 - protein, 924 aa, Homo sapiens; identical to SEQ ID NO: 3995

SEQ ID NO: 4010 - DNA, 3297 bp, Homo sapiens
gcgcacacgctcacacgctcgcaagcgaacgcaggaaagtcaggctaaaagtgtctgctgctgctgccgccccccactccgcctccgggagagaatacaaagaaatggtgttacctggcaagaggtcttctgtcttttatgaaaaattagacaaagggggcgctgttttggggaaatggcagaactccctcagaggctgatctaagggttcccggcagaaggggccatcttcagaggctctggttgcatgactgtttggagtttgatggcctgaagagccttgaaaccagcgaaacaataatcaaagagcagttctgtcaaagaaaacaacataaatcaggtacagaatttcagagtgggatatcagatctttagtgtgaagatacatctacattaaaccaggaatcactagaactgacatttggacaagaaaatttggaaaattttaaaactgtgaaggttgatcatggaaattaaagaggaaggggcatcagaagaagggcagcactttcttcctacagcccaggccaatgatcccggggactgtcagttcacaagtatccagaagactccaaatgaaccgcagttggaattcatccttgcatgcaaggatctcgtggctcctgtccgtgatcgtaaactgaatacactggtgcagatctccgtaatccaccccgtggagcagagtctgacaagatactccagcaccgaaattgtggagggaacaagggacccactgtttttgactggtgtcacattcccatctgagtatcccatctatgaggagaccaaaataaaactaacagtctatgatgtcaaggataagtctcatgacaccgttcgaaccagtgtcctaccagaacataaggatcccccgccagaagttgggcgaagtttcttgggctatgccagttttaaagtgggagagctgctgaagtcaaaggagcaattgctggtcctgagcctgagaacttcagatggtggcaaagtggttggcaccatagaagtcagtgtcgtgaagatgggggagattgaggatggggaagccgaccacatcaccacagatgtacagggacaaaagtgtgccctggtatgtgaatgtacagccccggaaagtgtgagcggaaaagataacttaccttttttgaattcagtgttaaagaacccagtatgtaaattatatagatttcccacatctgacaataagtggatgcgaattcgagagcagatgtcagagagcattctttcctttcatattcctaaggaattgatttcccttcacattaaagaagatttgtgcagaaaccaggagataaaagaacttggtgagctttctccacattgggacaatctgcgaaaaaatgtccttactcactgtgatcaaatggtgaatatgtaccaagacattctgacagaacttagcaaggaaacagggtcctctttcaaatcaagcagcagcaaaggagagaaaacattagaatttgttccaataaatctacatctgcaaagaatgcaggtacacagccctcacttgaaagatgctctctacgatgtcatcactgtgggagccccagctgcccattttcagggatttaagaatggtggtcttcggaagctactccatagatttgaaacagaaagaagaaataccggataccagtttatttactattcacctgaaaacacagccaaagcaaaggaagttctcagcaacatcaatcaactacaacctcttatagcaacccatgcagacctactgcttaattctgcaagccagcattctccagacagcttgaagaattctttaaagatgctttcagaaaaaacagagctttttgtacatgccttcaaggatcaacttgtcaggagtgctcttttagcactctacactgcaaggccaggaggcattcttaagaagccaccctctcctaagagcagcacagaggagagcagtccccaagaccaacccccagtgatgagagggcaggactccataccacatcattcagactatgatgaggaagagtgggacagggtgtgggccaatgtggggaagagcctgaactgcattattgctatggtggacaaactgattgaaagagatggtggcagtgaaggcagtggcggcaacaatgatggagaaaaggaaccttcattaacagatgccattccctctcacccaagagaggactggtatgaacagttgtatcccctcatccttaccctgaaggactgcatgggagaagtggtgaaccgagccaagcagtccctgacatttgtgctccttcaggaacttgcgtacagcttgccccagtgtctgatgctgacgctaagaagagacatcgtcttcagccaagcacttgctggattggtttgtggttttatcatcaaattacagacaagtctgtatgacccaggcttcctacagcagcttcacacagtggggttgatagtacaatatgaaggactgctaagtacatacagcgatgaaattggaatgctagaggacatggccgttggcatttccgatttaaagaaagttgcatttaaaataattgaagccaaatccaatgatgtgttgccagttataacaggaagacgagaacattacgtggtagaggtcaagcttccagccagaatgtttgagtcactacctctacagattaaagaaggacagttgcttcatgtgtatccagtactttttaatgttggaatcaatgaacagcaaactctggctgaaaggtttggagatgtctctttgcaagaaagtattaatcaggaaaacttcgaacttctacaagaatattacaagatatttatggaaaagatgcctcctgattatatttcacattttcaggaacaaaatgatttaaaagcattgctagaaaatctccttcaaaatatccaatccaaaaaaagaaagaatgtagaaattatgtggctggctgcaacgatttgccgcaaactgaatggtattcgtttcacctgttgtaaaagtgccaaagacaggacatcgatgtcagtgacacttgaacaatgctcaatcttgagagatgagcaccagttacacaaggacttctttatccgagcgctggattgcatgagaagagaaggatgccgcatagagaatgtactgaagaatatcaaatgcagaaagtatgctttcaacatgctacagctgatggctttccccaagtactacagacctccagaggggacttatggaaaagctgacacctaagtttaccaacatgttaataaacaggaacacaaatacatttcagttggataatcttc

SEQ ID NO: 4011 - protein, 924 aa, Homo sapiens; identical to SEQ ID NO: 3995

SEQ ID NO: 4012 - DNA, 3130 bp, Homo sapiens
acagctcctcctgggcgcgcacacgctcacacgctcgcaagcgaacgcaggaaagtcaggctaaaagtgtctgctgctgctgccgccccccactccgcctccgggagagagccttgaaaccagcgaaacaataatcaaagagcagttctgtcaaagaaaacaacataaatcaggtacagaatttcagagtgggatatcagatctttagtgtgaagatacatctacattaaaccaggaatcactagaactgacatttggacaagaaaatttggaaaattttaaaactgtgaaggttgatcatggaaattaaagaggaaggggcatcagaagaagggcagcactttcttcctacagcccaggccaatgatcccggggactgtcagttcacaagtatccagaagactccaaatgaaccgcagttggaattcatccttgcatgcaaggatctcgtggctcctgtccgtgatcgtaaactgaatacactggtgcagatctccgtaatccaccccgtggagcagagtctgacaagatactccagcaccgaaattgtggagggaacaagggacccactgtttttgactggtgtcacattcccatctgagtatcccatctatgaggagaccaaaataaaactaacagtctatgatgtcaaggataagtctcatgacaccgttcgaaccagtgtcctaccagaacataaggatcccccgccagaagttgggcgaagtttcttgggctatgccagttttaaagtgggagagctgctgaagtcaaaggagcaattgctggtcctgagcctgagaacttcagatggtggcaaagtggttggcaccatagaagtcagtgtcgtgaagatgggggagattgaggatggggaagccgaccacatcaccacagatgtacagggacaaaagtgtgccctggtatgtgaatgtacagccccggaaagtgtgagcggaaaagataacttaccttttttgaattcagtgttaaagaacccagtatgtaaattatatagatttcccacatctgacaataagtggatgcgaattcgagagcagatgtcagagagcattctttcctttcatattcctaaggaattgatttcccttcacattaaagaagatttgtgcagaaaccaggagataaaagaacttggtgagctttctccacattgggacaatctgcgaaaaaatgtccttactcactgtgatcaaatggtgaatatgtaccaagacattctgacagaacttagcaaggaaacagggtcctctttcaaatcaagcagcagcaaaggagagaaaacattagaatttgttccaataaatctacatctgcaaagaatgcaggtacacagccctcacttgaaagatgctctctacgatgtcatcactgtgggagccccagctgcccattttcagggatttaagaatggtggtcttcggaagctactccatagatttgaaacagaaagaagaaataccggataccagtttatttactattcacctgaaaacacagccaaagcaaaggaagttctcagcaacatcaatcaactacaacctcttatagcaacccatgcagacctactgcttaattctgcaagccagcattctccagacagcttgaagaattctttaaagatgctttcagaaaaaacagagctttttgtacatgccttcaaggatcaacttgtcaggagtgctcttttagcactctacactgcaaggccaggaggcattcttaagaagccaccctctcctaagagcagcacagaggagagcagtccccaagaccaacccccagtgatgagagggcaggactccataccacatcattcagactatgatgaggaagagtgggacagggtgtgggccaatgtggggaagagcctgaactgcattattgctatggtggacaaactgattgaaagagatggtggcagtgaaggcagtggcggcaacaatgatggagaaaaggaaccttcattaacagatgccattccctctcacccaagagaggactggtatgaacagttgtatcccctcatccttaccctgaaggactgcatgggagaagtggtgaaccgagccaagcagtccctgacatttgtgctccttcaggaacttgcgtacagcttgccccagtgtctgatgctgacgctaagaagagacatcgtcttcagccaagcacttgctggattggtttgtggttttatcatcaaattacagacaagtctgtatgacccaggcttcctacagcagcttcacacagtggggttgatagtacaatatgaaggactgctaagtacatacagcgatgaaattggaatgctagaggacatggccgttggcatttccgatttaaagaaagttgcatttaaaataattgaagccaaatccaatgatgtgttgccagttataacaggaagacgagaacattacgtggtagaggtcaagcttccagccagaatgtttgagtcactacctctacagattaaagaaggacagttgcttcatgtgtatccagtactttttaatgttggaatcaatgaacagcaaactctggctgaaaggtttggagatgtctctttgcaagaaagtattaatcaggaaaacttcgaacttctacaagaatattacaagatatttatggaaaagatgcctcctgattatatttcacattttcaggaacaaaatgatttaaaagcattgctagaaaatctccttcaaaatatccaatccaaaaaaagaaagaatgtagaaattatgtggctggctgcaacgatttgccgcaaactgaatggtattcgtttcacctgttgtaaaagtgccaaagacaggacatcgatgtcagtgacacttgaacaatgctcaatcttgagagatgagcaccagttacacaaggacttctttatccgagcgctggattgcatgagaagagaaggatgccgcatagagaatgtactgaagaatatcaaatgcagaaagtatgctttcaacatgctacagctgatggctttccccaagtactacagacctccagaggggacttatggaaaagctgacacctaagtttaccaacatgttaataaacaggaacacaaatacatttcagttggataatcttc

SEQ ID NO: 4013 - protein, 924 aa, Homo sapiens; identical to SEQ ID NO: 3995

SEQ ID NO: 4014 - DNA, 3411 bp, Homo sapiens
agccggagagccagccgcgctggtgacaacttctctggggcgcgcgcggggctggtaggcgaggagcgagcagggagcgcggccgaagccagaggctgggggagctgctggagcctcgcgaagccgcggccggcgccctgcgccgtcgccgccgcctgctagtttcctccgggttctcagccccgggtactgaggcttcggtctataaatagcaggttacagctcctcctgggcgcgcacacgctcacacgctcgcaagcgaacgcaggaaagtcaggctaaaagtgtctgctgctgctgccgccccccactccgcctccgggagagaatacaaagaaatggtgttacctggcaagaggtcttctgtcttttatgaaaaattagacaaagagccttgaaaccagcgaaacaataatcaaagagcagttctgtcaaagaaaacaacataaatcaggtacagaatttcagagtgggatatcagatctttagtgtgaagatacatctacattaaaccaggaatcactagaactgacatttggacaagaaaatttggaaaattttaaaactgtgaaggttgatcatggaaattaaagaggaaggggcatcagaagaagggcagcactttcttcctacagcccaggccaatgatcccggggactgtcagttcacaagtatccagaagactccaaatgaaccgcagttggaattcatccttgcatgcaaggatctcgtggctcctgtccgtgatcgtaaactgaatacactggtgcagatctccgtaatccaccccgtggagcagagtctgacaagatactccagcaccgaaattgtggagggaacaagggacccactgtttttgactggtgtcacattcccatctgagtatcccatctatgaggagaccaaaataaaactaacagtctatgatgtcaaggataagtctcatgacaccgttcgaaccagtgtcctaccagaacataaggatcccccgccagaagttgggcgaagtttcttgggctatgccagttttaaagtgggagagctgctgaagtcaaaggagcaattgctggtcctgagcctgagaacttcagatggtggcaaagtggttggcaccatagaagtcagtgtcgtgaagatgggggagattgaggatggggaagccgaccacatcaccacagatgtacagggacaaaagtgtgccctggtatgtgaatgtacagccccggaaagtgtgagcggaaaagataacttaccttttttgaattcagtgttaaagaacccagtatgtaaattatatagatttcccacatctgacaataagtggatgcgaattcgagagcagatgtcagagagcattctttcctttcatattcctaaggaattgatttcccttcacattaaagaagatttgtgcagaaaccaggagataaaagaacttggtgagctttctccacattgggacaatctgcgaaaaaatgtccttactcactgtgatcaaatggtgaatatgtaccaagacattctgacagaacttagcaaggaaacagggtcctctttcaaatcaagcagcagcaaaggagagaaaacattagaatttgttccaataaatctacatctgcaaagaatgcaggtacacagccctcacttgaaagatgctctctacgatgtcatcactgtgggagccccagctgcccattttcagggatttaagaatggtggtcttcggaagctactccatagatttgaaacagaaagaagaaataccggataccagtttatttactattcacctgaaaacacagccaaagcaaaggaagttctcagcaacatcaatcaactacaacctcttatagcaacccatgcagacctactgcttaattctgcaagccagcattctccagacagcttgaagaattctttaaagatgctttcagaaaaaacagagctttttgtacatgccttcaaggatcaacttgtcaggagtgctcttttagcactctacactgcaaggccaggaggcattcttaagaagccaccctctcctaagagcagcacagaggagagcagtccccaagaccaacccccagtgatgagagggcaggactccataccacatcattcagactatgatgaggaagagtgggacagggtgtgggccaatgtggggaagagcctgaactgcattattgctatggtggacaaactgattgaaagagatggtggcagtgaaggcagtggcggcaacaatgatggagaaaaggaaccttcattaacagatgccattccctctcacccaagagaggactggtatgaacagttgtatcccctcatccttaccctgaaggactgcatgggagaagtggtgaaccgagccaagcagtccctgacatttgtgctccttcaggaacttgcgtacagcttgccccagtgtctgatgctgacgctaagaagagacatcgtcttcagccaagcacttgctggattggtttgtggttttatcatcaaattacagacaagtctgtatgacccaggcttcctacagcagcttcacacagtggggttgatagtacaatatgaaggactgctaagtacatacagcgatgaaattggaatgctagaggacatggccgttggcatttccgatttaaagaaagttgcatttaaaataattgaagccaaatccaatgatgtgttgccagttataacaggaagacgagaacattacgtggtagaggtcaagcttccagccagaatgtttgagtcactacctctacagattaaagaaggacagttgcttcatgtgtatccagtactttttaatgttggaatcaatgaacagcaaactctggctgaaaggtttggagatgtctctttgcaagaaagtattaatcaggaaaacttcgaacttctacaagaatattacaagatatttatggaaaagatgcctcctgattatatttcacattttcaggaacaaaatgatttaaaagcattgctagaaaatctccttcaaaatatccaatccaaaaaaagaaagaatgtagaaattatgtggctggctgcaacgatttgccgcaaactgaatggtattcgtttcacctgttgtaaaagtgccaaagacaggacatcgatgtcagtgacacttgaacaatgctcaatcttgagagatgagcaccagttacacaaggacttctttatccgagcgctggattgcatgagaagagaaggatgccgcatagagaatgtactgaagaatatcaaatgcagaaagtatgctttcaacatgctacagctgatggctttccccaagtactacagacctccagaggggacttatggaaaagctgacacctaagtttaccaacatgttaataaacaggaacacaaatacatttcagttggataatcttc

SEQ ID NO: 4015 - protein, 924 aa, Homo sapiens; identical to SEQ ID NO: 3995

SEQ ID NO: 4016 - DNA, 3142 bp, Homo sapiens
aaagcgcagatggggagagtcatttgccccacaccctacacagcccggaataaccaggaatacaaagaaatggtgttacctggcaagaggtcttctgtcttttatgaaaaattagacaaagagccttgaaaccagcgaaacaataatcaaagagcagttctgtcaaagaaaacaacataaatcaggtacagaatttcagagtgggatatcagatctttagtgtgaagatacatctacattaaaccaggaatcactagaactgacatttggacaagaaaatttggaaaattttaaaactgtgaaggttgatcatggaaattaaagaggaaggggcatcagaagaagggcagcactttcttcctacagcccaggccaatgatcccggggactgtcagttcacaagtatccagaagactccaaatgaaccgcagttggaattcatccttgcatgcaaggatctcgtggctcctgtccgtgatcgtaaactgaatacactggtgcagatctccgtaatccaccccgtggagcagagtctgacaagatactccagcaccgaaattgtggagggaacaagggacccactgtttttgactggtgtcacattcccatctgagtatcccatctatgaggagaccaaaataaaactaacagtctatgatgtcaaggataagtctcatgacaccgttcgaaccagtgtcctaccagaacataaggatcccccgccagaagttgggcgaagtttcttgggctatgccagttttaaagtgggagagctgctgaagtcaaaggagcaattgctggtcctgagcctgagaacttcagatggtggcaaagtggttggcaccatagaagtcagtgtcgtgaagatgggggagattgaggatggggaagccgaccacatcaccacagatgtacagggacaaaagtgtgccctggtatgtgaatgtacagccccggaaagtgtgagcggaaaagataacttaccttttttgaattcagtgttaaagaacccagtatgtaaattatatagatttcccacatctgacaataagtggatgcgaattcgagagcagatgtcagagagcattctttcctttcatattcctaaggaattgatttcccttcacattaaagaagatttgtgcagaaaccaggagataaaagaacttggtgagctttctccacattgggacaatctgcgaaaaaatgtccttactcactgtgatcaaatggtgaatatgtaccaagacattctgacagaacttagcaaggaaacagggtcctctttcaaatcaagcagcagcaaaggagagaaaacattagaatttgttccaataaatctacatctgcaaagaatgcaggtacacagccctcacttgaaagatgctctctacgatgtcatcactgtgggagccccagctgcccattttcagggatttaagaatggtggtcttcggaagctactccatagatttgaaacagaaagaagaaataccggataccagtttatttactattcacctgaaaacacagccaaagcaaaggaagttctcagcaacatcaatcaactacaacctcttatagcaacccatgcagacctactgcttaattctgcaagccagcattctccagacagcttgaagaattctttaaagatgctttcagaaaaaacagagctttttgtacatgccttcaaggatcaacttgtcaggagtgctcttttagcactctacactgcaaggccaggaggcattcttaagaagccaccctctcctaagagcagcacagaggagagcagtccccaagaccaacccccagtgatgagagggcaggactccataccacatcattcagactatgatgaggaagagtgggacagggtgtgggccaatgtggggaagagcctgaactgcattattgctatggtggacaaactgattgaaagagatggtggcagtgaaggcagtggcggcaacaatgatggagaaaaggaaccttcattaacagatgccattccctctcacccaagagaggactggtatgaacagttgtatcccctcatccttaccctgaaggactgcatgggagaagtggtgaaccgagccaagcagtccctgacatttgtgctccttcaggaacttgcgtacagcttgccccagtgtctgatgctgacgctaagaagagacatcgtcttcagccaagcacttgctggattggtttgtggttttatcatcaaattacagacaagtctgtatgacccaggcttcctacagcagcttcacacagtggggttgatagtacaatatgaaggactgctaagtacatacagcgatgaaattggaatgctagaggacatggccgttggcatttccgatttaaagaaagttgcatttaaaataattgaagccaaatccaatgatgtgttgccagttataacaggaagacgagaacattacgtggtagaggtcaagcttccagccagaatgtttgagtcactacctctacagattaaagaaggacagttgcttcatgtgtatccagtactttttaatgttggaatcaatgaacagcaaactctggctgaaaggtttggagatgtctctttgcaagaaagtattaatcaggaaaacttcgaacttctacaagaatattacaagatatttatggaaaagatgcctcctgattatatttcacattttcaggaacaaaatgatttaaaagcattgctagaaaatctccttcaaaatatccaatccaaaaaaagaaagaatgtagaaattatgtggctggctgcaacgatttgccgcaaactgaatggtattcgtttcacctgttgtaaaagtgccaaagacaggacatcgatgtcagtgacacttgaacaatgctcaatcttgagagatgagcaccagttacacaaggacttctttatccgagcgctggattgcatgagaagagaaggatgccgcatagagaatgtactgaagaatatcaaatgcagaaagtatgctttcaacatgctacagctgatggctttccccaagtactacagacctccagaggggacttatggaaaagctgacacctaagtttaccaacatgttaataaacaggaacacaaatacatttcagttggataatcttc

SEQ ID NO: 4017 - protein, 924 aa, Homo sapiens; identical to SEQ ID NO: 3995

SEQ ID NO: 4018 - DNA, 2848 bp, Homo sapiens
ggatgtttcctgccctcgaacatcagaatccatgtttttcagcttttgggctcttggacttacaccagtggtttgccagggccccccagccttcgaccacagattgaaggctacactgttggcctccctacttttgaggttttggaacttggactggcttccttgctcctcagtttgcagacagcctattgtggaacttcaccttgtgatcgtagccttgaaaccagcgaaacaataatcaaagagcagttctgtcaaagaaaacaacataaatcaggtacagaatttcagagtgggatatcagatctttagtgtgaagatacatctacattaaaccaggaatcactagaactgacatttggacaagaaaatttggaaaattttaaaactgtgaaggttgatcatggaaattaaagaggaaggggcatcagaagaagggcagcactttcttcctacagcccaggccaatgatcccggggactgtcagttcacaagtatccagaagactccaaatgaaccgcagttggaattcatccttgcatgcaaggatctcgtggctcctgtccgtgatcgtaaactgaatacactggtgcagatctccgtaatccaccccgtggagcagagtctgacaagatactccagcaccgaaattgtggagggaacaagggacccactgtttttgactggtgtcacattcccatctgagtatcccatctatgaggagaccaaaataaaactaacagtctatgatgtcaaggataagtctcatgacaccgttcgaaccagtgtcctaccagaacataaggatcccccgccagaagttgggcgaagtttcttgggctatgccagttttaaagtgggagagctgctgaagtcaaaggagcaattgctggtcctgagcctgagaacttcagatggtggcaaagtggttggcaccatagaagtcagtgtcgtgaagatgggggagattgaggatggggaagccgaccacatcaccacagatgtacagggacaaaagtgtgccctggtatgtgaatgtacagccccggaaagtgtgagcggaaaagataacttaccttttttgaattcagtgttaaagaacccagtatgtaaattatatagatttcccacatctgacaataagtggatgcgaattcgagagcagatgtcagagagcattctttcctttcatattcctaaggaattgatttcccttcacattaaagaagatttgtgcagaaaccaggagataaaagaacttggtgagctttctccacattgggacaatctgcgaaaaaatgtccttactcactgtgatcaaatggtgaatatgtaccaagacattctgacagaacttagcaaggaaacagggtcctctttcaaatcaagcagcagcaaaggagagaaaacattagaatttgttccaataaatctacatctgcaaagaatgcaggtacacagccctcacttgaaagatgctctctacgatgtcatcactgtgggagccccagctgcccattttcagggatttaagaatggtggtcttcggaagctactccatagatttgaaacagaaagaagaaataccggataccagtttatttactattcacctgaaaacacagccaaagcaaaggaagttctcagcaacatcaatcaactacaacctcttatagcaacccatgcagacctactgcttaattctgcaagccagcattctccagacagcttgaagaattctttaaagatgctttcagaaaaaacagagctttttgtacatgccttcaaggatcaacttgtcaggagtgctcttttagcactctacactgcaaggccaggaggcattcttaagaagccaccctctcctaagagcagcacagaggagagcagtccccaagaccaacccccagtgatgagagggcaggactccataccacatcattcagactatgatgaggaagagtgggacagggtgtgggccaatgtggggaagagcctgaactgcattattgctatggtggacaaactgattgaaagagatggtggcagtgaaggcagtggcggcaacaatgatggagaaaaggaaccttcattaacagatgccattccctctcacccaagagaggactggtatgaacagttgtatcccctcatccttaccctgaaggactgcatgggagaagtggtgaaccgagccaagcagtccctgacatttgtgctccttcaggaacttgcgtacagcttgccccagtgtctgatgctgacgctaagaagagacatcgtcttcagccaagcacttgctggattggtttgtggttttatcatcaaattacagacaagtctgtatgacccaggcttcctacagcagcttcacacagtggggttgatagtacaatatgaaggactgctaagtacatacagcgatgaaattggaatgctagaggacatggccgttggcatttccgatttaaagaaagttgcatttaaaataattgaagccaaatccaatgatgtgttgccagttataacaggaagacgagaacattacgtggtagaggtcaagcttccagccagaatgtttgagtcactacctctacagattaaagaaggacagttgcttcatgtgtatccagtactttttaatgttggaatcaatgaacagcaaactctggctgaaaggtttggagatgtctctttgcaagaaagtattaatcaggaaaacttcgaacttctacaagaatattacaagatatttatggaaaagatgcctcctgattatatttcacattttcaggaacaaaatgatttaaaagcattgctagaaaatctccttcaaaatatccaatcc

SEQ ID NO: 4019 - protein, 814 aa, Homo sapiens
MEIKEEGASEEGQHFLPTAQANDPGDCQFTSIQKTPNEPQLEFILACKDLVAPVRDRKLNTLVQISVIHPVEQSLTRYSSTEIVEGTRDPLFLTGVTFPSEYPIYEETKIKLTVYDVKDKSHDTVRTSVLPEHKDPPPEVGRSFLGYASFKVGELLKSKEQLLVLSLRTSDGGKVVGTIEVSVVKMGEIEDGEADHITTDVQGQKCALVCECTAPESVSGKDNLPFLNSVLKNPVCKLYRFPTSDNKWMRIREQMSESILSFHIPKELISLHIKEDLCRNQEIKELGELSPHWDNLRKNVLTHCDQMVNMYQDILTELSKETGSSFKSSSSKGEKTLEFVPINLHLQRMQVHSPHLKDALYDVITVGAPAAHFQGFKNGGLRKLLHRFETERRNTGYQFIYYSPENTAKAKEVLSNINQLQPLIATHADLLLNSASQHSPDSLKNSLKMLSEKTELFVHAFKDQLVRSALLALYTARPGGILKKPPSPKSSTEESSPQDQPPVMRGQDSIPHHSDYDEEEWDRVWANVGKSLNCIIAMVDKLIERDGGSEGSGGNNDGEKEPSLTDAIPSHPREDWYEQLYPLILTLKDCMGEVVNRAKQSLTFVLLQELAYSLPQCLMLTLRRDIVFSQALAGLVCGFIIKLQTSLYDPGFLQQLHTVGLIVQYEGLLSTYSDEIGMLEDMAVGISDLKKVAFKIIEAKSNDVLPVITGRREHYVVEVKLPARMFESLPLQIKEGQLLHVYPVLFNVGINEQQTLAERFGDVSLQESINQENFELLQEYYKIFMEKMPPDYISHFQEQNDLKALLENLLQNIQ

SEQ ID NO: 4020 - DNA, 514 bp, Homo sapiens
agttcacaaagagatccatttaaagactttacaacgtacgtacactcatatgtgttagaggcactttcagtttggccttcattcagttcacaaagagatccatttaaagactttacagaagaaaaatgacaggatgaaaactgtgcctcgaggagattaaactggaagcagaaggtatcaacccaggccatggagctgaatggagaagaaatgccttccatcccttccaaccatttggcttctccagtccctcacctcaagcaaacctcatcaaggttttccgatttccagacccaggtcctgagcaactatgtaaatgcaaacaaacactggtgatgactgtaaggccatcaaactccaaacagtcatgcaaccagagcctctgaagatggccccttctgccgggaacccttagatcagcctctgagggagttctgccatttccccaaaacagcgccccctgtcagcaggaagcggttaagatcagtcttcatccttatccttaatctaacca

SEQ ID NO: 4021 - protein, 32 aa, Homo sapiens
MQTNTGDDCKAIKLQTVMQPEPLKMAPSAGNP

SEQ ID NO: 4022 - DNA, 434 bp, Homo sapiens
tcatctctggatcctctggggttaaaaatccatggacacaatctctaaatcctattccagttccagcctcctatggtcttagaatacaaagaaatggtgttacctggcaagaggtcttctgtcttttatgaaaaattagacaaagggggcgctgttttggggaaatggcagaactccctcagaggctgatctaagggttcccggcagaaggggccatcttcagaggctctggttgcatgactgtttggagtttgatggcctgaagatggaagaagctattcagggaaggagtgacttccagctttgaaacaagaactttagaaacttcagaagcatacggaaaaggaaacaagaaaaatgtaatcaagcaagcctcttgaaatgatacaataatataatagcagaattagatccacagaatttatacaattaaa

SEQ ID NO: 4023 - protein, 38 aa, Homo sapiens
MVLEYKEMVLPGKRSSVFYEKLDKGGAVLGKWQNSLRG

SEQ ID NO: 4024 - DNA, 584 bp, Homo sapiens
cgcacacgctcacacgctcgcaagcgaacgcaggaaagtcaggctaaaagtgtctgctgctgctgccgccccccactccgcctccgggagagaatacaaagaaatggtgttacctggcaagaggtcttctgtcttttatgaaaaattagacaaaggtaatgcttattttgaattgatattttttcattctgtataactctacatgaaactagttgactttccttgattattcgttttagatattgaattacccatcaaaaaagtaaattattatctgaaaagccaagggaaggccttacgatgatcatcagattgataaagtgaacagtacatttttagatatataatagcttttcaaaacattgtgggtaatggttaattttctgataccattttgaagtttatgttaatatataaataggatcttgagtacaggattgcagtctctttggaaataaatccaattggtttatcatatttacaaatgataggtaataacagcattagacccttgttagggtacaatgataagattctttgtgactttatttggcgttagtcagatgactttatgtatttttttg

SEQ ID NO: 4025 - protein, 30 aa, Homo sapiens
MVLPGKRSSVFYEKLDKGNAYFELIFFHSV

SEQ ID NO: 4026 - DNA, 257 bp, Homo sapiens
ccacatgtacatgtattcttccttgagtaatttcagatgctggtgtcatctctggatcctctggggttaaaaatccatggacacaatctctaaatcctattccagttccagcctcctatggtcttagagagaaaaatctcattaagtgagaatctaatgggctggaaaaattcaacagactaacctcagatgaagtaatatatttattgaaaaaaatagcaccttgttagctggaaaataatgatacattgacttac

SEQ ID NO: 4027 - protein, 40 aa, Homo sapiens
VISDAGVISGSSGVKNPWTQSLNPIPVPASYGLREKNLIK

SEQ ID NO: 4028 - DNA, 585 bp, Homo sapiens
ataaatagcaggttacagctcctcctgggcgcgcacacgctcacacgctcgcaagcgaacgcaggaaagtcaggctaaaagtgtctgctgctgctgccgccccccactccgcctccgggagagcctcgtgaagggaatcctgttaaaattcattttacaaactgaaaaacagctttaaaaaggaaaagttatcagcccaaggacattaagaggaacttacaacagcactatctctttgctttatttttgttacctatttcagaaaaacaacaacaacaaaaaactataaaatatgcataaggtatacaaagtgaaaatatggcagtttctgacacacccaccactcaggttaagaaagagaacaattgcctttgaagcttctccagtgcccatccggttggcatctgtctgttcttcctaagacataaatactattttgaagtttgtggctacagtttccttgctttttctttagagtttatctgtatttctttatcctaaagaatatcttttttggtttttcatgcatttaaagttatataaatgaaatcattatgtttgtcaaattcttctataacttgcatt

SEQ ID NO: 4029 - protein, 42 aa, Homo sapiens
MHKVYKVKIWQFLTHPPLRLRKRTIAFEASPVPIRLASVCSS

SEQ ID NO: 4030 - DNA, 6670 bp, Homo sapiens
aaagagagagagagagagcaagagagcgagctgtgagctgtgctgccgccgccgctgccctttgatcccgacattagtgttaggggctcggagacacagagcgcggccatagacaccgccgcaccggcactcatttatttatacctcccatcacacacgcgagcataggacacacacacactcacacctattagatccgtttccattgaagaatattacgctcggggacaagccaggtgcacgaccaaaaatttaaaaaaaaaaaaaaaaggaaaaaagaaaggaaagaaaagaagaaaacccctcttctggctccaggaaacaagcttcaacccattgcacacaccggagaaggggtttccccctgcccgcccgcccgccccccaactacctccccgctcctgccagtgtctgcctctctgcccccacgggggtttatttgatctcacattaaccaaggaggagaatgtgagaaaagggggaaaatgcccaggaggaagcaggagcagcccaagcgccttccctcaccctcagaagaggaaagtggaaagcctttccagtgtccaatatgtggtttggttattaaaaggaagagttactggaagcggcacatggtgattcacacaggtttaaaaagtcatcagtgtccgctctgtccattccggtgtgctcgcaaggacaatctcaaatcccacatgaaggttcatcagcaccaggatcggggagagacctttcagtgccagctgtgcccttttacttcctcacgccacttcagcctgaaactccacatgcgttgccatcagcacttcctgaggacagaagccaaggtgaaggaggagatcccagacccagatgtcaagggatctccccacctcagtgacagtgcctgcctggggcagcaaagggaaggaggagggacagagctagtggggaccatgatgacgtctaacactccagagaggactagccagggaggggctggcgtctcgcctttgctggtgaaggaggaacccaaggaagataacggcctgcccacctcctttactttgaatgctgccgacaggcccgccaaccacacaaagctgaaagacccctccgagtatgtggccaacagtgcgtcagcattgttcagccaggacatctctgttaagatggcgtctgattttctcatgaagctgtcagctgcaaatcagaaggagcccatgaatcttaattttaaagtgaaagaggagcctaaggaaggggagtccctaagcacgactttgcctcggtccagctatgtgttcagcccggaatctgaagtgtcagccccaggcgtctctgaggacgcactaaagccccaggaagggaagggaagtgtgctaaggcgggatgtgtcagtcaaagcagcctctgaacttctcatgaaactctcagcggaaagctacaaggaaacacagatggtgaagattaaagaggaacccatggaggttgacatccaggactcccatgtctcgatatcacccagccggaatgttggctacagcactttaatcgggcgagagaaaaccgaacccttacagaagatgccagagggcagagtacccccagagagaaacctcttcagtcaggatatctctgtgaaaatggcttccgagctcctctttcaactgtcagaaaaagtgagcaaagagcacaatcatacaaaagaaaacaccatccggaccacgaccagccctttcttttcagaagacacatttagacaatcaccattcacctccaattcaaaagaactgctgcccagtgactccgtgctgcacggaagaatatcagctccagaaacagaaaagatagtcctagaggcaggaaatggattaccatcctggaaattcaatgaccagctttttccctgtgacgtgtgtgggaaagtgtttggccgacagcagacattgtcccgacacctctcgctgcacacagaggaaagaaaatacaaatgccacttgtgcccctatgctgctaagtgccgtgcaaatctgaaccagcacttgaccgtccattccgtgaagctggtgagtacagacaccgaggacattgtcagcgccgtcacctctgaaggcagtgatgggaagaaacatccttattattacagttgtcacgtgtgtggatttgagaccgagctcaatgtccagtttgtcagccacatgtcactccacgtggacaaggagcagtggatgttttcgatctgctgcactgcctgcgacttcgtcaccatggaggaagcagagataaagactcacattggcaccaagcacacaggggaagacaggaagacccccagcgaatcaaatagcccctcttcatcctccctctcagctctgagtgattcagccaacagcaaagatgattcagatggctcccagaaaaacaagggcgggaacaatctgctggtcatctctgtcatgcctgggagccagccctcactgaacagtgaggaaaagccagagaaagggttcgaatgtgttttttgcaactttgtctgcaagacgaagaacatgtttgagcgtcatctgcagatacacctcatcacccggatgtttgagtgtgatgtgtgccacaagttcatgaagacccccgaacagctgctggagcataagaaatgccacactgtccccaccggtgggctcaactcaggacagtggtgagtttcagactcctctaggtgcccattctgcatttattccaccaaccgccccgctgccatggagtgccacctcaagacccactacaagatggagtacaagtgccggatctgccagacggtgaaggccaaccagctggagctggagacgcacacccgggagcaccgcctgggcaaccactacaagtgcgaccagtgcggctacctgtccaagaccgccaacaagctcatcgagcacgtgcgcgtccacaccggggagcggcccttccactgtgaccagtgcagctacagctgcaagcgcaaggacaatctcaacctgcacaagaagctgaagcacgccccacgccagaccttcagctgcgaagagtgcctgttcaagaccacacaccctttcgtcttcagccgccacgtcaagaagcaccagagtggggactgccccgaggaggacaagaagggcctgtgtccagcccccaaggaaccggccggcccgggggccccgctcctggtggtcgggagctcccggaatctcctgtctcccctgtcagttatgtctgcctcccaggctctgcagaccgtggccctgtcggcagcccacggcagcagctcagagcccaacctggcactcaaggctttggccttcaacggctcccctttgcgctttgacaagtaccggaactcagattttgcccatctcattcccttgacaatgttataccccaagaaccacttggatctcacattccaccctccccgacctcagactgcgcctcccagcatcccctcacccaaacactccttcctggcctatctcggactgagagaaagagcagagactgtctgagggcagccatgttctgtaccaaaaacagagagacaaaagacaaaaaaaaaaaaaaaaaccacaaaacttaaacacaaccccagcaggtgtatgttgctgcaaaacctacagaccccgatgggtctggaacatgtgtactgtatatctttagtaaggaatagaaaattggctctgtgtgtatacctattgcattgacctgaaagctgctttatccaatcttcagagaggtgacctactgcatacttctaccttcagaggcatgcctccccagccacccactcccactctcagcccttctccgtacttttctctgaaaggaatcttgtcttgttaaaccctaaagagagtgtccttaatagcaatcagcacttgtaagcttatatactggtgcatttggttttctgttgggtgaatgcggtgtgtgggcgtttgtggattctgaaagagaaagccgtgtgtcgtgtgccatgacatttctattgcacattctttgtactggcttctttaacagcgatgaacgttcttttccctcctgggttgttcatccacgacagtctctccctgtgctccttcatcacctttccctctctctttgatggctacagagtggtagggcctggtgcttagtcgatgaaggaatggtagccatctacagtgctgctggagatttccgccagagcgctggagaccttgcgctcagatcttctctggtgatgaagaggcgaggaatcaagtgactgatctggaagaaatatctcgcagcactgcagctaacatcacagaacttaagtgtgttttgtgtgtgtgcccacacgtagacaaatgtgtacggtgcacacacacagtgcatcattttttaagggcagattatatatatatatgagatgtattaattcagtggttaccatttgtttgcaggaaaaagaaatgtatgggtgaaaaaatttatggttgataaatccagccaaggagattaaaaggggtttggataaattctgggtataaatgctcagactaaaaaaaagaaatggcagttttgcacagtgctatggtcttgcactagtttttgtttctcatctgaaaaaaaaaaagtaaaataaaaggaagaaaatgtaccttttttatggaatgagtagactgtatgtttgaagatttagccacaacctctttgacatataatgacgcaacaaaaaggtgctgtttagtcctatggttcagtttatgcccctgacaagtttccattgtgttttgccgatcttctggctaatcgtggtatcctccatgttattagtaattctgtattccattttgttaacgcctggtagatgtaacctgctaggaggctaactttatacttatttaaaagctcttattttgtggtcattaaaatggcaatttatgtgcagcactttattgcagcaggaagcaggtgtgggttggttgtaaagctctttgctaatcttaaaaagtaatgggtgatttaaaaagaaaaaaggaaaaaaatctttggctgaatatgttcattgcttgtatttttaaaacaacagaatttccagtatgaaacaggctgaaagagcaggaagaaatgttctttgtataataatgggaagtttggaatataaaagtttatatattatttatctattggagaactggtgtacaggaggaacattttcttactgtgttgctgttttccatcatgtgttatcctaagagttggggttttttaaaatctgtttcaccaggggaaaataaaagcatccctaatgttcttcctctagtcagtttgctttgctgaaagctccctggaaattagtacagttctacaggaagccagaagactgtactgtctgtccacaccatggtctcctcagtcccctccacgccagcccctcttccccacacctagtaggtgtgctacacctccctttgccagtcatcccgccatggatggggagcctacttggtgccctggcaaacctgtttacactaaggagatgcccacagggagcgggaagctcccaaaccctcagtcattctccagcagagacctttgctcttggccaggtttgaaacgatgttcaacctcgccacgtcaatgtctcagtaaaagacactatagatagttatggacaatacactccaagaatactgggcttatgggtgggttggttttttgttttgttttgttttgttttcaagtcatgtctttatccccatataatggagaatgtgccacttggctaataatgtgttttcaaaactacaagttcagtgatgacaggaaagagggctaaagtagtcccacagaggctggtagaaaaggcgaatcacacttaagcaccagcaggttaaaaacctgaaagggtggccctgacaattcagactataggttttacagcatgccacttgtgcaataggaggtctagggttgaaactttcaagaacgagaggaggtgaaggaaggagacgtttactgctcaaatgccatgcatttcactgcttgccactgaacttgtatttgaatgacttagtaatgcttaatataattgggcaacttttttagcactttggaaagagtcatcaatctttctggtaaattataaaagttttctgagtgagaaaaggtgtgtttggagtttgtttgactttttatattattattgttattaataaagaaaaaaatctacagcatttttcagactccaccctagaaaatatgtacccctgaatttggtttgcagtttgatactcagggaaggatgtattccatagatatcctttccgtataaaacactaacatctttgagaaattcacctaccaactaacttcaattgttgtcactatgcattcttcaatgaaaactagcttatttttccatatagtaatgcagttagggttctcagcactttctttcttctatcctttttttaactcttcatattatgttcagatgatcatactgtcaaggtttgtgtacattactgaaaatttgtattgtataaagctttttgcattacgaggctgtacagggtcattttgacagtaactggtatattcctttgcatcttatgttgcattgccaatttctagtgtatccagtttgaaagtataatatactctaattaaaaaaaaaaaaaggttggctata

SEQ ID NO: 4031 - protein, 731 aa, Homo sapiens
MPRRKQEQPKRLPSPSEEESGKPFQCPICGLVIKRKSYWKRHMVIHTGLKSHQCPLCPFRCARKDNLKSHMKVHQHQDRGETFQCQLCPFTSSRHFSLKLHMRCHQHFLRTEAKVKEEIPDPDVKGSPHLSDSACLGQQREGGGTELVGTMMTSNTPERTSQGGAGVSPLLVKEEPKEDNGLPTSFTLNAADRPANHTKLKDPSEYVANSASALFSQDISVKMASDFLMKLSAANQKEPMNLNFKVKEEPKEGESLSTTLPRSSYVFSPESEVSAPGVSEDALKPQEGKGSVLRRDVSVKAASELLMKLSAESYKETQMVKIKEEPMEVDIQDSHVSISPSRNVGYSTLIGREKTEPLQKMPEGRVPPERNLFSQDISVKMASELLFQLSEKVSKEHNHTKENTIRTTTSPFFSEDTFRQSPFTSNSKELLPSDSVLHGRISAPETEKIVLEAGNGLPSWKFNDQLFPCDVCGKVFGRQQTLSRHLSLHTEERKYKCHLCPYAAKCRANLNQHLTVHSVKLVSTDTEDIVSAVTSEGSDGKKHPYYYSCHVCGFETELNVQFVSHMSLHVDKEQWMFSICCTACDFVTMEEAEIKTHIGTKHTGEDRKTPSESNSPSSSSLSALSDSANSKDDSDGSQKNKGGNNLLVISVMPGSQPSLNSEEKPEKGFECVFCNFVCKTKNMFERHLQIHLITRMFECDVCHKFMKTPEQLLEHKKCHTVPTGGLNSGQW

SEQ ID NO: 4032 - DNA, 7788 bp, Homo sapiens
cctcttgtgtgtgtgtgtgtgtgacagagagagagcgagagagagagcgcgagaggagagagagcgagaaagagagagagagagagcaagagagcgagctgtgagctgtgctgccgccgccgctgccctttgatcccgacattagtgttaggggctcggagacacagagcgcggccatagacaccgccgcaccggcactcatttatttatacctcccatcacacacgcgagcataggacacacacacactcacacctattagatccgtttccattgaagaatattacgctcggggacaagccaggtgcacgaccaaaaatttaaaaaaaaaaaaaaaaggaaaaaagaaaggaaagaaaagaagaaaacccctcttctggctccaggaaacaagcttcaacccattgcacacaccggagaaggggtttccccctgcccgcccgcccgccccccaactacctccccgctcctgccagtgtctgcctctctgcccccacgggggtttatttgatctcacattaaccaaggaggagaatgtgagaaaagggggaaaatgcccaggaggaagcaggagcagcccaagcgccttccctcacatgttagtaggcaggaagaggcggagggagagctcagtgaaggagaacactggtatggaaactcttcagagactccgtcagaagcatcctatggggaagtccaggagaactataagttgtctctggaggaccggatccaggagcagtccacgtccccggacacctccttgggaagcacgactcccagcagccacacgttggagctggtggcactggacagtgaggtcctgcgagactcactgcagtgtcaagatcacctttccccgggagtgtcttctttgtgtgacgatgacccaggctccaacaagcccctgagcagcaatttgaggcggctgctggaggctggttccctcaaactcgatgctgcagccacggctaatggcagagtggagtcccccgtaaacgttggctcgaacctctccttttccccgccttcccaccacgcccagcagctcagtgttctggccaggaagttggccgagaagcaggaacagaatgaccaatacactccaagtaaccgttttatatggaatcaaggtaagtggttgccaaactcaaccaccacctgcagcttgtctccggattcagccatcctaaaactgaaagctgcagccaatgccgttctgcaggacaaatctctcaccaggactgaggagaccatgcgatttgagtccttttcctccccttttagctcccagtctgccagttctaccttggccgctttgtccaagaaggtcagtgaaagaagtttgactcctggtcaggagcaccctccaccggccagctccttcctttccctggcttctatgacctcctcagcggcccttctgaaggaggtggccgcaagggctgcgggcagtcttctggctgagaaatcatcgctgctgcctgaggaccctctaccgcccccgccttcagagaagaaaccagaaaaagtcactccgccacctccaccgccacctccaccacctccaccaccaccaccacaatccctggaattattattactcccagttcctaagggaagagtttctaaaccctccaattcagcctcagaagaggaaagtggaaagcctttccagtgtccaatatgtggtttggttattaaaaggaagagttactggaagcggcacatggtgattcacacaggtttaaaaagtcatcagtgtccgctctgtccattccggtgtgctcgcaaggacaatctcaaatcccacatgaaggttcatcagcaccaggatcggggagagacctttcagtgccagctgtgcccttttacttcctcacgccacttcagcctgaaactccacatgcgttgccatcagcacttcctgaggacagaagccaaggtgaaggaggagatcccagacccagatgtcaagggatctccccacctcagtgacagtgcctgcctggggcagcaaagggaaggaggagggacagagctagtggggaccatgatgacgtctaacactccagagaggactagccagggaggggctggcgtctcgcctttgctggtgaaggaggaacccaaggaagataacggcctgcccacctcctttactttgaatgctgccgacaggcccgccaaccacacaaagctgaaagacccctccgagtatgtggccaacagtgcgtcagcattgttcagccaggacatctctgttaagatggcgtctgattttctcatgaagctgtcagctgcaaatcagaaggagcccatgaatcttaattttaaagtgaaagaggagcctaaggaaggggagtccctaagcacgactttgcctcggtccagctatgtgttcagcccggaatctgaagtgtcagccccaggcgtctctgaggacgcactaaagccccaggaagggaagggaagtgtgctaaggcgggatgtgtcagtcaaagcagcctctgaacttctcatgaaactctcagcggaaagctacaaggaaacacagatggtgaagattaaagaggaacccatggaggttgacatccaggactcccatgtctcgatatcacccagccggaatgttggctacagcactttaatcgggcgagagaaaaccgaacccttacagaagatgccagagggcagagtacccccagagagaaacctcttcagtcaggatatctctgtgaaaatggcttccgagctcctctttcaactgtcagaaaaagtgagcaaagagcacaatcatacaaaagaaaacaccatccggaccacgaccagccctttcttttcagaagacacatttagacaatcaccattcacctccaattcaaaagaactgctgcccagtgactccgtgctgcacggaagaatatcagctccagaaacagaaaagatagtcctagaggcaggaaatggattaccatcctggaaattcaatgaccagctttttccctgtgacgtgtgtgggaaagtgtttggccgacagcagacattgtcccgacacctctcgctgcacacagaggaaagaaaatacaaatgccacttgtgcccctatgctgctaagtgccgtgcaaatctgaaccagcacttgaccgtccattccgtgaagctggtgagtacagacaccgaggacattgtcagcgccgtcacctctgaaggcagtgatgggaagaaacatccttattattacagttgtcacgtgtgtggatttgagaccgagctcaatgtccagtttgtcagccacatgtcactccacgtggacaaggagcagtggatgttttcgatctgctgcactgcctgcgacttcgtcaccatggaggaagcagagataaagactcacattggcaccaagcacacaggggaagacaggaagacccccagcgaatcaaatagcccctcttcatcctccctctcagctctgagtgattcagccaacagcaaagatgattcagatggctcccagaaaaacaagggcgggaacaatctgctggtcatctctgtcatgcctgggagccagccctcactgaacagtgaggaaaagccagagaaagggttcgaatgtgttttttgcaactttgtctgcaagacgaagaacatgtttgagcgtcatctgcagatacacctcatcacccggatgtttgagtgtgatgtgtgccacaagttcatgaagacccccgaacagctgctggagcataagaaatgccacactgtccccaccggtgggctcaactcaggacagtggtgagtttcagactcctctaggtgcccattctgcatttattccaccaaccgccccgctgccatggagtgccacctcaagacccactacaagatggagtacaagtgccggatctgccagacggtgaaggccaaccagctggagctggagacgcacacccgggagcaccgcctgggcaaccactacaagtgcgaccagtgcggctacctgtccaagaccgccaacaagctcatcgagcacgtgcgcgtccacaccggggagcggcccttccactgtgaccagtgcagctacagctgcaagcgcaaggacaatctcaacctgcacaagaagctgaagcacgccccacgccagaccttcagctgcgaagagtgcctgttcaagaccacacaccctttcgtcttcagccgccacgtcaagaagcaccagagtggggactgccccgaggaggacaagaagggcctgtgtccagcccccaaggaaccggccggcccgggggccccgctcctggtggtcgggagctcccggaatctcctgtctcccctgtcagttatgtctgcctcccaggctctgcagaccgtggccctgtcggcagcccacggcagcagctcagagcccaacctggcactcaaggctttggccttcaacggctcccctttgcgctttgacaagtaccggaactcagattttgcccatctcattcccttgacaatgttataccccaagaaccacttggatctcacattccaccctccccgacctcagactgcgcctcccagcatcccctcacccaaacactccttcctggcctatctcggactgagagaaagagcagagactgtctgagggcagccatgttctgtaccaaaaacagagagacaaaagacaaaaaaaaaaaaaaaaaccacaaaacttaaacacaaccccagcaggtgtatgttgctgcaaaacctacagaccccgatgggtctggaacatgtgtactgtatatctttagtaaggaatagaaaattggctctgtgtgtatacctattgcattgacctgaaagctgctttatccaatcttcagagaggtgacctactgcatacttctaccttcagaggcatgcctccccagccacccactcccactctcagcccttctccgtacttttctctgaaaggaatcttgtcttgttaaaccctaaagagagtgtccttaatagcaatcagcacttgtaagcttatatactggtgcatttggttttctgttgggtgaatgcggtgtgtgggcgtttgtggattctgaaagagaaagccgtgtgtcgtgtgccatgacatttctattgcacattctttgtactggcttctttaacagcgatgaacgttcttttccctcctgggttgttcatccacgacagtctctccctgtgctccttcatcacctttccctctctctttgatggctacagagtggtagggcctggtgcttagtcgatgaaggaatggtagccatctacagtgctgctggagatttccgccagagcgctggagaccttgcgctcagatcttctctggtgatgaagaggcgaggaatcaagtgactgatctggaagaaatatctcgcagcactgcagctaacatcacagaacttaagtgtgttttgtgtgtgtgcccacacgtagacaaatgtgtacggtgcacacacacagtgcatcattttttaagggcagattatatatatatatgagatgtattaattcagtggttaccatttgtttgcaggaaaaagaaatgtatgggtgaaaaaatttatggttgataaatccagccaaggagattaaaaggggtttggataaattctgggtataaatgctcagactaaaaaaaagaaatggcagttttgcacagtgctatggtcttgcactagtttttgtttctcatctgaaaaaaaaaaagtaaaataaaaggaagaaaatgtaccttttttatggaatgagtagactgtatgtttgaagatttagccacaacctctttgacatataatgacgcaacaaaaaggtgctgtttagtcctatggttcagtttatgcccctgacaagtttccattgtgttttgccgatcttctggctaatcgtggtatcctccatgttattagtaattctgtattccattttgttaacgcctggtagatgtaacctgctaggaggctaactttatacttatttaaaagctcttattttgtggtcattaaaatggcaatttatgtgcagcactttattgcagcaggaagcaggtgtgggttggttgtaaagctctttgctaatcttaaaaagtaatgggtgatttaaaaagaaaaaaggaaaaaaatctttggctgaatatgttcattgcttgtatttttaaaacaacagaatttccagtatgaaacaggctgaaagagcaggaagaaatgttctttgtataataatgggaagtttggaatataaaagtttatatattatttatctattggagaactggtgtacaggaggaacattttcttactgtgttgctgttttccatcatgtgttatcctaagagttggggttttttaaaatctgtttcaccaggggaaaataaaagcatccctaatgttcttcctctagtcagtttgctttgctgaaagctccctggaaattagtacagttctacaggaagccagaagactgtactgtctgtccacaccatggtctcctcagtcccctccacgccagcccctcttccccacacctagtaggtgtgctacacctccctttgccagtcatcccgccatggatggggagcctacttggtgccctggcaaacctgtttacactaaggagatgcccacagggagcgggaagctcccaaaccctcagtcattctccagcagagacctttgctcttggccaggtttgaaacgatgttcaacctcgccacgtcaatgtctcagtaaaagacactatagatagttatggacaatacactccaagaatactgggcttatgggtgggttggttttttgttttgttttgttttgttttcaagtcatgtctttatccccatataatggagaatgtgccacttggctaataatgtgttttcaaaactacaagttcagtgatgacaggaaagagggctaaagtagtcccacagaggctggtagaaaaggcgaatcacacttaagcaccagcaggttaaaaacctgaaagggtggccctgacaattcagactataggttttacagcatgccacttgtgcaataggaggtctagggttgaaactttcaagaacgagaggaggtgaaggaaggagacgtttactgctcaaatgccatgcatttcactgcttgccactgaacttgtatttgaatgacttagtaatgcttaatataattgggcaacttttttagcactttggaaagagtcatcaatctttctggtaaattataaaagttttctgagtgagaaaaggtgtgtttggagtttgtttgactttttatattattattgttattaataaagaaaaaaatctacagcatttttcagactccaccctagaaaatatgtacccctgaatttggtttgcagtttgatactcagggaaggatgtattccatagatatcctttccgtataaaacactaacatctttgagaaattcacctaccaactaacttcaattgttgtcactatgcattcttcaatgaaaactagcttatttttccatatagtaatgcagttagggttctcagcactttctttcttctatcctttttttaactcttcatattatgttcagatgatcatactgtcaaggtttgtgtacattactgaaaatttgtattgtataaagctttttgcattacgaggctgtacagggtcattttgacagtaactggtatattcctttgcatcttatgttgcattgccaatttctagtgtatccagtttgaaagtataatatactctaattaaaaaaaaaaaaaggttggctata

SEQ ID NO: 4033 - protein, 1081 aa, Homo sapiens
MPRRKQEQPKRLPSHVSRQEEAEGELSEGEHWYGNSSETPSEASYGEVQENYKLSLEDRIQEQSTSPDTSLGSTTPSSHTLELVALDSEVLRDSLQCQDHLSPGVSSLCDDDPGSNKPLSSNLRRLLEAGSLKLDAAATANGRVESPVNVGSNLSFSPPSHHAQQLSVLARKLAEKQEQNDQYTPSNRFIWNQGKWLPNSTTTCSLSPDSAILKLKAAANAVLQDKSLTRTEETMRFESFSSPFSSQSASSTLAALSKKVSERSLTPGQEHPPPASSFLSLASMTSSAALLKEVAARAAGSLLAEKSSLLPEDPLPPPPSEKKPEKVTPPPPPPPPPPPPPPPQSLELLLLPVPKGRVSKPSNSASEEESGKPFQCPICGLVIKRKSYWKRHMVIHTGLKSHQCPLCPFRCARKDNLKSHMKVHQHQDRGETFQCQLCPFTSSRHFSLKLHMRCHQHFLRTEAKVKEEIPDPDVKGSPHLSDSACLGQQREGGGTELVGTMMTSNTPERTSQGGAGVSPLLVKEEPKEDNGLPTSFTLNAADRPANHTKLKDPSEYVANSASALFSQDISVKMASDFLMKLSAANQKEPMNLNFKVKEEPKEGESLSTTLPRSSYVFSPESEVSAPGVSEDALKPQEGKGSVLRRDVSVKAASELLMKLSAESYKETQMVKIKEEPMEVDIQDSHVSISPSRNVGYSTLIGREKTEPLQKMPEGRVPPERNLFSQDISVKMASELLFQLSEKVSKEHNHTKENTIRTTTSPFFSEDTFRQSPFTSNSKELLPSDSVLHGRISAPETEKIVLEAGNGLPSWKFNDQLFPCDVCGKVFGRQQTLSRHLSLHTEERKYKCHLCPYAAKCRANLNQHLTVHSVKLVSTDTEDIVSAVTSEGSDGKKHPYYYSCHVCGFETELNVQFVSHMSLHVDKEQWMFSICCTACDFVTMEEAEIKTHIGTKHTGEDRKTPSESNSPSSSSLSALSDSANSKDDSDGSQKNKGGNNLLVISVMPGSQPSLNSEEKPEKGFECVFCNFVCKTKNMFERHLQIHLITRMFECDVCHKFMKTPEQLLEHKKCHTVPTGGLNSGQW

SEQ ID NO: 4034 - DNA, 433 bp, Homo sapiens
cagtgcgtcagcattgttcagccaggacatctctgttaagatggcgtctgattttctcatgaagctgtcaggatctcctcaattaaagaagagtataagcttttgcttcaaagttgacaacatttggcaactgccctcattccttataataaatggaagataagcagtatccagaactcacaatatgccctaaagccatctgtaattctgtgtcaactacttggttattactcagttaactgttatttgggaaatgtatttaatctctctaggtctgagatctctcatctgcaaaatggggataatactagtgcctacctcaaagggtggctgtgagaattagataaattaatacaggtaaatacttggtgtgttacccagctcatgttatgtgctcaataaatgatagatctagctctatccatatgtatct

SEQ ID NO: 4035 - protein, 40 aa, Homo sapiens
MASDFLMKLSGSPQLKKSISFCFKVDNIWQLPSFLIINGR

SEQ ID NO: 4036 - DNA, 3202 bp, Homo sapiens
agcatcctgagcgcgcctctgccgaggcgagcggacatgcaggctccccgcgcagccctagtcttcgccctggtgatcgcgctcgttcccgtcggccggggtaagccgcctccacttcctactcctgggaaggaggatcgcaaaagctggtaattatgaggaattagaaaactcaggagatacaactgtggaatctgaaagaccaaataaagtgactattccaagcacatttgctgcagtgaccatcaaagaaacattaaatgcaaatataaattctaccaactttgctccggatgaaaatcagttagagtttatactgatggtgttaatcccattgattttattggtcctcttacttttatccgtggtattccttgcaacatactataaaagaaaaagaactaaacaagaaccttctagccaaggatctcagagtgctttacagacatatgaactgggaagtgaaaacgtgaaagtccctatttttgaggaagatacaccctctgttatggaaattgaaatggaagagcttgataaatggatgaacagcatgaatagaaatgccgactttgaatgtttacctaccttgaaggaagagaaggaatcaaatcacaacccaagtgacagtgaatcctaaacctgaatggcgctcatgttttccaagagaagcagcccctgagggagtctgctgaggctgccaacagaggatgaagaggatacaaatttaattaatttcaaatcaacatagacacaagaaccttttgctgtttcttccaacgcccactcttcctaatgatggcatcacttgcacttggaagaatgtgcaattgagaagtactaggaaaaggcctggctgccatccatcgctgcctctgagggtggagaaggaggcgggtgatgtgctcacttctgatcaacatgtgttgcctcctctcagccaacttctagctcactgaactcactctggtcatgataaatgttcgtcacctttctgcttcattccttagggcctaaatcaggaagctgttttatcgatggtttccttttgggtcagtaaccagctttggataatttcctctgattattcaagtcgtgggacaggtaaactacattcagcaggaacttttctcgaggagtgttatgtcatggaaaagacaccaaacacagcaagtattttaatgaatacaccatcccagggggtcagtaagctctgcctgccaagaagacacagtgagaggggtccacagtcctgatgaggtggcgtttggtaacttgtagaccctagcatggccaggtctggtcacccttaagaacttctcagagaaactaggaatcttcagtgaaagaactaatgttctcctcagctgaaattcccttgcttgtcagcatttctgcaaagctcacacttgtttcaccatacctcccttggatgtgacatgtaggtaggaagtatgtgcaggtgggagtcatctgtcagccttctatgtttcagagatcctgaaggtggtttgaaacaaacagaagaggagcaggaaatatccgtgcctgtggcagatctcactcatcatgcttagcattctctcccgccaagctgggataagcctcatgtcctaacacagcacaacaggaggtctctgtcagtccatcagagatgacattctatgtgatatttttgacatccttgtgctaaaagcaatggcacaaaatggaaaagggcctattgaccacacctactccagtaaaattgttcttcatttattccttaattttctaaatctgacccctttaaagcaatctagcaaattgagaatcctcagctctccttggatacctgatattttatttcaagaaagagacaaagaaggaaaattttatttattttactacccacatataaaccgaagggagatgggactacccaaacatttgctgctcaattttgtgtcttgtgcttgaaagtctgccctaatgcataacaaaaactacttgtctcctaccttttgggatccctttaacaagtatttgccttctgaactacgtggataatttcaaaggcagagttccagaccagagaggtctttccatacaatgaaagctataactagctggttgtgtttaaccactgctatcacgctatcctgggactgcatagaactttgacaaaagacagacttcatggtacacaacttcaacagattttctgtcatattctcaccagcacatctgaatgaggctttgtgttttccttgctctcttgcatgttccttttcaactcatggcccacagtgactctcagatatttatgccaaaattgcatacaattgttttctgaatcataacttgtctatttttctgcctatgtgtgctactttcagtttgtttctcatcaacattttgactctcagaagagcctccatttgcccctttctctctttaggtatctaagatctttgaacacctgggcctttacatttgatccaaccctatcaaataatgaacttctcagagaggcatctggggtcctggaacttcatgttgatgaagtcatattatataatatgataaaaatattctcatgcagtattttaaataatttcaaattctagaagaagcaaatttcagcgacatgtcattgagtttttatttggtaaagctataattgtgcagtgtacaaagcactttttaaaaagatagtttattctgtcagggtatatgaagttagtatacagccagaacagccaagcctcaattcttgtaccttgtgtctttttattactgtttaatcaatagatatcatatgtttatgacagtttcaagaattgtttttaaacccaaacttaattttatgtttcagactattgttaaaaaaacaaaacaaaaaccaaaaaaaccctcactaatttgccctaattggatagggcaatcagaacaaaatctgactttcgaatatttaaaagatatgtaagtttgattgcattttcgtacattttaagcaaactaggttaacaacaacatagcctagtcaaacttctcaggaaacttgttttaataaatatgtaaaaatacccattcatgactcttgacccaatggtgtgactcctccctctgggaagggctttgttacccaatgcaagaccacagcctggatccaccttgatgtaggtggctcctggataacccacatcaaacaaatgtgataaag

SEQ ID NO: 4037 - protein, 105 aa, Homo sapiens [sequence omitted]

SEQ ID NO: 4038 - DNA, 3349 bp, Homo sapiens
ggctggagaggcgtgataatagaaccagtgcttcaacagcaacttctcttttgcaatccttgctggtctgacaggctcctgcagaattacatcacttcctaaaaaacaggcacacacctctccttcaagtcagcaccgacccaaacaagcaggaaacaggaaatgttcacgtttcagagaggctgcagcccggcgcagcatcctgagcgcgcctctgccgaggcgagcggacatgcaggctccccgcgcagccctagtcttcgccctggtgatcgcgctcgttcccgtcggccggggtaattatgaggaattagaaaactcaggagatacaactgtggaatctgaaagaccaaataaagtgactattccaagcacatttgctgcagtgaccatcaaagaaacattaaatgcaaatataaattctaccaactttgctccggatgaaaatcagttagagtttatactgatggtgttaatcccattgattttattggtcctcttacttttatccgtggtattccttgcaacatactataaaagaaaaagaactaaacaagaaccttctagccaaggatctcagagtgctttacagacatatgaactgggaagtgaaaacgtgaaagtccctatttttgaggaagatacaccctctgttatggaaattgaaatggaagagcttgataaatggatgaacagcatgaatagaaatgccgactttgaatgtttacctaccttgaaggaagagaaggaatcaaatcacaacccaagtgacagtgaatcctaaacctgaatggcgctcatgttttccaagagaagcagcccctgagggagtctgctgaggctgccaacagaggatgaagaggatacaaatttaattaatttcaaatcaacatagacacaagaaccttttgctgtttcttccaacgcccactcttcctaatgatggcatcacttgcacttggaagaatgtgcaattgagaagtactaggaaaaggcctggctgccatccatcgctgcctctgagggtggagaaggaggcgggtgatgtgctcacttctgatcaacatgtgttgcctcctctcagccaacttctagctcactgaactcactctggtcatgataaatgttcgtcacctttctgcttcattccttagggcctaaatcaggaagctgttttatcgatggtttccttttgggtcagtaaccagctttggataatttcctctgattattcaagtcgtgggacaggtaaactacattcagcaggaacttttctcgaggagtgttatgtcatggaaaagacaccaaacacagcaagtattttaatgaatacaccatcccagggggtcagtaagctctgcctgccaagaagacacagtgagaggggtccacagtcctgatgaggtggcgtttggtaacttgtagaccctagcatggccaggtctggtcacccttaagaacttctcagagaaactaggaatcttcagtgaaagaactaatgttctcctcagctgaaattcccttgcttgtcagcatttctgcaaagctcacacttgtttcaccatacctcccttggatgtgacatgtaggtaggaagtatgtgcaggtgggagtcatctgtcagccttctatgtttcagagatcctgaaggtggtttgaaacaaacagaagaggagcaggaaatatccgtgcctgtggcagatctcactcatcatgcttagcattctctcccgccaagctgggataagcctcatgtcctaacacagcacaacaggaggtctctgtcagtccatcagagatgacattctatgtgatatttttgacatccttgtgctaaaagcaatggcacaaaatggaaaagggcctattgaccacacctactccagtaaaattgttcttcatttattccttaattttctaaatctgacccctttaaagcaatctagcaaattgagaatcctcagctctccttggatacctgatattttatttcaagaaagagacaaagaaggaaaattttatttattttactacccacatataaaccgaagggagatgggactacccaaacatttgctgctcaattttgtgtcttgtgcttgaaagtctgccctaatgcataacaaaaactacttgtctcctaccttttgggatccctttaacaagtatttgccttctgaactacgtggataatttcaaaggcagagttccagaccagagaggtctttccatacaatgaaagctataactagctggttgtgtttaaccactgctatcacgctatcctgggactgcatagaactttgacaaaagacagacttcatggtacacaacttcaacagattttctgtcatattctcaccagcacatctgaatgaggctttgtgttttccttgctctcttgcatgttccttttcaactcatggcccacagtgactctcagatatttatgccaaaattgcatacaattgttttctgaatcataacttgtctatttttctgcctatgtgtgctactttcagtttgtttctcatcaacattttgactctcagaagagcctccatttgcccctttctctctttaggtatctaagatctttgaacacctgggcctttacatttgatccaaccctatcaaataatgaacttctcagagaggcatctggggtcctggaacttcatgttgatgaagtcatattatataatatgataaaaatattctcatgcagtattttaaataatttcaaattctagaagaagcaaatttcagcgacatgtcattgagtttttatttggtaaagctataattgtgcagtgtacaaagcactttttaaaaagatagtttattctgtcagggtatatgaagttagtatacagccagaacagccaagcctcaattcttgtaccttgtgtctttttattactgtttaatcaatagatatcatatgtttatgacagtttcaagaattgtttttaaacccaaacttaattttatgtttcagactattgttaaaaaaacaaaacaaaaaccaaaaaaaccctcactaatttgccctaattggatagggcaatcagaacaaaatctgactttcgaatatttaaaagatatgtaagtttgattgcattttcgtacattttaagcaaactaggttaacaacaacatagcctagtcaaacttctcaggaaacttgttttaataaatatgtaaaaatacccattcatgactcttgacccaatggtgtgactcctccctctgggaagggctttgttacccaatgcaagaccacagcctggatccaccttgatgtaggtggctcctggataacccacatcaaacaaatgtgataaag

SEQ ID NO: 4039 - protein, 183 aa, Homo sapiens; identical to SEQ ID NO: 467

SEQ ID NO: 4040 - DNA, 3068 bp, Homo sapiens
agcatcctgagcgcgcctctgccgaggcgagcggacatgcaggctccccgcgcagccctagtcttcgccctggtgatcgcgctcgttcccgtcggccggggtaagccgcctccacttcctactcctgggaaggaggatcgcaaaagctggtaattatgaggaattagaaaactcaggagatacaactgtggaatctgaaagaccaaataaagtgactattccaagcacatttgctgcagtgaccatcaaagaaacattaaatgcaaatataaattctaccaactttgctccggatgaaaatcagttagagtttatactgatggtgttaatcccattgattttattggtcctcttacttttatccgtggtattccttgcaacatactataaaagaaaaagaactaaacaagaaccttctagccaaggatctcagagtgctttacagacatatgaactgggaagtgaaaacgtgaaagtccctatttttgaggaagatacaccctctgttatggaaattgaaatggaagagcttgataaatggatgaacagcatgaatagaaatgccgactttgaatgtttacctaccttgaaggaagagaaggaatcaaatcacaacccaagtgacagtgaatcctaaacctgaatggcgctcatgttttccaagagaagcagcccctgagggagtctgctgaggctgccaacagaggatgaagaggatacaaatttaattaatttcaaatcaacatagacacaagaaccttttgctgtttcttccaacgcccactcttcctaatgatggcatcacttgcacttggaagaatgtgcaattgagaagtactaggaaaaggcctggctgccatccatcgctgcctctgagggtggagaaggaggcgggtgatgtgctcacttctgatcaacatgtgttgcctcctctcagccaacttctagctcactgaactcactctggtcatgataaatgttcgtcacctttctgcttcattccttagggcctaaatcaggaagctgttttatcgatggtttccttttgggtcagtaaccagctttggataatttcctctgattattcaagtcgtgggacaggtaaactacattcagcaggaacttttctcgaggagtgttatgtcatggaaaagacaccaaacacagcaagtattttaatgaatacaccatcccagggggtcagtaagctctgcctgccaagaagacacagtgagaggggtccacagtcctgatgaggtggcgtttggtaacttgtagaccctagcatggccaggtctggtcacccttaagaacttctcagagaaactaggaatcttcagtgaaagaactaatgttctcctcagctgaaattcccttgcttgtcagcatttctgcaaagctcacacttgtttcaccatacctcccttggatgtgacatgtaggtaggaagtatgtgcaggtgggagtcatctgtcagccttctatgtttcagagatcctgaaggtggtttgaaacaaacagaagaggagcaggaaatatccgtgcctgtggcagatctcactcatcatgcttagcattctctcccgccaagctgggataagcctcatgtcctaacacagcacaacaggaggtctctgtcagtccatcagagatgacattctatgtgatatttttgacatccttgtgctaaaagcaatggcacaaaatggaaaagggcctattgaccacacctactccagtaaaattgttcttcatttattccttaattttctaaatctgacccctttaaagcaatctagcaaattgagaatcctcagctctccttggatacctgatattttatttcaagaaagagacaaagaaggaaaattttatttattttactacccacatataaaccgaagggagatgggactacccaaacatttgctgctcaattttgtgtcttgtgcttgaaagtctgccctaatgcataacaaaaactacttgtctcctaccttttgggatccctttaacaagtatttgccttctgaactacgtggataatttcaaaggcagagttccagaccagagaggtctttccatacaatgaaagctataactagctggttgtgtttaaccactgctatcacgctatcctgggactgcatagaactttgacaaaagacagacttcatggtacacaacttcaacagattttctgtcatattctcaccagcacatctgaatgaggctttgtgttttccttgctctcttgcatgttccttttcaactcatggcccacagtgactctcagatatttatgccaaaattgcatacaattgttttctgaatcataacttgtctatttttctgcctatgtgtgctactttcagtttgtttctcatcaacattttgactctcagaagagcctccatttgcccctttctctctttaggtatctaagatctttgaacacctgggcctttacatttgatccaaccctatcaaataatgaacttctcagagaggcatctggggtcctggaacttcatgttgatgaagtcatattatataatatgataaaaatattctcatgcagtattttaaataatttcaaattctagaagaagcaaatttcagcgacatgtcattgagtttttatttggtaaagctataattgtgcagtgtacaaagcactttttaaaaagatagtttattctgtcagggtatatgaagttagtatacagccagaacagccaagcctcaattcttgtaccttgtgtctttttattactgtttaatcaatagatatcatatgtttatgacagtttcaagaattgtttttaaacccaaacttaattttatgtttcagactattgttaaaaaaacaaaacaaaaaccaaaaaaaccctcactaatttgccctaattggatagggcaatcagaacaaaatctgactttcgaatatttaaaagatatgtaagtttgattgcattttcgtacattttaagcaaactaggttaacaacaacatagcctagtcaaacttctcaggaaacttgttttaataaatatgtaaaaataccc

SEQ ID NO: 4041 - protein, 105 aa, Homo sapiens [sequence omitted]

SEQ ID NO: 4042 - DNA, 3215 bp, Homo sapiens
ggctggagaggcgtgataatagaaccagtgcttcaacagcaacttctcttttgcaatccttgctggtctgacaggctcctgcagaattacatcacttcctaaaaaacaggcacacacctctccttcaagtcagcaccgacccaaacaagcaggaaacaggaaatgttcacgtttcagagaggctgcagcccggcgcagcatcctgagcgcgcctctgccgaggcgagcggacatgcaggctccccgcgcagccctagtcttcgccctggtgatcgcgctcgttcccgtcggccggggtaattatgaggaattagaaaactcaggagatacaactgtggaatctgaaagaccaaataaagtgactattccaagcacatttgctgcagtgaccatcaaagaaacattaaatgcaaatataaattctaccaactttgctccggatgaaaatcagttagagtttatactgatggtgttaatcccattgattttattggtcctcttacttttatccgtggtattccttgcaacatactataaaagaaaaagaactaaacaagaaccttctagccaaggatctcagagtgctttacagacatatgaactgggaagtgaaaacgtgaaagtccctatttttgaggaagatacaccctctgttatggaaattgaaatggaagagcttgataaatggatgaacagcatgaatagaaatgccgactttgaatgtttacctaccttgaaggaagagaaggaatcaaatcacaacccaagtgacagtgaatcctaaacctgaatggcgctcatgttttccaagagaagcagcccctgagggagtctgctgaggctgccaacagaggatgaagaggatacaaatttaattaatttcaaatcaacatagacacaagaaccttttgctgtttcttccaacgcccactcttcctaatgatggcatcacttgcacttggaagaatgtgcaattgagaagtactaggaaaaggcctggctgccatccatcgctgcctctgagggtggagaaggaggcgggtgatgtgctcacttctgatcaacatgtgttgcctcctctcagccaacttctagctcactgaactcactctggtcatgataaatgttcgtcacctttctgcttcattccttagggcctaaatcaggaagctgttttatcgatggtttccttttgggtcagtaaccagctttggataatttcctctgattattcaagtcgtgggacaggtaaactacattcagcaggaacttttctcgaggagtgttatgtcatggaaaagacaccaaacacagcaagtattttaatgaatacaccatcccagggggtcagtaagctctgcctgccaagaagacacagtgagaggggtccacagtcctgatgaggtggcgtttggtaacttgtagaccctagcatggccaggtctggtcacccttaagaacttctcagagaaactaggaatcttcagtgaaagaactaatgttctcctcagctgaaattcccttgcttgtcagcatttctgcaaagctcacacttgtttcaccatacctcccttggatgtgacatgtaggtaggaagtatgtgcaggtgggagtcatctgtcagccttctatgtttcagagatcctgaaggtggtttgaaacaaacagaagaggagcaggaaatatccgtgcctgtggcagatctcactcatcatgcttagcattctctcccgccaagctgggataagcctcatgtcctaacacagcacaacaggaggtctctgtcagtccatcagagatgacattctatgtgatatttttgacatccttgtgctaaaagcaatggcacaaaatggaaaagggcctattgaccacacctactccagtaaaattgttcttcatttattccttaattttctaaatctgacccctttaaagcaatctagcaaattgagaatcctcagctctccttggatacctgatattttatttcaagaaagagacaaagaaggaaaattttatttattttactacccacatataaaccgaagggagatgggactacccaaacatttgctgctcaattttgtgtcttgtgcttgaaagtctgccctaatgcataacaaaaactacttgtctcctaccttttgggatccctttaacaagtatttgccttctgaactacgtggataatttcaaaggcagagttccagaccagagaggtctttccatacaatgaaagctataactagctggttgtgtttaaccactgctatcacgctatcctgggactgcatagaactttgacaaaagacagacttcatggtacacaacttcaacagattttctgtcatattctcaccagcacatctgaatgaggctttgtgttttccttgctctcttgcatgttccttttcaactcatggcccacagtgactctcagatatttatgccaaaattgcatacaattgttttctgaatcataacttgtctatttttctgcctatgtgtgctactttcagtttgtttctcatcaacattttgactctcagaagagcctccatttgcccctttctctctttaggtatctaagatctttgaacacctgggcctttacatttgatccaaccctatcaaataatgaacttctcagagaggcatctggggtcctggaacttcatgttgatgaagtcatattatataatatgataaaaatattctcatgcagtattttaaataatttcaaattctagaagaagcaaatttcagcgacatgtcattgagtttttatttggtaaagctataattgtgcagtgtacaaagcactttttaaaaagatagtttattctgtcagggtatatgaagttagtatacagccagaacagccaagcctcaattcttgtaccttgtgtctttttattactgtttaatcaatagatatcatatgtttatgacagtttcaagaattgtttttaaacccaaacttaattttatgtttcagactattgttaaaaaaacaaaacaaaaaccaaaaaaaccctcactaatttgccctaattggatagggcaatcagaacaaaatctgactttcgaatatttaaaagatatgtaagtttgattgcattttcgtacattttaagcaaactaggttaacaacaacatagcctagtcaaacttctcaggaaacttgttttaataaatatgtaaaaataccc

SEQ ID NO: 4043 - protein, 183 aa, Homo sapiens; identical to SEQ ID NO: 467

SEQ ID NO: 4044 - DNA, 2505 bp, Homo sapiens
ggctggagaggcgtgataatagaaccagtgcttcaacagcaacttctcttttgcaatccttgctggtctgacaggctcctgcagaattacatcacttcctaaaaaacaggcacacacctctccttcaagtcagcaccgacccaaacaagcaggaaacaggaaatgttcacgtttcagagaggctgcagcccggcgcagcatcctgagcgcgcctctgccgaggcgagcggacatgcaggctccccgcgcagccctagtcttcgccctggtgatcgcgctcgttcccgtcggccggggtaattatgaggaattagaaaactcaggagatacaactgtggaatctgaaagaccaaataaagtgactattccaagcacatttgctgcagtgaccatcaaagaaacattaaatgcaaatataaattctaccaactttgctccggatgaaaatcagttagagtttatactgatggtgttaatcccattgattttattggtcctcttacttttatccgtggtattccttgcaacatactataaaagaaaaagaactaaacaagaaccttctagccaaggatctcagagtgctttacagacatatgaactgggaagtgaaaacgtgaaagtccctatttttgaggaagatacaccctctgttatggaaattgaaatggaagagcttgataaatggatgaacagcatgaatagaaatgccgactttgaatgtttacctaccttgaaggaagagaaggaatcaaatcacaacccaagtgacagtgaatcctaaacctgaatggcgctcatgttttccaagagaagcagcccctgagggagtctgctgaggctgccaacagaggatgaagaggatacaaatttaattaatttcaaatcaacatagacacaagaaccttttgctgtttcttccaacgcccactcttcctaatgatggcatcacttgcacttggaagaatgtgcaattgagaagtactaggaaaaggcctggctgccatccatcgctgcctctgagggtggagaaggaggcgggtgatgtgctcacttctgatcaacatgtgttgcctcctctcagccaacttctagctcactgaactcactctggtcatgataaatgttcgtcacctttctgcttcattccttagggcctaaatcaggaagctgttttatcgatggtttccttttgggtcagtaaccagctttggataatttcctctgattattcaagtcgtgggacaggtaaactacattcagcaggaacttttctcgaggagtgttatgtcatggaaaagacaccaaacacagcaagtattttaatgaatacaccatcccagggggtcagtaagctctgcctgccaagaagacacagtgagaggggtccacagtcctgatgaggtggcgtttggtaacttgtagaccctagcatggccaggtctggtcacccttaagaacttctcagagaaactaggaatcttcagtgaaagaactaatgttctcctcagctgaaattcccttgcttgtcagcatttctgcaaagctcacacttgtttcaccatacctcccttggatgtgacatgtaggtaggaagtatgtgcaggtgggagtcatctgtcagccttctatgtttcagagatcctgaaggtggtttgaaacaaacagaagaggagcaggaaatatccgtgcctgtggcagatctcactcatcatgcttagcattctctcccgccaagctgggataagcctcatgtcctaacacagcacaacaggaggtctctgtcagtccatcagagatgacattctatgtgatatttttgacatccttgtgctaaaagcaatggcacaaaatggaaaagggcctattgaccacacctactccagtaaaattgttcttcatttattccttaattttctaaatctgacccctttaaagcaatctagcaaattgagaatcctcagctctccttggatacctgatattttatttcaagaaagagacaaagaaggaaaattttatttattttactacccacatataaaccgaagggagatgggactacccaaacatttgctgctcaattttgtgtcttgtgcttgaaagtctgccctaatgcataacaaaaactacttgtctcctaccttttgggatccctttaacaagtatttgccttctgaactacgtggataatttcaaaggcagagttccagaccagagaggtctttccatacaatgaaagctataactagctggttgtgtttaaccactgctatcacgctatcctgggactgcatagaactttgacaaaagacagacttcatggtacacaacttcaacagattttctgtcatattctcaccagcacatctgaatgaggctttgtgttttccttgctctcttgcatgttccttttcaactcatggcccacagtgactctcagatatttatgccaaaattgcatacaattgttttctgaatcataacttgtctatttttctgcct

SEQ ID NO: 4045 - protein, 183 aa, Homo sapiens; identical to SEQ ID NO: 467

SEQ ID NO: 4046 - DNA, 720 bp, Homo sapiens
ggctggagaggcgtgataatagaaccagtgcttcaacagcaacttctcttttgcaatccttgctggtctgacaggctcctgcagaattacatcacttcctaaaaaacaggcacacacctctccttcaagtcagcaccgacccaaacaagcaggaaacaggaaatgttcacgtttcagagaggctgcagcccggcgcagcatcctgagcgcgcctctgccgaggcgagcggacatgcaggctccccgcgcagccctagtcttcgccctggtgatcgcgctcgttcccgtcggccggggtaattatgaggaattagaaaactcaggagatacaactgtggaatctgaaagaccaaataaagtgactattccaagcacatttgctgcagtgaccatcaaagaaacattaaatgcaaatataaattctaccaactttgctccggatgaaaatcagttagagtttatactgatggtgttaatcccattgattttattggtcctcttacttttatccgtggtattccttgcaacatactataaaagaaaaagaactaaacaagaaccttctagccaaggatctcagagtgctttacagacatacctcctggtatgaaatttgcagtgtcttgatgtgtgaggtctctctgaaagagctgcagggaaaacagcgggcgataaactacccctttaaacaggctgtggctacatgatgcctggcttact

SEQ ID NO: 4047 - protein, 125 aa, Homo sapiens
MQAPRAALVFALVIALVPVGRGNYEELENSGDTTVESERPNKVTIPSTFAAVTIKETLNANINSTNFAPDENQLEFILMVLIPLILLVLLLLSVVFLATYYKRKRTKQEPSSQGSQSALQTYLLV

SEQ ID NO: 4048 - DNA, 2451 bp, Homo sapiens
atttcttaaaagctccccaaataactctagtaagtatgtatgttaggttgagaatgactgagttaaataataactgagtggactttattttaatttgccattgttcgtgaagacagtcattagttttaaatgtgattagacaaccctccacagaagcctttgggaacaaaattaaattttgtagagacagggagtctcactttgttacccaggctggtctcaaattactgggctcaagcaatcctcctgcttcagcctctcaaagtgccaggattacaggtatgagccaccaagtcctaccagaatttgcattttggagtatgcaccattaaacagtttaactcttcagttgatctctttttaaaaatcaattgttcagcatctgtggaatctgattgtgatgtggtcagggacagaatgggactaaaatgagaataaccatgccagactcttcaggacacaacctggctatgggaggctgattgtgtttgcatggagacactaactccaagtggatggatgacaccactgggacactgttgctcatggaccacagacagtggcgctgggacaccaatgctcagactatagatggtggtgatgggacaccattgctcatggactgcagacagtgctacgaggacaccgatgctcatggactacagatgctgctctgaagtgctctgcactttacttttctctagttcatttccaaacgggccaatttcaaaattataattgaaaagagtaacttgaaaacagatactcccagccatgcccttgcctcaagacatctgccgtctccctggcctctgaggcagggtgggaagacaccgccaccccattccataggtgaagagctctttcatggggtacatgcgcatcccactccttgctcggctcagcacaagctcagcattgccagagagaaaaactggaagacagagacaaacaaaacaacaactggtaggtgggtgcttgtgataagttaaagataggaaaccagggaacgctgtgggctgccaccccaggggcttggtcgccaccaagagtgaaggaggaacaacagggagaggatatgcaccagagtccccatcgccagcctaagcaggagcacaggagcaacagcgtttgatgctttcctacaagaggctgaagaaggaaacaagttgctgaggttttgaagaatcgtgggtcgcatttccttggatcagctaagccccgaacagatccctaaagcaactgggcttctggtcctatttcaccttcaaagagaatcaatcctacccttccatcctgaacagtcttctaggctcaagcactctgaattttcctatcgtggctggagctatcgatttggtgctagtctcactctctttgtcaacctctcttgtgcatttattaatacaaacttattattttttcctaacttagtttttaacgtgattacattcacagattttttaaaagttgatctgctcttgaattcctggttttattctatgtaattatcagtattttttttcagaaatggtctctttttatttgaatggttgatctaggactcagcctaaatattattctaatacgtagctgtacataaccaacatgtctatgatgttagtgatgaaccagaaccaacacagagatggtctttgcctgataaaagataatcacaatccgaaataaaattactaggtaaaatacaggatgcctagttaaatttgagtatcagataaacaatgaaacatttttagttacatgtcccatgtaatatttgtactaaatacttatactaaattgtaaaggacatacttatactaaattgtaaaggacatccttatactaaaggaaagcattgcttatctgaaattcacatttaactggttgtcctatatttttatttgttaaatgtggcaatcttaatcataaacaaataagcaaacaagtataagtcttagaaaagaataaatcaatttttaaatgaatgcatttagtgttgtcagggaataattacaatatgtcagcaaaccttggcaaccattggaatcccgtttctgaaaattacagtgtagtgtgaagtagaaaataacaacgatggttttaactcatatgaaacatagaaaaaattcagaaacaaactagatttattggttttaaggaaaagaagccagaacaactaccagaatactgttctgttaggtaactcttcttttaaccaccttctttaattactcaggaaatatttctgtgttttcctcaacaactggagtagattttcccatgagttttatgttacacaaagtttagttatttttaaagttatcaaatcagctcttactggcttgaagttaagtatccatggaacttgtatttcctttgttttcctttcaaatgtctccccaaaatgcttgtaactgtgtatcctttctgtaaataattttgccactt

SEQ ID NO: 4049 - protein, 48 aa, Homo sapiens
MVVMGHHCSWTADSATRTPMLMDYRCCSEVLCTLLFSSSFPNGPISKL

SEQ ID NO: 4050 - DNA, 860 bp, Homo sapiens
agtgaatactctctgtgggcctactatgtgccaggcattatgcaccagacgaaaacatatcttcttgagaagccagtgctaagtcactgttcttgttcatatttggatcccttcccttttcaggttggttcattaacggaaatattaacagcaacttatatgtacttctccacttgttgctccaagagatttacagcctctttttctgtcttcagatactactttgaaaacaagatgaaagccatggaatctcccgagaaaaatgtacatcttacagactttcagtgagttctggaataccaggaaccagagcccacactaatgaacagcagtttcctaacctaatgcgagagatttgagatttcttctggctcccatgatcttctaattgtcttcttagcaagactaaacacatctccaagaaatgtgcactgccatgaatgtcttccagctatcttctatgacagcacttcccagtgtgttctgtggaataatggtacagggtgatattctatgaagaaaaatacggaaagtaatatactccacagtccgtatattagatcggactaataaaaataaatatggaaagtaatatattccacagtcatatattagatcgcctacacaacagcaatttgatatagtttaataggatttgaatgaataaaattaatgcccacagctactttcttctgccggtaaatatttttctgcccataatcttgctaaacagaattcatctgaacttacgttgttgccaacaaatatacgaacaattatacctaatcaaaaacaaaaaccaaactgatgttaaagaaaattaatcatttgctttgaataaatcaactattaagaaagct

SEQ ID NO: 4051 - protein, 82 aa, Homo sapiens; identical to SEQ ID NO: 469

SEQ ID NO: 4052 - DNA, 1308 bp, Homo sapiens
acaaaacactagcggtggctctactttctcagtccccttttctaattgattctcttttccctgtctcttaaggtaggagggtcacagagttcatgcttgatccatttatgttttttatgtacacatttctcttccagacacttggactcagaaatgcacaaactccctgacatctttatttaaatgactaatagaccatggttgactgaaggtaactgaaaccacgaaaagtgacagcacagatgaggggagagtactgtatcctcaaatgatggtatggctggtgatggtaacagcaagtctaccagcctagtcaagcattcttatccatagaagagttgccatgggaacctcatggcaacccacagatttcaagtactgtatgttctgcctaaataaataatgaaaagctatcttactgaatgttctccatatctgcatacttaatagggcaggatgctacctcacatatcatttgcagtaaacaaaggtaaaaatgagagacatacaaaagtaagataaggattacatatctgcattttaaaagcacattccgtgttaactaattatgttttcatttcattctggatcagaagatcagacacacatcattgcttattcagacctcacctgatcctatttataggcccctctcaaactcactgaagatgacagtaatctctatatctatgcagagtgtgaggtaattctaggagacacctttctgtgcaaaatgtcaggtgttagctccccatggagcactctctccttgccacttggggacctcacagaaacaagtcatagcattctttttttaggctgtgaggtagggttagatcatcctcacttttctgttaccacttgtgttctttctgtatgtgctttttaaattcactaactaatagaaaaatgctttgaatacattattaacctcacaagaggattttttttcttcctagacattgaaatattttagacactagaaaataaaggatttttaataaatggagtgtaactactcaaaacttttttcttctttccccaaagtgaataaataacaattgtaggctaatgtttcagattagcataggtagataatattagtttttaatcatgaaattattttaagtgcatcatttgagagaatttatggtataaattctctataaattttatatttgataagaaatacgaagatagaagctaatgaagagggagaagaactaagtattcttgagttgtttgtgaaagtagtaatttaatcgaagttgtattcacttagcccctccaagattaagtttccatgtg

SEQ ID NO: 4053 - protein, 51 aa, Homo sapiens
MSGVSSPWSTLSLPLGDLTETSHSILFLGCEVGLDHPHFSVTTCVLSVCAF

SEQ ID NO: 4054 - DNA, 1055 bp, Homo sapiens
gttggagtacctcattactgcctgtcaaggatagaagtctaggatctgtactcagcctttgagagtgtgtagggatggtgccacattttcttctgtggtgtttggctagagtagaatggttatcatctaagtgttttctgacttgctgggttctctttctttggcattaagttttgtcttttcagttcatttcaaatttaccattttatgtcttacacttttttaactgccacaagatatactggataataaaaatcataattgaaatttcaaacaatgctttttgatatattaaacttattttcctttttatgttttccctcccctcactcaaaggtgaagattttactgaagtacatcagaattggaatgctcatagctctgcttcagagcatgcaaaaggatatcgtaacagagaattcacacgaggattttccagggccagataccctcgatcttgccatggcaggcctccacctcagcatttctataactcagaacatatggtatctcaggagacttcaggatttccttctcagagacaaaataatcccattatgccacaatacccctttcctcttccagtgtttgacatgcataattttcccctccgccctccacccccaccaccacccccacctgtaaacatgggttgggctacaccaaacatggctgctcatccattacttaacttaccatactccctacccccaccccctccccctccaccactgcctcctccaccctcttctggagatagtaattctcattttggaccttactattaggtgactatgcatttccagagaaatgtggacttttcatattatgtggtacaggtatatctcacagatattgtggcctcggatccagaccattgcagtcaagtgagtcacacaaactttttggtttccaaatgcatataaaagttacgtttacatgctactttagtttattaagtatgcaatagcattgtgtctaaaaaaaccaatgtgcatatctcaattggagaatactttactgttcaaaaaataataatgaccctttgagcctgc

SEQ ID NO: 4055 - protein, 43 aa, Homo sapiens
MHFQRNVDFSYYVVQVYLTDIVASDPDHCSQVSHTNFLVSKCI

SEQ ID NO: 4056 - DNA, 1903 bp, Homo sapiens
cggaaagcgttgctgcgtaaatggcgggggcgtgtcttttggctcctccgcgtgtagttacctgagaaacgcgggaagttgggcccaggcagtgttgctgcggttgcctaagttgtttttctatttctggagagagccgtgagcttgtccaggggccccaatcctgaggccgacccggtttctggcgcggtgcgatggaggtagtggaggccgccgccgctcagctggaaactctgaaattcaatggcaccgactttggagttggggaaggtccggcggctccgtctccgggctctgcccctgtgccagggacacagccgccgctacagtcgtttgaggggtccccggacgctgggcagaccgtggaggttaagcctgccggggagcagcctctgcagcccgttctgaacgccgtcgcggccgggaccccggcgccgcagccacagccaccggctgaatcgccggcctgcggagactgcgtcacctccccaggagccgcagagcctgcgcgggcgccggactccttggagacctcggactcggattcggactcggacagtgaaacagattcagatagttcaagttcatcgtcttcctcttcatcttcctcatcgtcgtcttcttcctcttgtatatcacttcctccagtgctgtcagatggagatgatgatttacaaattgagaaggaaaataagaattttcctcttaaaacaaaagatgaattacttcttaatgaactgccttctgttgaagaactcactattattctgcctgaagatattgagttaaagcctcttgggatggtttcaagtattattgaacaactagtaataattgaatctatgactaacctacctccagttaatgaggagactgtaatttttaaaagtgatcgacaagcagcaggaaagatattcgagatatttggacctgttgcacatccattttatgtgttacggtttaattcttcagatcacattgagagtaaaggtattaaaataaaggagactatgtattttgctccatcaatgaaagatttcactcaatatatattcacagaaaaactaaaacaggataagggatcagatgcatcatggaagaatgatcaggaaccaccaccagaggccttagattttagtgatgatgaaaaagagaaggaagccaaacagaggaaaaaatctcagattcaaggccggaaaaaactcaaatctgaatttaatgagcctggtgaagattttactgaagtacatcagaattggaatgctcatagctctgcttcagagcatgcaaaaggatatcgtaacagagaattcacacgaggattttccagggccagataccctcgatcttgccatggcaggcctccacctcagcatttctataactcagaacatatggtatctcaggagacttcaggatttccttctcagagacaaaataatcccattatgccacaatacccctttcctcttccagtgtttgacatgcataattttcccctccgccctccacccccaccaccacccccacctgtaaacatgggttgggctacaccaaacatggctgctcatccattacttaacttaccatactccctacccccaccccctccccctccaccactgcctcctccaccctcttctggagatagtaattctcattttggaccttactattaggtgactatgcatttccagagaaatgtggacttttcatattatgtggtaaggatttttttttttcaagagtgattatggagctagatttttaaaaacactgtaaaatactaaatgattccttctgttgtaagttgatatatatttgtaacctttgtgaaattgtattcatatgaaaatgtcagctcaaattcttgggagaacattaaattatgtaatatttaatt

SEQ ID NO: 4057 - protein, 494 aa, Homo sapiens
MEVVEAAAAQLETLKFNGTDFGVGEGPAAPSPGSAPVPGTQPPLQSFEGSPDAGQTVEVKPAGEQPLQPVLNAVAAGTPAPQPQPPAESPACGDCVTSPGAAEPARAPDSLETSDSDSDSDSETDSDSSSSSSSSSSSSSSSSSSCISLPPVLSDGDDDLQIEKENKNFPLKTKDELLLNELPSVEELTIILPEDIELKPLGMVSSIIEQLVIIESMTNLPPVNEETVIFKSDRQAAGKIFEIFGPVAHPFYVLRFNSSDHIESKGIKIKETMYFAPSMKDFTQYIFTEKLKQDKGSDASWKNDQEPPPEALDFSDDEKEKEAKQRKKSQIQGRKKLKSEFNEPGEDFTEVHQNWNAHSSASEHAKGYRNREFTRGFSRARYPRSCHGRPPPQHFYNSEHMVSQETSGFPSQRQNNPIMPQYPFPLPVFDMHNFPLRPPPPPPPPPVNMGWATPNMAAHPLLNLPYSLPPPPPPPPLPPPPSSGDSNSHFGPYY

SEQ ID NO: 4058 - DNA, 714 bp, Homo sapiens
gaatgaatgaattatggaacattgtcttctgttttttattggctctgataatatatataatttgcttagtccttgatactcttacctttggcacccttttgcatctgatactatgatgaattttaagtctaaactggaagtcagactcatatctgaaggctgattactggcctgtgttaattaaagtcattaagcatttatcaaaaaatgctttatttttataccatgtctaattcagatatagaaaatattaagtatcaaaaagacaactttttttagagtcattgatgcataataggcttattttcttcacctccaagtatgtactattgaattggcaaattcatgtaacataaacctattatatacttttctctgcaaggccttagattttagtgatgatgaaaaagagaaggaagccaaacagaggaaaaaatctcagattcaaggccggaaaaaactcaaatctgaatttaatgagcctggtgaagattttactgaagtacatcagaattggaatgctcatagctctgcttcagagcatgcaaaaggatatcgtaacagagaattcacacgaggattttccagggccagataccctcgatcttgccatggcaggcctccacctcagcatttctataactcagaacatatggtatctcaggagacttcaggatttccttctcagagacaaaataatcccattatgccaca

SEQ ID NO: 4059 - protein, 104 aa, Homo sapiens
MMKKRRKPNRGKNLRFKAGKNSNLNLMSLVKILLKYIRIGMLIALLQSMQKDIVTENSHEDFPGPDTLDLAMAGLHLSISITQNIWYLRRLQDFLLRDKIIPLC

SEQ ID NO: 4060 - DNA, 2418 bp, Homo sapiens
ggaaagcgttgctgcgtaaatggcgggggcgtgtcttttggctcctccgcgtgtagttacctgagaaacgcgggaagttgggcccaggcagtgttgctgcggttgcctaagttgtttttctatttctggagagagccgtgagcttgtccaggggccccaatcctgaggccgacccggtttctggcgcggtgcgatggaggtagtggaggccgccgccgctcagctggaaactctgaaattcaatggcaccgactttggagttggggaaggtccggcggctccgtctccgggctctgcccctgtgccagggacacagccgccgctacagtcgtttgaggggtccccggacgctgggcagaccgtggaggttaagcctgccggggagcagcctctgcagcccgttctgaacgccgtcgcggccgggaccccggcgccgcagccacagccaccggctgaatcgccggcctgcggagactgcgtcacctccccaggagccgcagagcctgcgcgggcgccggactccttggagacctcggactcggattcggactcggacagtgaaacagattcagatagttcaagttcatcgtcttcctcttcatcttcctcatcgtcgtcttcttcctcttgtatatcacttcctccagtgctgtcagatggagatgatgatttacaaattgagaaggaaaataagaattttcctcttaaaacaaaagatgaattacttcttaatgaactgccttctgttgaagaactcactattattctgcctgaagatattgagttaaagcctcttgggatggtttcaagtattattgaacaactagtaataattgaatctatgactaacctacctccagttaatgaggagactgtaatttttaaaagtgatcgacaagcagcaggaaagatattcgagatatttggacctgttgcacatccattttatgtgttacggtttaattcttcagatcacattgagagtaaaggtattaaaataaaggagactatgtattttgctccatcaatgaaagatttcactcaatatatattcacagaaaaactaaaacaggataagggatcagatgcatcatggaagaatgatcaggaaccaccaccagagacatgggggtctcagtgtgttgcccaggctggtctcaagctcttggcctcaagtgattctccagccctcaagcaagcttctgccttggctccccaaagtgctgggattacaggcatgagccccttgcccagccagtattacagatttttgatacttaccgatttaaccttggccattttagatgtttaaagcaatcgtaaatcatgatctgtgtttctaattttactgaggtatgaatcaggtttatgcccacttggagggttctatacaggtatgaatcacttaaccagtgaatgatccttgcttagtatctgaattgaaatggaattatgttttctaattaatgttatgtatttatgtgatttcagttaaggctctgaatattcacttaatgttctgaattaagttttagagtatctatagcatcttattactggaattacatgttttaaacgtgtttagagattcataaacatctcaaatcatatttcttttaaaatccagatattctttttttctttttttgggtaggggatggagttttgctctttctgcccaggctgcaatgcagtggcacggtctcagctcaccgcaaactctgcctccgggttcaagcaattctcctgcctcagcctcctgagtagctgagattacaggcgcatgccaccacgcccagctaattttgtatttttattagagacggggtttcacaatgttgtccaggctagtcttgaactcctgacctccagtaatccacccctctctgcctctcaaagtgctgagatttcaggcgtgagccaccgcacctggccaaaatccagatattctaatgaatccctcttgtttcggacctaagcattgaagttaccaattacaacaatgcgagttatttgtaaaattggtttgactaggttaattgcaaaattacatctcacctagttcatggtgtttgttttttccaggtagcttgaactggatcattaagtatcttgggatttaattttgtaatatttgttggtgaaactttgtagtctagaattattgcctggtattgatcatagattaaaattagaaatttgtgaggtttaaacttaaaaagagaaaaaggagaaacattgcgtgatgtgaaaatagaaagcttgcataaaggaaaataagagaaattatgtgctatgaaatgttgggctgcataaaggacctaaaaattacctacggttgtatcatgttcatcttcatagccatttttaatatgccaccgtatactttatggttgaataaatgtatttaatgaatgg

SEQ ID NO: 4061 - protein, 372 aa, Homo sapiens
MEVVEAAAAQLETLKFNGTDFGVGEGPAAPSPGSAPVPGTQPPLQSFEGSPDAGQTVEVKPAGEQPLQPVLNAVAAGTPAPQPQPPAESPACGDCVTSPGAAEPARAPDSLETSDSDSDSDSETDSDSSSSSSSSSSSSSSSSSSCISLPPVLSDGDDDLQIEKENKNFPLKTKDELLLNELPSVEELTIILPEDIELKPLGMVSSIIEQLVIIESMTNLPPVNEETVIFKSDRQAAGKIFEIFGPVAHPFYVLRFNSSDHIESKGIKIKETMYFAPSMKDFTQYIFTEKLKQDKGSDASWKNDQEPPPETWGSQCVAQAGLKLLASSDSPALKQASALAPQSAGITGMSPLPSQYYRFLILTDLTLAILDV

SEQ ID NO: 4062 - DNA, 1330 bp, Homo sapiens
ggaaagcgttgctgcgtaaatggcgggggcgtgtcttttggctcctccgcgtgtagttacctgagaaacgcgggaagttgggcccaggcagtgttgctgcggttgcctaagttgtttttctatttctggagagagccgtgagcttgtccaggggccccaatcctgaggccgacccggtttctggcgcggtgcgatggaggtagtggaggccgccgccgctcagctggaaactctgaaattcaatggcaccgactttggagttggggaaggtccggcggctccgtctccgggctctgcccctgtgccagggacacagccgccgctacagtcgtttgaggggtccccggacgctgggcagaccgtggaggttaagcctgccggggagcagcctctgcagcccgttctgaacgccgtcgcggccgggaccccggcgccgcagccacagccaccggctgaatcgccggcctgcggagactgcgtcacctccccaggagccgcagagcctgcgcgggcgccggactccttggagacctcggactcggattcggactcggacagtgaaacagattcagatagttcaagttcatcgtcttcctcttcatcttcctcatcgtcgtcttcttcctcttgtatatcacttcctccagtgctgtcagatggagatgatgatttacaaattgagaaggaaaataagaattttcctcttaaaacaaaagatgaattacttcttaatctatagagaaaaaaaaaattcagtcatggctctcagtactccagggattggatcctactttccaaccatatctgaaaagtgaaggctcacctaatagcatcaggtaagaaaaatgaaaccagaaagaaagagacttgtctgaagtcatattagtggggaggagcagatctgaactggtaatagatacattccaaactgctgtgtttttagtatttgtggagacctgcatagcaacgttggaatctggtcgtttggactttctcattatttggtttctgaataatcatgtagcatattttctcaaagtgaaggatgaatgtatcatctaatgtaagctttttaaaattgtatttgcttggattatattgcctctcaataaagcttttgacttggaactgtgtagtgtgtgggaaataaatggtggagcttctttagtatgttgaattttagtagttcatttgcgaaatgctgtggtgtttggggatgtttatttccatgcaagcttttcatttgctaatgatgtgaatgaaatagttttcttcctttcctttcctactctttgttatgtgtagaagtattgaataaatgagtccagaa

SEQ ID NO: 4063 - protein, 181 aa, Homo sapiens [sequence omitted]

SEQ ID NO: 4064 - DNA, 3293 bp, Homo sapiens
ccatcctatgagaaagcatgacgggcgggatggcacacacaggcaggggacatgtggagcttgtctgtcaggtctggaacagaaaagcagtagctgtttgttctcgaccctgggccggctctctggcgaagcaagcgagggagcagaaagctaacccgaccaggttccccacccaggactagaccgagtgctcttccgtgactactactttattagtctttattgtcttaaggcagcagtctgttgaacaagccctccccagcaaggaaggagcagagaattatgtaattcatttagataagctagcagtaactttgggaggctgtatgtaacaaggctgacatttcttttccaacacaagtgaggtgaacagccagccaatcctgagtatttgaaaaaatgtatctgcagcaggttatgatcagggagctgtattttcaagtagtaacagcactgcgaagagcaagcaatgaaaggccagcattctaattggaaagaaagaagaggaaatttccctctgcaagggggctaatttgccaactggtgatattgttcagttcaagggaatgaagaattcagaataattttggtaaatggattccaatatggggaataagaataagctgaacagttgacctgctttgaagaaacatactgtccatttgtctaaaataatctataacaaccaaaccaatcaaaatgaattcaacattattttcccaggttgaaaatcattcagtccactctaatttctcagagaagaatgcccagcttctggcttttgaaaatgatgattgtcatctgcccttggccatgatatttaccttagctcttgcttatggagctgtgatcattcttggtgtctctggaaacctggccttgatcataatcatcttgaaacaaaaggagatgagaaatgttaccaacatcctgattgtgaacctttccttctcagacttgcttgttgccatcatgtgtctcccctttacatttgtctacacattaatggaccactgggtctttggtgaggcgatgtgtaagttgaatccttttgtgcaatgtgtttcaatcactgtgtccattttctctctggttctcattgctgtggaacgacatcagctgataatcaaccctcgagggtggagaccaaataatagacatgcttatgtaggtattgctgtgatttgggtccttgctgtggcttcttctttgcctttcctgatctaccaagtaatgactgatgagccgttccaaaatgtaacacttgatgcgtacaaagacaaatacgtgtgctttgatcaatttccatcggactctcataggttgtcttataccactctcctcttggtgctgcagtattttggtccactttgttttatatttatttgctacttcaaggtaagaaaactttttttctatcatttccatttttaccttctttacacagaattcctcatcaaatgagtgtttctatttaaacttttttcttccatagatatatatacgcctaaaaaggagaaacaacatgatggacaagatgagagacaataagtacaggtccagtgaaaccaaaagaatcaatatcatgctgctctccattgtggtagcatttgcagtctgctggctccctcttaccatctttaacactgtgtttgattggaatcatcagatcattgctacctgcaaccacaatctgttattcctgctctgccacctcacagcaatgatatccacttgtgtcaaccccatattttatgggttcctgaacaaaaacttccagagagacttgcagttcttcttcaacttttgtgatttccggtctcgggatgatgattatgaaacaatagccatgtccacgatgcacacagatgtttccaaaacttctttgaagcaagcaagcccagtcgcatttaaaaaaatcaacaacaatgatgataatgaaaaaatctgaaactacttatagcctatggtcccggatgacatctgtttaaaaacaagcacaacctgcaacatactttgattacctgttctcccaaggaatggggttgaaatcatttgaaaatgactaagattttcttgtcttgctttttactgcttttgttgtagttgtcataattacatttggaacaaaaggtgtgggctttggggtcttctggaaatagttttgaccagacatctttgaagtgctttttgtgaatttatgcatataatataaagacttttatactgtacttattggaatgaaatttctttaaagtattactattaactgacttcagaagtacctgccatccaatacggtcattagattgggtcatcttgattagattagattagattagattgtcaacagattgggccatccttactttatgataggcatcattttagtgtgttacaatagtaacagtatgcaaaagcagcattcaggagccgaaagatagtctgaagtcattcagaagtggtttgaggtttctgttttttggtggtttttgtttgttttttttttttttcaccttaagggaggatttaatttgctcccaactgattgtcacttaaatgaaaatttaaaaatgaataaaaagacatacttctcagctgcaaatattatggagaattggggcacccacaggaatgaagagagaaagcagctccctaacttcaaaaccattttggtacctgacaacaagagcattttagagtaattaatttaataaagtaaattagtattgctgcaaatagttaaattatatttatttgaattgatggtcaagagattttccattttttttacagactgttcagtgtttgtcaagctttctggcataaatatgtactcaaaaggcatttccgcttacaatttgtagaaacacaaaatgcgttttccatacagcagtgcctatatagtgactgatttttaactttcaatgtccatctttcaaaggaagtaacaccaaggtacaatgttaaaggaatattcactttacctagcagggaaaaatacacaaaaactgcagatacttcatatagcccattttaacttgtataaactgtgtgacttgtggcgtcttataaataatgcactgtaaagattactgaatagttgtgtcatgttaatgtgcctaatttcatgtatcttgtaatcatgattgagcctcagaatcatttggagaaactatattttaaagaacaagacatacttcaatgtattatacagataaagtattacatgtgtttgattttaaaagggcggacattttattaaaatcaatattgtttttgctttttctgag

SEQ ID NO: 4065 - protein, 254 aa, Homo sapiens [sequence omitted]

SEQ ID NO: 4066 - DNA, 2705 bp, Homo sapiens
aatctttaggatctgagcaggagaaataccagcggatcttccccactctgctcccttccattcccacccttccttctttaataagcaggagcgaaaaagacaaattccaaagaggattgttcagttcaagggaatgaagaattcagaataattttggtaaatggattccaatatggggaataagaataagctgaacagttgacctgctttgaagaaacatactgtccatttgtctaaaataatctataacaaccaaaccaatcaaaatgaattcaacattattttcccaggttgaaaatcattcacttgaaacaaaaggagatgagaaatgttaccaacatcctgattgtgaacctttccttctcagacttgcttgttgccatcatgtgtctcccctttacatttgtctacacattaatggaccactgggtctttggtgaggcgatgtgtaagttgaatccttttgtgcaatgtgtttcaatcactgtgtccattttctctctggttctcattgctgtggaacgacatcagctgataatcaaccctcgagggtggagaccaaataatagacatgcttatgtaggtattgctgtgatttgggtccttgctgtggcttcttctttgcctttcctgatctaccaagtaatgactgatgagccgttccaaaatgtaacacttgatgcgtacaaagacaaatacgtgtgctttgatcaatttccatcggactctcataggttgtcttataccactctcctcttggtgctgcagtattttggtccactttgttttatatttatttgctacttcaaggtaagaaaactttttttctatcatttccatttttaccttctttacacagaattcctcatcaaatgagtgtttctatttaaacttttttcttccatagatatatatacgcctaaaaaggagaaacaacatgatggacaagatgagagacaataagtacaggtccagtgaaaccaaaagaatcaatatcatgctgctctccattgtggtagcatttgcagtctgctggctccctcttaccatctttaacactgtgtttgattggaatcatcagatcattgctacctgcaaccacaatctgttattcctgctctgccacctcacagcaatgatatccacttgtgtcaaccccatattttatgggttcctgaacaaaaacttccagagagacttgcagttcttcttcaacttttgtgatttccggtctcgggatgatgattatgaaacaatagccatgtccacgatgcacacagatgtttccaaaacttctttgaagcaagcaagcccagtcgcatttaaaaaaatcaacaacaatgatgataatgaaaaaatctgaaactacttatagcctatggtcccggatgacatctgtttaaaaacaagcacaacctgcaacatactttgattacctgttctcccaaggaatggggttgaaatcatttgaaaatgactaagattttcttgtcttgctttttactgcttttgttgtagttgtcataattacatttggaacaaaaggtgtgggctttggggtcttctggaaatagttttgaccagacatctttgaagtgctttttgtgaatttatgcatataatataaagacttttatactgtacttattggaatgaaatttctttaaagtattactattaactgacttcagaagtacctgccatccaatacggtcattagattgggtcatcttgattagattagattagattagattgtcaacagattgggccatccttactttatgataggcatcattttagtgtgttacaatagtaacagtatgcaaaagcagcattcaggagccgaaagatagtctgaagtcattcagaagtggtttgaggtttctgttttttggtggtttttgtttgttttttttttttttcaccttaagggaggatttaatttgctcccaactgattgtcacttaaatgaaaatttaaaaatgaataaaaagacatacttctcagctgcaaatattatggagaattggggcacccacaggaatgaagagagaaagcagctccctaacttcaaaaccattttggtacctgacaacaagagcattttagagtaattaatttaataaagtaaattagtattgctgcaaatagttaaattatatttatttgaattgatggtcaagagattttccattttttttacagactgttcagtgtttgtcaagctttctggcataaatatgtactcaaaaggcatttccgcttacaatttgtagaaacacaaaatgcgttttccatacagcagtgcctatatagtgactgatttttaactttcaatgtccatctttcaaaggaagtaacaccaaggtacaatgttaaaggaatattcactttacctagcagggaaaaatacacaaaaactgcagatacttcatatagcccattttaacttgtataaactgtgtgacttgtggcgtcttataaataatgcactgtaaagattactgaatagttgtgtcatgttaatgtgcctaatttcatgtatcttgtaatcatgattgagcctcagaatcatttggagaaactatattttaaagaacaagacatacttcaatgtattatacagataaagtattacatgtgtttgattttaaaagggcggacattttattaaaatcaatattgtttttgctttttctgag

SEQ ID NO: 4067 - protein, 57 aa, Homo sapiens
MNSTLFSQVENHSLETKGDEKCYQHPDCEPFLLRLACCHHVSPLYICLHINGPLGLW

SEQ ID NO: 4068 - DNA, 2886 bp, Homo sapiens
gacttcggccacaagatggcactgacctgcaaacaaagaaaagcacagtggcaccgactttttcaagcctcgggaaactgccctgccttccccggagtcgaggactgtggggattagggcttcctttcccctgcgcgggagattgttcagttcaagggaatgaagaattcagaataattttggtaaatggattccaatatggggaataagaataagctgaacagttgacctgctttgaagaaacatactgtccatttgtctaaaataatctataacaaccaaaccaatcaaaatgaattcaacattattttcccaggttgaaaatcattcagtccactctaatttctcagagaagaatgcccagcttctggcttttgaaaatgatgattgtcatctgcccttggccatgatatttaccttagctcttgcttatggagctgtgatcattcttggtgtctctggaaacctggccttgatcataatcatcttgaaacaaaaggagatgagaaatgttaccaacatcctgattgtgaacctttccttctcagacttgcttgttgccatcatgtgtctcccctttacatttgtctacacattaatggaccactgggtctttggtgaggcgatgtgtaagttgaatccttttgtgcaatgtgtttcaatcactgtgtccattttctctctggttctcattgctgtggaacgacatcagctgataatcaaccctcgagggtggagaccaaataatagacatgcttatgtaggtattgctgtgatttgggtccttgctgtggcttcttctttgcctttcctgatctaccaagtaatgactgatgagccgttccaaaatgtaacacttgatgcgtacaaagacaaatacgtgtgctttgatcaatttccatcggactctcataggttgtcttataccactctcctcttggtgctgcagtattttggtccactttgttttatatttatttgctacttcaaggtaagaaaactttttttctatcatttccatttttaccttctttacacagaattcctcatcaaatgagtgtttctatttaaacttttttcttccatagatatatatacgcctaaaaaggagaaacaacatgatggacaagatgagagacaataagtacaggtccagtgaaaccaaaagaatcaatatcatgctgctctccattgtggtagcatttgcagtctgctggctccctcttaccatctttaacactgtgtttgattggaatcatcagatcattgctacctgcaaccacaatctgttattcctgctctgccacctcacagcaatgatatccacttgtgtcaaccccatattttatgggttcctgaacaaaaacttccagagagacttgcagttcttcttcaacttttgtgatttccggtctcgggatgatgattatgaaacaatagccatgtccacgatgcacacagatgtttccaaaacttctttgaagcaagcaagcccagtcgcatttaaaaaaatcaacaacaatgatgataatgaaaaaatctgaaactacttatagcctatggtcccggatgacatctgtttaaaaacaagcacaacctgcaacatactttgattacctgttctcccaaggaatggggttgaaatcatttgaaaatgactaagattttcttgtcttgctttttactgcttttgttgtagttgtcataattacatttggaacaaaaggtgtgggctttggggtcttctggaaatagttttgaccagacatctttgaagtgctttttgtgaatttatgcatataatataaagacttttatactgtacttattggaatgaaatttctttaaagtattactattaactgacttcagaagtacctgccatccaatacggtcattagattgggtcatcttgattagattagattagattagattgtcaacagattgggccatccttactttatgataggcatcattttagtgtgttacaatagtaacagtatgcaaaagcagcattcaggagccgaaagatagtctgaagtcattcagaagtggtttgaggtttctgttttttggtggtttttgtttgttttttttttttttcaccttaagggaggatttaatttgctcccaactgattgtcacttaaatgaaaatttaaaaatgaataaaaagacatacttctcagctgcaaatattatggagaattggggcacccacaggaatgaagagagaaagcagctccctaacttcaaaaccattttggtacctgacaacaagagcattttagagtaattaatttaataaagtaaattagtattgctgcaaatagttaaattatatttatttgaattgatggtcaagagattttccattttttttacagactgttcagtgtttgtcaagctttctggcataaatatgtactcaaaaggcatttccgcttacaatttgtagaaacacaaaatgcgttttccatacagcagtgcctatatagtgactgatttttaactttcaatgtccatctttcaaaggaagtaacaccaaggtacaatgttaaaggaatattcactttacctagcagggaaaaatacacaaaaactgcagatacttcatatagcccattttaacttgtataaactgtgtgacttgtggcgtcttataaataatgcactgtaaagattactgaatagttgtgtcatgttaatgtgcctaatttcatgtatcttgtaatcatgattgagcctcagaatcatttggagaaactatattttaaagaacaagacatacttcaatgtattatacagataaagtattacatgtgtttgattttaaaagggcggacattttattaaaatcaatattgtttttgctttttctgag

SEQ ID NO: 4069 - protein, 254 aa, Homo sapiens [sequence omitted]

SEQ ID NO: 4070 - DNA, 3393 bp, Homo sapiens
aaaaaaactaaaaagcagctaagcgctgggaacaaatctgacttaatgcattttctcagtgggccaaagaaaggagggccgattgactgctttgactttttaaaggtcttctctttgttcacttataaagtgaggaaaacaaattctcggcactggcgtgagagttatttgagcgtcacaaaagaaagcaaaagaaaatattagtgccattattgtggcgaatttcatgtttcccagcgagccctttgattcctggtttgggctggcgctcgagctctccagccgggtatgacttcggccacaagatggcactgacctgcaaacaaagaaaagcacagtggcaccgactttttcaagcctcgggaaactgccctgccttccccggagtcgaggactgtggggattagggcttcctttcccctgcgcgggaggtctgtgtcgaataatgtgtggcttctgttggattgcttttctttccaaaattcctaggcaatgcttccccgaggtgtgcacctttgtgaggtgtttgtggggttgggggagcttcaggcgctactcgcgggacgccgtcacgtgatccgggatgaggtggagttcggctttaaggaggcgtctcttcctagcttcatcaatctttaggatctgagcaggagaaataccagcggatcttccccactctgctcccttccattcccacccttccttctttaataagcaggagcgaaaaagacaaattccaaagaggattgttcagttcaagggaatgaagaattcagaataattttggtaaatggattccaatatggggaataagaataagctgaacagttgacctgctttgaagaaacatactgtccatttgtctaaaataatctataacaaccaaaccaatcaaaatgaattcaacattattttcccaggttgaaaatcattcagtccactctaatttctcagagaagaatgcccagcttctggcttttgaaaatgatgattgtcatctgcccttggccatgatatttaccttagctcttgcttatggagctgtgatcattcttggtgtctctggaaacctggccttgatcataatcatcttgaaacaaaaggagatgagaaatgttaccaacatcctgattgtgaacctttccttctcagacttgcttgttgccatcatgtgtctcccctttacatttgtctacacattaatggaccactgggtctttggtgaggcgatgtgtaagttgaatccttttgtgcaatgtgtttcaatcactgtgtccattttctctctggttctcattgctgtggaacgacatcagctgataatcaaccctcgagggtggagaccaaataatagacatgcttatgtaggtattgctgtgatttgggtccttgctgtggcttcttctttgcctttcctgatctaccaagtaatgactgatgagccgttccaaaatgtaacacttgatgcgtacaaagacaaatacgtgtgctttgatcaatttccatcggactctcataggttgtcttataccactctcctcttggtgctgcagtattttggtccactttgttttatatttatttgctacttcaagatatatatacgcctaaaaaggagaaacaacatgatggacaagatgagagacaataagtacaggtccagtgaaaccaaaagaatcaatatcatgctgctctccattgtggtagcatttgcagtctgctggctccctcttaccatctttaacactgtgtttgattggaatcatcagatcattgctacctgcaaccacaatctgttattcctgctctgccacctcacagcaatgatatccacttgtgtcaaccccatattttatgggttcctgaacaaaaacttccagagagacttgcagttcttcttcaacttttgtgatttccggtctcgggatgatgattatgaaacaatagccatgtccacgatgcacacagatgtttccaaaacttctttgaagcaagcaagcccagtcgcatttaaaaaaatcaacaacaatgatgataatgaaaaaatctgaaactacttatagcctatggtcccggatgacatctgtttaaaaacaagcacaacctgcaacatactttgattacctgttctcccaaggaatggggttgaaatcatttgaaaatgactaagattttcttgtcttgctttttactgcttttgttgtagttgtcataattacatttggaacaaaaggtgtgggctttggggtcttctggaaatagttttgaccagacatctttgaagtgctttttgtgaatttatgcatataatataaagacttttatactgtacttattggaatgaaatttctttaaagtattactattaactgacttcagaagtacctgccatccaatacggtcattagattgggtcatcttgattagattagattagattagattgtcaacagattgggccatccttactttatgataggcatcattttagtgtgttacaatagtaacagtatgcaaaagcagcattcaggagccgaaagatagtctgaagtcattcagaagtggtttgaggtttctgttttttggtggtttttgtttgttttttttttttttcaccttaagggaggatttaatttgctcccaactgattgtcacttaaatgaaaatttaaaaatgaataaaaagacatacttctcagctgcaaatattatggagaattggggcacccacaggaatgaagagagaaagcagctccctaacttcaaaaccattttggtacctgacaacaagagcattttagagtaattaatttaataaagtaaattagtattgctgcaaatagttaaattatatttatttgaattgatggtcaagagattttccattttttttacagactgttcagtgtttgtcaagctttctggcataaatatgtactcaaaaggcatttccgcttacaatttgtagaaacacaaaatgcgttttccatacagcagtgcctatatagtgactgatttttaactttcaatgtccatctttcaaaggaagtaacaccaaggtacaatgttaaaggaatattcactttacctagcagggaaaaatacacaaaaactgcagatacttcatatagcccattttaacttgtataaactgtgtgacttgtggcgtcttataaataatgcactgtaaagattactgaatagttgtgtcatgttaatgtgcctaatttcatgtatcttgtaatcatgattgagcctcagaatcatttggagaaactatattttaaagaacaagacatacttcaatgtattatacagataaagtattacatgtgtttgattttaaaagggcggacattttattaaaatcaatattgtttttgctttttctgag

SEQ ID NO: 4071 - protein, 384 aa, Homo sapiens; identical to SEQ ID NO: 473

SEQ ID NO: 4072 - DNA, 2794 bp, Homo sapiens
aaaaaaactaaaaagcagctaagcgctgggaacaaatctgacttaatgcattttctcagtgggccaaagaaaggagggccgattgactgctttgactttttaaaggtcttctctttgttcacttataaagtgaggaaaacaaattctcggcactggcgtgagagttatttgagcgtcacaaaagaaagcaaaagaaaatattagtgccattattgtggcgaatttcatgtttcccagcgagccctttgattcctggtttgggctggcgctcgagctctccagccgggtatgacttcggccacaagatggcactgacctgcaaacaaagaaaagcacagtggcaccgactttttcaagcctcgggaaactgccctgccttccccggagtcgaggactgtggggattagggcttcctttcccctgcgcgggaggtctgtgtcgaataatgtgtggcttctgttggattgcttttctttccaaaattcctaggcaatgcttccccgaggtgtgcacctttgtgaggtgtttgtggggttgggggagcttcaggcgctactcgcgggacgccgtcacgtgatccgggatgaggtggagttcggctttaaggaggcgtctcttcctagcttcatcaatctttaggatctgagcaggagaaataccagcggatcttccccactctgctcccttccattcccacccttccttctttaataagcaggagcgaaaaagacaaattccaaagaggattgttcagttcaagggaatgaagaattcagaataattttggtaaatggattccaatatggggaataagaataagctgaacagttgacctgctttgaagaaacatactgtccatttgtctaaaataatctataacaaccaaaccaatcaaaatgaattcaacattattttcccaggttgtcttataccactctcctcttggtgctgcagtattttggtccactttgttttatatttatttgctacttcaagatatatatacgcctaaaaaggagaaacaacatgatggacaagatgagagacaataagtacaggtccagtgaaaccaaaagaatcaatatcatgctgctctccattgtggtagcatttgcagtctgctggctccctcttaccatctttaacactgtgtttgattggaatcatcagatcattgctacctgcaaccacaatctgttattcctgctctgccacctcacagcaatgatatccacttgtgtcaaccccatattttatgggttcctgaacaaaaacttccagagagacttgcagttcttcttcaacttttgtgatttccggtctcgggatgatgattatgaaacaatagccatgtccacgatgcacacagatgtttccaaaacttctttgaagcaagcaagcccagtcgcatttaaaaaaatcaacaacaatgatgataatgaaaaaatctgaaactacttatagcctatggtcccggatgacatctgtttaaaaacaagcacaacctgcaacatactttgattacctgttctcccaaggaatggggttgaaatcatttgaaaatgactaagattttcttgtcttgctttttactgcttttgttgtagttgtcataattacatttggaacaaaaggtgtgggctttggggtcttctggaaatagttttgaccagacatctttgaagtgctttttgtgaatttatgcatataatataaagacttttatactgtacttattggaatgaaatttctttaaagtattactattaactgacttcagaagtacctgccatccaatacggtcattagattgggtcatcttgattagattagattagattagattgtcaacagattgggccatccttactttatgataggcatcattttagtgtgttacaatagtaacagtatgcaaaagcagcattcaggagccgaaagatagtctgaagtcattcagaagtggtttgaggtttctgttttttggtggtttttgtttgttttttttttttttcaccttaagggaggatttaatttgctcccaactgattgtcacttaaatgaaaatttaaaaatgaataaaaagacatacttctcagctgcaaatattatggagaattggggcacccacaggaatgaagagagaaagcagctccctaacttcaaaaccattttggtacctgacaacaagagcattttagagtaattaatttaataaagtaaattagtattgctgcaaatagttaaattatatttatttgaattgatggtcaagagattttccattttttttacagactgttcagtgtttgtcaagctttctggcataaatatgtactcaaaaggcatttccgcttacaatttgtagaaacacaaaatgcgttttccatacagcagtgcctatatagtgactgatttttaactttcaatgtccatctttcaaaggaagtaacaccaaggtacaatgttaaaggaatattcactttacctagcagggaaaaatacacaaaaactgcagatacttcatatagcccattttaacttgtataaactgtgtgacttgtggcgtcttataaataatgcactgtaaagattactgaatagttgtgtcatgttaatgtgcctaatttcatgtatcttgtaatcatgattgagcctcagaatcatttggagaaactatattttaaagaacaagacatacttcaatgtattatacagataaagtattacatgtgtttgattttaaaagggcggacattttattaaaatcaatattgtttttgctttttctgag

SEQ ID NO: 4073 - protein, 51 aa, Homo sapiens
MNSTLFSQVVLYHSPLGAAVFWSTLFYIYLLLQDIYTPKKEKQHDGQDERQ

SEQ ID NO: 4074 - DNA, 3350 bp, Homo sapiens
acacaggcatgcaccaccctcccttccaaattctaacagcagagtttctcttcccttgagaaatctgaaatctaaaattgcattcggactgcaaaattctgctgaaagagccttaggctattttccatggtctaaggtaaaatcgttttggctttggtccaacacaacgcctcagttcctttaaaagattaactaaaggtctgtgaacttggaaaaaagaattcccgtttctggaattcgagttctatggatgtttgttattgctcgcatttgttatatgaagacacctcgcaaacaggagcgcaaaccttagagcgcagctgcctcccgggctcgggtcagcgctggaccgcgcggcagctggacggcctgagtggcgccccgcgggctgcgcccccggcctcgccagagacccgctagggttgagccctgacccgggcaccccgcgggctgctgttcccagctccggatgccagccgggctgcagccagagcgcgtccagccgggggcagcgctttgtccatcccccgccccatccccaggaggctccttcgcggatccccgacactctcctcccgggttcggcccgcgcctgctccacccggattgttcagttcaagggaatgaagaattcagaataattttggtaaatggattccaatatggggaataagaataagctgaacagttgacctgctttgaagaaacatactgtccatttgtctaaaataatctataacaaccaaaccaatcaaaatgaattcaacattattttcccaggttgaaaatcattcagtccactctaatttctcagagaagaatgcccagcttctggcttttgaaaatgatgattgtcatctgcccttggccatgatatttaccttagctcttgcttatggagctgtgatcattcttggtgtctctggaaacctggccttgatcataatcatcttgaaacaaaaggagatgagaaatgttaccaacatcctgattgtgaacctttccttctcagacttgcttgttgccatcatgtgtctcccctttacatttgtctacacattaatggaccactgggtctttggtgaggcgatgtgtaagttgaatccttttgtgcaatgtgtttcaatcactgtgtccattttctctctggttctcattgctgtggaacgacatcagctgataatcaaccctcgagggtggagaccaaataatagacatgcttatgtaggtattgctgtgatttgggtccttgctgtggcttcttctttgcctttcctgatctaccaagtaatgactgatgagccgttccaaaatgtaacacttgatgcgtacaaagacaaatacgtgtgctttgatcaatttccatcggactctcataggttgtcttataccactctcctcttggtgctgcagtattttggtccactttgttttatatttatttgctacttcaaggtaagaaaactttttttctatcatttccatttttaccttctttacacagaattcctcatcaaatgagtgtttctatttaaacttttttcttccatagatatatatacgcctaaaaaggagaaacaacatgatggacaagatgagagacaataagtacaggtccagtgaaaccaaaagaatcaatatcatgctgctctccattgtggtagcatttgcagtctgctggctccctcttaccatctttaacactgtgtttgattggaatcatcagatcattgctacctgcaaccacaatctgttattcctgctctgccacctcacagcaatgatatccacttgtgtcaaccccatattttatgggttcctgaacaaaaacttccagagagacttgcagttcttcttcaacttttgtgatttccggtctcgggatgatgattatgaaacaatagccatgtccacgatgcacacagatgtttccaaaacttctttgaagcaagcaagcccagtcgcatttaaaaaaatcaacaacaatgatgataatgaaaaaatctgaaactacttatagcctatggtcccggatgacatctgtttaaaaacaagcacaacctgcaacatactttgattacctgttctcccaaggaatggggttgaaatcatttgaaaatgactaagattttcttgtcttgctttttactgcttttgttgtagttgtcataattacatttggaacaaaaggtgtgggctttggggtcttctggaaatagttttgaccagacatctttgaagtgctttttgtgaatttatgcatataatataaagacttttatactgtacttattggaatgaaatttctttaaagtattactattaactgacttcagaagtacctgccatccaatacggtcattagattgggtcatcttgattagattagattagattagattgtcaacagattgggccatccttactttatgataggcatcattttagtgtgttacaatagtaacagtatgcaaaagcagcattcaggagccgaaagatagtctgaagtcattcagaagtggtttgaggtttctgttttttggtggtttttgtttgttttttttttttttcaccttaagggaggatttaatttgctcccaactgattgtcacttaaatgaaaatttaaaaatgaataaaaagacatacttctcagctgcaaatattatggagaattggggcacccacaggaatgaagagagaaagcagctccctaacttcaaaaccattttggtacctgacaacaagagcattttagagtaattaatttaataaagtaaattagtattgctgcaaatagttaaattatatttatttgaattgatggtcaagagattttccattttttttacagactgttcagtgtttgtcaagctttctggcataaatatgtactcaaaaggcatttccgcttacaatttgtagaaacacaaaatgcgttttccatacagcagtgcctatatagtgactgatttttaactttcaatgtccatctttcaaaggaagtaacaccaaggtacaatgttaaaggaatattcactttacctagcagggaaaaatacacaaaaactgcagatacttcatatagcccattttaacttgtataaactgtgtgacttgtggcgtcttataaataatgcactgtaaagattactgaatagttgtgtcatgttaatgtgcctaatttcatgtatcttgtaatcatgattgagcctcagaatcatttggagaaactatattttaaagaacaagacatacttcaatgtattatacagataaagtattacatgtgtttgattttaaaagggcggacattttattaaaatcaatattgtttttgctttttctgag

SEQ ID NO: 4075 - protein, 67 aa, Homo sapiens
MPAGLQPERVQPGAALCPSPAPSPGGSFADPRHSPPGFGPRLLHPDCSVQGNEEFRIILVNGFQYGE

SEQ ID NO: 4076 - DNA, 1863 bp, Homo sapiens
gccgccaccgccggggtgcaggagcgatcgcgctgggccgcgctcccgggagcccagggcctgcagcggccggggcgccccgaggtctgctcattgtgtttttcaggaaaaaggaagggaaagggtgttacaaggaaaggctatcggtaacaactgacctgccacaaagttagaagaaaggattgattcaagaaagactataatatggatttagagctcgacgagtattataacaagacacttgccacagagaataatactgctgccactcggaattctgatttcccagtctgggatgactataaaagcagtgtagatgacttacagtattttctgattgggctctatacatttgtaagtcttcttggctttatggggaatctacttattttaatggctctcatgaaaaagcgtaatcagaagactacggtaaacttcctcataggcaatctggccttttctgatatcttggttgtgctgttttgctcacctttcacactgacgtctgtcttgctggatcagtggatgtttggcaaagtcatgtgccatattatgccttttcttcaatgtgtgtcagttttggtttcaactttaattttaatatcaattgccattgtcaggtatcatatgataaaacatcccatatctaataatttaacagcaaaccatggctactttctgatagctactgtctggacactaggttttgccatctgttctccccttccagtgtttcacagtcttgtggaacttcaagaaacatttggttcagcattgctgagcagcaggtatttatgtgttgagtcatggccatctgattcatacagaattgcctttactatctctttattgctagttcagtatattctgcccttagtttgtcttactgtaagtcatacaagtgtctgcagaagtataagctgtggattgtccaacaaagaaaacagacttgaagaaaatgagatgatcaacttaactcttcatccatccaaaaagagtgggcctcaggtgaaactctctggcagccataaatggagttattcattcatcaaaaaacacagaagaagatatagcaagaagacagcatgtgtgttacctgctccagaaagaccttctcaagagaaccactccagaatacttccagaaaactttggctctgtaagaagtcagctctcttcatccagtaagttcataccaggggtccccacttgctttgagataaaacctgaagaaaattcagatgttcatgaattgagagtaaaacgttctgttacaagaataaaaaagagatctcgaagtgttttctacagactgaccatactgatattagtatttgctgttagttggatgccactacaccttttccatgtggtaactgattttaatgacaatcttatttcaaataggcatttcaagttggtgtattgcatttgtcatttgttgggcatgatgtcctgttgtcttaatccaattctatatgggtttcttaataatgggattaaagctgatttagtgtcccttatacactgtcttcatatgtaataattctcactgtttaccaaggaaagaacaaatgctggggtcatataaaatatatttatgataactatttacatataataaatagaaattttgttaacatggaatttaatttatgtgaaagagttctggattcaaatgtcagttcataatatatggaagataattttatgtgttatagtaggattaatttatttagttgtgcagtcagtgtcaatccaatctgtaatttcactttagaaggttgtattaccttccacttccatgttgtcttataaacaaatgaattgtattttttgttgaaagtaaaagttatatctaacc

SEQ ID NO: 4077 - protein, 445 aa, Homo sapiens; identical to SEQ ID NO: 477

SEQ ID NO: 4078 - DNA, 1939 bp, Homo sapiens
gccgccaccgccggggtgcaggagcgatcgcgctgggccgcgctcccgggagcccagggcctgcagcggccggggcgccccgaggtctgctcattgtgtttttcaggaaaaaggaagggaaagggtgttacaaggaaaggctatcggtaacaactgacctgccacaaagttagaagaaaggattgattcaagaaagactataatatggatttagagctcgacgagtattataacaagacacttgccacagagaataatactgctgccactcggaattctgatttcccagtctgggatgactataaaagcagtgtagatgacttacagtattttctgattgggctctatacatttgtaagtcttcttggctttatggggaatctacttattttaatggctctcatgaaaaagcgtaatcagaagactacggtaaacttcctcataggcaatctggccttttctgatatcttggttgtgctgttttgctcacctttcacactgacgtctgtcttgctggatcagtggatgtttggcaaagtcatgtgccatattatgccttttcttcaatgtgtgtcagttttggtttcaactttaattttaatatcaattgccattgtcaggtatcatatgataaaacatcccatatctaataatttaacagcaaaccatggctactttctgatagctactgtctggacactaggttttgccatctgttctccccttccagtgtttcacagtcttgtggaacttcaagaaacatttggttcagcattgctgagcagcaggtatttatgtgttgagtcatggccatctgattcatacagaattgcctttactatctctttattgctagttcagtatattctgcccttagtttgtcttactgtaagtcatacaagtgtctgcagaagtataagctgtggattgtccaacaaagaaaacagacttgaagaaaatgagatgatcaacttaactcttcatccatccaaaaagagtgggcctcaggtgaaactctctggcagccataaatggagttattcattcatcaaaaaacacagaagaagatatagcaagaagacagcatgtgtgttacctgctccagaaagaccttctcaagagaaccactccagaatacttccagaaaactttggctctgtaagaagtcagctctcttcatccagtaagttcataccaggggtccccacttgctttgagataaaacctgaagaaaattcagatgttcatgaattgagagtaaaacgttctgttacaagaataaaaaagagatctcgaagtgttttctacagactgaccatactgatattagtatttgctgttagttggatgccactacaccttttccatgtggtaactgattttaatgacaatcttatttcaaataggcatttcaagttggtgtattgcatttgtcatttgttgggcatgatgtcctgttgtcttaatccaattctatatgggtttcttaataatgggattaaagctgatttagtgtcccttatacactgtcttcatatgtaataattctcactgtttaccaaggaaagaacaaatgctggggtcatataaaatatatttatgataactatttacatataataaatagaaattttgttaacatggaatttaatttatgtgaaagagttctggattcaaatgtcagttcataatatatggaagataattttatgtgttatagtaggattaatttatttagttgtgcagtcagtgtcaatccaatctgtaatttcactttagaaggttgtattaccttccacttccatgttgtcttataaacaaatgaattgtattttttgttgaaagtaaaagttatatctaaccaactcagtacttttgtccaaaaatataataagaaaaaatttttctcgaggaacttttaatttcaaacttgaagaat

SEQ ID NO: 4079 - protein, 445 aa, Homo sapiens; identical to SEQ ID NO: 477

SEQ ID NO: 4080 - DNA, 3181 bp, Homo sapiens
ccctgggagcccgcacccgtctctggtgccagggcgttgtcgggggtcccaagagagcggggtggggaaggtgaagggagcgcggctggaaaaatggggattagggtggcggaacaggcacttgtcaggagtgaagagacagcggagagggtactgggctgaattctttcgtgccgagcaggtccctccggttcccaactcacccgggtggagcaggcgcgggccgaacccgggaggagagtgtcggggatccgcgaaggagcctcctggggatggggcgggggatggacaaagcgctgcccccggctggacgcgctctggctgcagcccggctggcatccggagctgggaacagcagcccgcggggtgcccgggtcagggctcaaccctagcgggtctctggcgaggccgggggcgcagcccgcggggcgccactcaggccgtccagctgccgcgcggtccagcgctgacccgagcccgggaggcagctgcgctctaaggtttgcgctcctgtttgcgaggtgtcttcatataacaaatgcgagcaataacaaacatccatagaactcgaattccagaaacgggaattcttttttccaagttcacagacctttagttaatcttttaaaggaactgaggcgttgtgttggaccaaagccaaaacgattttaccttagaccatggaaaatagcctaaggctctttcagcagaattttgcagtccgaatgcaattttagatttcagatttctcaagggaagagaaactctgctgttagaatttggaagggagggtggtgcatgcctgtgtgtttgtcagctgagcagagctgtatttatctttccaattcaaattgtgccagattctggctttaagaacaaaccatgggaatatttgagaacatggaatcatgctgctgttccacgatcacagcaaaacagacaatagttgatattgtatcattgcaggaggaaaaagaattacatatattttattcttttgtgtgattgtcatcctttgtgaaaagaatgatgtgtattttcataaagcaaaaaattattcaaacaaagaaaccttatttaaatgtacaagtcagacttttaatatcctttgaattccctgcagttcctcctattattcttgagaactatctactttcttaaaatacttaaaatctattcagaaggtttcatttgtctaggtgtcagatatagaagagtttataagaaaattccagtaaacctttaaaaagatattattttttataagttgccatagtttaataaagaacttttatttttcacactttttactcagagattaaagttctgtgtttcagcctggaaattctgatggtgggagatacaactaatacaaaagagaatgagtaaatatagtaattaggtctgctcattgtgtttttcaggaaaaaggaagggaaagggtgttacaaggaaaggctatcggtaacaactgacctgccacaaagttagaagaaaggattgattcaagaaagactataatatggatttagagctcgacgagtattataacaagacacttgccacagagaataatactgctgccactcggaattctgatttcccagtctgggatgactataaaagcagtgtagatgacttacagtattttctgattgggctctatacatttgtaagtcttcttggctttatggggaatctacttattttaatggctctcatgaaaaagcgtaatcagaagactacggtaaacttcctcataggcaatctggccttttctgatatcttggttgtgctgttttgctcacctttcacactgacgtctgtcttgctggatcagtggatgtttggcaaagtcatgtgccatattatgccttttcttcaatgtgtgtcagttttggtttcaactttaattttaatatcaattgccattgtcaggtatcatatgataaaacatcccatatctaataatttaacagcaaaccatggctactttctgatagctactgtctggacactaggttttgccatctgttctccccttccagtgtttcacagtcttgtggaacttcaagaaacatttggttcagcattgctgagcagcaggtatttatgtgttgagtcatggccatctgattcatacagaattgcctttactatctctttattgctagttcagtatattctgcccttagtttgtcttactgtaagtcatacaagtgtctgcagaagtataagctgtggattgtccaacaaagaaaacagacttgaagaaaatgagatgatcaacttaactcttcatccatccaaaaagagtgggcctcaggtgaaactctctggcagccataaatggagttattcattcatcaaaaaacacagaagaagatatagcaagaagacagcatgtgtgttacctgctccagaaagaccttctcaagagaaccactccagaatacttccagaaaactttggctctgtaagaagtcagctctcttcatccagtaagttcataccaggggtccccacttgctttgagataaaacctgaagaaaattcagatgttcatgaattgagagtaaaacgttctgttacaagaataaaaaagagatctcgaagtgttttctacagactgaccatactgatattagtatttgctgttagttggatgccactacaccttttccatgtggtaactgattttaatgacaatcttatttcaaataggcatttcaagttggtgtattgcatttgtcatttgttgggcatgatgtcctgttgtcttaatccaattctatatgggtttcttaataatgggattaaagctgatttagtgtcccttatacactgtcttcatatgtaataattctcactgtttaccaaggaaagaacaaatgctggggtcatataaaatatatttatgataactatttacatataataaatagaaattttgttaacatggaatttaatttatgtgaaagagttctggattcaaatgtcagttcataatatatggaagataattttatgtgttatagtaggattaatttatttagttgtgcagtcagtgtcaatccaatctgtaatttcactttagaaggttgtattaccttccacttccatgttgtcttataaacaaatgaattgtattttttgttgaaagtaaaagttatatctaacc

SEQ ID NO: 4081 - protein, 445 aa, Homo sapiens; identical to SEQ ID NO: 477

SEQ ID NO: 4082 - DNA, 1104 bp, Homo sapiens
aggactataatatggatttagagctcgacgagtattataacaagacacttgccacagagaataatactgctgccactcggaattctgatttcccagtctgggatgactataaaagcagtgtagatgacttacagtattttctgattgggctctatacatttagtgggcctcaggtgaaactctctggcagccataaatggagttattcattcatcaaaaaacacagaagaagatatagcaagaagacagcatgtgtgttacctgctccagaaagaccttctcaagagaaccactccagaatacttccagaaaactttggctctgtaagaagtcagctctcttcatccagtaagttcataccaggggtccccacttgctttgagataaaacctgaagaaaattcagatgttcatgaattgagagtaaaacgttctgttacaagaataaaaaagagatctcgaagtgttttctacagactgaccatactgatattagtatttgctgttagttggatgccactacaccttttccatgtggtaactgattttaatgacaatcttatttcaaataggcatttcaagttggtgtattgcatttgtcatttgttgggcatgatgtcctgttgtcttaatccaattctatatgggtttcttaataatgggattaaagctgatttagtgtcccttatacactgtcttcatatgtaataattctcactgtttaccaaggaaagaacaaatgctggggtcatataaaatatatttatgataactatttacatataataaatagaaattttgttaacatggaatttaatttatgtgaaagagttctggattcaaatgtcagttcataatatatggaagataattttatgtgttatagtaggattaatttatttagttgtgcagtcagtgtcaatccaatctgtaatttcactttagaaggttgtattaccttccacttccatgttgtcttataaacaaatgaattgtattttttgttgaaagtaaaagttatatctaaccaactcagtacttttgtccaaaaatataataagaaaaaatttttctcgaggaacttttaatttcaaacttgaagaat

SEQ ID NO: 4083 - protein, 231 aa, Homo sapiens
MDLELDEYYNKTLATENNTAATRNSDFPVWDDYKSSVDDLQYFLIGLYTFSGPQVKLSGSHKWSYSFIKKHRRRYSKKTACVLPAPERPSQENHSRILPENFGSVRSQLSSSSKFIPGVPTCFEIKPEENSDVHELRVKRSVTRIKKRSRSVFYRLTILILVFAVSWMPLHLFHVVTDFNDNLISNRHFKLVYCICHLLGMMSCCLNPILYGFLNNGIKADLVSLIHCLHM

SEQ ID NO: 4084 - DNA, 662 bp, Homo sapiens
gtttccttcttgatccttcacaagggaagattttcttttttagaggtacagattcctcttagtcaagtcctgattaaaactccagctaagacattagtaagccttggttagtgaagtggcatcaggaagtgcctacattttcatggcctggtagcgttcagtgaaaatgttcattaacagacacaggccattcagtcccgaatcccaagacactgaagactctgtttgaatcagactcacgggttccttcctagccactctcagggacaggaatgcttctggtgaagaagttttcggtggtggttcatggagcttccctacaccaacttggaaatggcattcattttattggcttttgttatcttttccttatttaccctggcttccatctacactactccggatgacagtaatgaagaggaagaacatgaaaaaaagggaagggaaaagaaaaggaaaaagtctgaaaagaagaaaaattgctcagaggaagagcacagaattgaagctgttgagctatgatctcatagccaccgatatttctcgctaagaagacagaggaagcaatccatgggaactacttatccacagttacacaagaggaggggataatgaagaaagttaaaatcacttactgattaaacacgatgataataaccatt

SEQ ID NO: 4085 - protein, 71 aa, Homo sapiens
MELPYTNLEMAFILLAFVIFSLFTLASIYTTPDDSNEEEEHEKKGREKKRKKSEKKKNCSEEEHRIEAVEL

SEQ ID NO: 4086 - DNA, 764 bp, Homo sapiens
gtttccttcttgatccttcacaagggaagattttcttttttagaggtacagattcctcttagtcaagtcctgattaaaactccagctaagacattagtaagccttggttagtgaagtggcatcaggaagtgcctacattttcatggcctggtagcgttcagtgaaaatgttcattaacagacacaggccattcagtcccgaatcccaagacactgaagactctgtttgaatcagactcacgggttccttcctagccactctcagggacaggaatgcttctggtgaagaagttttcggtggtggttcatggagcttccctacaccaacttggaaatggcattcattttattggcttttgttatcttttccttatttaccctggcttccatctacactactccggatgacagtaatgaagaggaagaacatgaaaaaaagggaagggaaaagaaaaggaaaaagtctgaaaagaagaaaaattgctcagaggaagagcacagaattgaagctgttgagctatgatctcatagccaccgatatttctcgctaagaagacagaggaagcaatccatgggaactacttatccacagttacacaagaggaggggataatgaagaaagttaaaatcacttactgattaaacacgatgataataaccattaatgaactcaatactcgggaaaggcttcacatttctgggactcagcattatccaaaatatctattaagagccatacaccattctagctgcaattgattatac

SEQ ID NO: 4087 - protein, 71 aa, Homo sapiens; identical to SEQ ID NO: 4085

SEQ ID NO: 4088 - DNA, 3123 bp, Homo sapiens
gtttccttcttgatccttcacaagggaagattttcttttttagaggtacagattcctcttagtcaagtcctgattaaaactccagctaagacattagtaagccttggttagtgaagtggcatcaggaagtgcctacattttcatggcctggtagcgttcagtgaaaatgttcattaacagacacaggccattcagtcccgaatcccaagacactgaagactctgtttgaatcagactcacgggttccttcctagccactctcagggacaggaatgcttctggtgaagaagttttcggtggtggttcatggagcttccctacaccaacttggaaatggcattcattttattggcttttgttatcttttccttatttaccctggcttccatctacactactccggatgacagtaatgaagaggaagaacatgaaaaaaagggaagggaaaagaaaaggaaaaagtctgaaaagaagaaaaattgctcagaggaagagcacagaattgaagctgttgagctatgatctcatagccaccgatatttctcgctaagaagacagaggaagcaatccatgggaactacttatccacagttacacaagaggaggggataatgaagaaagttaaaatcacttactgattaaacacgatgataataaccattaatgaactcaatactcgggaaaggcttcacatttctgggactcagcattatccaaaatatctattaagagccatacaccattctagctgcaattgattatacaaaaaaaaaaagaccaaagtggttacaataataaaatagaacacagagaaagaagaaaactacatgtgttacaatttggtaagataaacaaacaaacaaaaaatttaatcactttttttggtcctgcgacacacatgataatttttgtcttaattctcctaacaaatgataatgaaaagctataagtaactgtgttattgcttccgtatctgaaataggtgaaagagggaaaaaacactatatattttttcagctttacagaagaaattttgaaaggtttacattcaatggaaatattagcattgcctcagtaagctttaaaacacaaatgtctacgttttctgaagcaatatggtttacagagacatgagtgtttgtaaatctctcgtcccaatactatgtaaatccttaatgtgtaagcatccaggaaaatttgtcattctgtgtcctttattcatcctaaaagttgaaagttttctgttatttatatttttttttttttaatttgagagagaggctgggtgcagtggctcacgcctgtaatcccagcactttgggaggccgaggtgggcagatcacgaggtcaggagattgagaccatcctagctaacacagtgaaaccccgtctctactaaaaatacaaaaaattagccgagcgtggtggcgggcgcctatagtcccatcttctcgggaagctgaggcaggagaatggtgtgaacccgggaggcggaggttgcaatgagctgagatcatgccactgcactccagcctgggcgacagagcaagactctgtctcaaaagaaaaaaaacaaagagagagagagggtctcgctttgtcaccgaggctggagtgcagtggtgtaatcatagctcactgcaaccttaagttcctgggctcaggtgatcctcttgcttcagcctcccaagtaactgtgactacaagcatgtgtcatcacagccagctaatttttgtaattgtttgtagaaccaaggcctctctatgttgcctaggctggtctccaaatcctggactcaagcgatcctctgccttagcctcccaaagcactgggattacacgcatgagccaccatgcctggcctgttatttataactcttacaaacattaaaccatcacaatcaatgctggcagcattatcgtggcaggaaggaatccacaatacaaccaaagatacctacctgcatctcataagaatcatagctcaggtctccattgccacagagtttcagtcatgtgagagactccctttatctgtacttaccccttactgctcactttcaagaaagattcaataaagatggctttctgccatacagagataggcatactagtgtaaacagaatgcttacaaagttaaccaagtagtcacccaggtcagagtactaaacatttaaaagggctcactaagttagagaggacagagaatgggctttggagatgagcagatctgggtttgagtctgctccaacctttccttattatatgaccttgggcaaagtacttaatttctctgagccttggtgttctctctgaaaaaatgagcattttaaaaaatctttgctgggctgacaaatggatgagagatagtataagtaaaatgtgtaactcagtgcctaggatcgttgctgaataacgctacctattattattggaaagcattttgggacatttggacttttaagtttactgatacgttttttcagaaaagcagaaaaatcaacaacatggtttcaaatacttggatgaggctccattcactcccttagcccatcttacatatattactgcattgactggaaatgggaggcacttcacaattaggaatattgtcaggtcagccaggcgccgtgggcatgcttatagtccaagctactcacaaggctgaggcaggaggatcgcttgagcctgggagtttgaggctgcagtgagctccagcctgggtgaaagagaagaccctatctcaaaaaataaaaaattttaaaaacctgtcaagttagatgttaaagaggacatgtaaaataaaatctccctaacatgtttatgaaatagctgcaaaaggctgagcgtggtggctcacgtctgaaatcccagcactttgtgaagccgaggtgggtggatcacctgaggtcaagagttagagaccagcctggccaagatggtgaaacctcctctctactaaaaatacaaaaattagccaggcgtggtggtccatgcctgtaatcctagctactcaggaggctgaggcaggagaatcacttgaacctgggaggcggaggttgtagtgagccaagattgcgccattgctctccagcctggggagcaaatgcaaaactccatttc

SEQ ID NO: 4089 - protein, 71 aa, Homo sapiens; identical to SEQ ID NO: 4085

SEQ ID NO: 4090 - DNA, 1013 bp, Homo sapiens
tcagggacaggaatgcttctggtgaagaagttttcggtggtggttcatggagcttccctacaccaacttggaaatggcattcattttattggcttttgttatcttttccttatttaccctggcttccatctacactactccggatgacagtaatgaagagtctcactctgtcagccaggctggaatgcagtggcgtgatcttggctcactgaaacatcggtctcccaggttcaagcgattctcctgcctcagcctcctgagtggctggaactacagaggaagaacatgaaaaaaagggaagggaaaagaaaaggaaaaagtctgaaaagaagaaaaattgctcagaggaagagcacagaattgaagctgttgagctatgatctcatagccaccgatatttctcgctaagaagacagaggaagcaatccatgggaactacttatccacagttacacaagaggaggggataatgaagaaagttaaaatcacttactgattaaacacgatgataataaccattaatgaactcaatactcgggaaaggcttcacatttctgggactcagcattatccaaaatatctattaagagccatacaccattctagctgcaattgattatacaaaaaaaaaaagaccaaagtggttacaataataaaatagaacacagagaaagaagaaaactacatgtgttacaatttggtaagataaacaaacaaacaaaaaatttaatcactttttttggtcctgcgacacacatgataatttttgtcttaattctcctaacaaatgataatgaaaagctataagtaactgtgttattgcttccgtatctgaaataggtgaaagagggaaaaaacactatatattttttcagctttacagaagaaattttgaaaggtttacattcaatggaaatattagcattgcctcagtaagctttaaaacacaaatgtctacgttttctgaagcaatatggtttacagagacatgagtgtttgtaaatctctcgtcc

SEQ ID NO: 4091 - protein, 80 aa, Homo sapiens
MELPYTNLEMAFILLAFVIFSLFTLASIYTTPDDSNEESHSVSQAGMQWRDLGSLKHRSPRFKRFSCLSLLSGWNYRGRT

SEQ ID NO: 4092 - DNA, 3700 bp, Homo sapiens
cttcatcatccttttggatgggcatggatcaaacgtcgtacttcgtacttctgtctcagctctttggaaagagaggaagacaaaatcttcctgcgaatgtgggaaggtgcactgaaatgacttttgtggttcttgcttctgtcagaagtcacaaagggattgaacttcattttggctgctcccacttcagtgatggctgcaaaaggaaagagctccatgttcttactcttaattcatttccaaactgtcccctgcacttgtctgattgcctgaattcattttaaggcatctggctttatgccattttcatcttgcagaatactctcaaggagccctctaatctgcaacacaggcacatttgttcactaagccagctgctcaggtatcttggagatattcttagcatctcttgaattgttttacctgtttttatgtttttccatttggaagttggtttcttgtttaattggagcacatccttcagtagctttctagtaaggttcatgggaaataaagtttttgataccttttgatacctttgtatctgaaaatgtcttttttttttttttttttttttgagacagagtcttgctctgtcgcccaggctcgagtgcagtggcgtgatcttggctcactgcaagctctggctcccaggttcacgccattctcctgcctcagcctcccgagtagctgggactacaggtgcccaccaccacacctggctaatttttttgtattttcagtagagtcagggtttcatcatgttagccaggatggtctcgatctcctgaccttgtgatccacccgcctcagcttcccaaagtgctgggattacaggcatgagccaccacacctgacctctgaaaatgtctttagtctatcctgatatttaatcagaagtttttcagggtctgaaattatagttttgaaacaatttactcttacgtattttaatcttttaaattgagaaatatatagttatgatatctacaatgtattatgaaatacattaacataaacaaatgttctataagcatgacatttagtcagctacacaaatttggtcaggaactcgtacccaaggtcagctggcattataatggataaatttaagctccaagtactattgtaatgcttcagttatttttatttttttgagatggagtctagctctgtcgcccaggctggagtgcagtggcgtgatctctgctaactgcagcctctgcctcctgggttcaagcaattctcgcacctcagcctcccaagtagctggaattacagacgcatgccaccacacatggtcaacttttgtattttttagtagagacagggtttcaccatgttggtcaggctggtcttgaactcctgacctcaagtgatccacctgcctcagcctccaaattgctggaattatagccgtgagccaccacacctggccagttatcttaatcttacaccaatccagagaaaattacacatctcgttaaattacaataatgaattatagtagacatcaaaaataggatgacattggggtgaaatgtgctattagagatacatggattgactgaaatatttgaggatctgtaaatacagtggcttccttggacaagaaaacaatcatagtttaaagacagaatcgttcttgtaagtgataagagtttcataaacgaaaaatataattgtgtatttccagcatccctactctgcactccgcttgccagtttctggctacttaatattccactaccaaccttatgccccaagaaatcatcactataatattcttttccccatttcccctacataatcagccttcttcctaattgttctatcccttactcattgccgaaactaaggcactgagatactgaaaagagcatgcatttgaaatcccatactaggttggacagtttgtggcagttatcaatatattgcctctaactttatcttttcaaagaatcagctttggttttgttgattttctgtcttgtttccaatttcaattttattgatttctgctctaatttttatttttgtccttctgcatgctttacattgaaaagctttacatttgcttttgttctgtctagtttcttaagaggtcagacatcccctgtgagcttcttccttgaagcagcctgctctataggacaggtgagcccagcgggagccagcccactgcagagccaaaccctctagtccttgtcacaaaaaggggctgggacctgatggtgattatcttcctgccttttcctggtggtccttctgagttggagttgcttggtaatttcagtggtgtgacaaccggagtgttgctactaaaattcctccctgggctgcatgagcggctgacagggcacggggagaaaacgattagcttctcccaggattggtgaagccaccgctgttggacaagtatagtcgtcgctggatctctgcaaagagactgtcgaagcggctgcggttcagcgtaaggtctgttagggagacctgaagccctgtgccaggaacgcagtgctcgcttagcccaccctgcagggatggctttccaggcgctgggtccagtgagaaaagcgtgtccggaattggttccttccggtgggttcttggtctcgctgacttcaagaatgaagtcacggaccttcttcgcggtgagtgttatagttcttaaagatggtgtgtccggagtgtgttccttgcaatgttcagatgtgtccggagtttcttccttctggtgggttcatggtctcgctgacttcaggagtgaagctgcagactttcgcagtgagtgttacagctcttaaaggtggcacgttcagagttgtttgttcctcccggtgggttcgtggtcttgctgacttcaagaatgaagctgcagatccttgtggtgagtgttacagctcataaaggtagtgcggacccagagtgagcacagcaagatttactgtgaagagcaaaagaacaaagctcccacagtgtggaaggggacccgagtggttgccgctactggctagggtggccagcttttattcccttatttggccctgcccacatcctactgactggtccattttacagagcgctgattggtccgtttacaaacctttagctagacacagagtgctgattggtgtgtttttacagagtgctgattggtgtgtttacaatccttcagctagacagaaaagttctccaagtcccgactggacccaggaagttcagttggcttcacctctcaagaggacagctgccctgccacacggcacatccttccatccactgtggtacctggcgctgcccctggtctccaacatcatcgacctccatggtctcacccagaagttgaagtccagaggcggtgccggccatgcacaatcactgctcagctgccccgacttctgtacagacttgctggaggtgtcgcccagccacctgcaggaagccctgcaggacacctaggcctcctgagaactttgtattctgtgagaagtttgcattctcaaggaacctcagctgtttggtttgctcttctgccacccacctctacctgtgccagattgagggcactccctgccccaccctaacagaacaggattccagttgctgttttaatttactgaatgttatttgtaactggtgggagaaaaatgtggttataattcacactgtagagcttattaaaagtcacagtaacact

SEQ ID NO: 4093 - protein, 109 aa, Homo sapiens
MHNHCSAAPTSVQTCWRCRPATCRKPCRTPRPPENFVFCEKFAFSRNLSCLVCSSATHLYLCQIEGTPCPTLTEQDSSCCFNLLNVICNWWEKNVVIIHTVELIKSHSN

SEQ ID NO: 4094 - DNA, 800 bp, Homo sapiens
tctttctgccaccatcttggttcctcgttccctgcacaaaatgccctgtgaagccacagaaaccgtccctgctacagagcaggagttgccgcagccgcaggctgagacagggtctggaacagaatctgacagtgatgaatcagtaccagagcctgaagaacaggattccacccagacgtccacacaagaagcccagctggtggcagcagctgaaattgatgaagagccagtcagtaaagcaaaacagatttggagtgaaaagaaggcacagaaggctatgtccaaactgggtcttcgacaggttacaggagtcactagagtcgctatccggaaatctaagaatatcctttttgtcatcacaaaaccaaatgtctgcaagagccctgctttggatacctacatagtttctggggaagccaagatcgaagatttatctgagcaagcacaactagcagctgctgagaaattcaatgttcaaggtgaagctgtctcaaacattcaagaaaacacacaaactccaactgtacaaaaggagagtgaagaagaagaggtcgatgaaacaggtgtagaagttaaggacatagaattggtcatgtcacaagcaaatgtgtggagagcaaaggcagtccatgccctgaagaacaacagtaatgatattgtaagtgccattatggaattaacaatgtaaccatctgaaagcaacttttcttggtgtctcaaaggagtaactgcagcttggtttgaaatttgtactgtttctatcataaataaagttatggcttcttgttggaaaaaaaaaa

SEQ ID NO: 4095 - protein, 215 aa, Homo sapiens [sequence omitted]

SEQ ID NO: 4096 - DNA, 2330 bp, Homo sapiens
agaatgcaactttctcacagaacacaaggctctcaaggggcttcagcaccccaagcactgcagcgtttctcccaggaggctgggcgagtccgtagcggaagtcggagcggcagagcagtgattgggtgcggccggcaccgtctctgggcttcgacttccgggtgagaccgtgaaggtgtggcgcgacgttggagaccggggcagcgccatgtaccacagtggatggaaggatgcgcggtgcggcggggcagctgtcctcttctccccggacccagcgcctggagagccagccctgcagggtgggctgggcgagccaaactgcgttcctggtgcagggcttcgggtctccctaacagaccttatacgctgaccggcggccgccatggcagtgtctctttgctcagacatccagggacgaccacattcgtccaacagcggtcgctccaccaatcctgggagaagcgaatcgttttctccgcgtgccctgtcagccgctcatggtgcccagagaggaattttagtggcagcattccggctgtcacgccaccgaaattgccaggccactccaagtcagaaggaccaccaggaaaagtcaggaagagaaccaccatcaggtcccagcctctttttgtgacaaggactagagggtttgggtctgcagtgggctggctcccgctgggctcacctgtcctatagagcaggctgcctcaaggaagaagctcacaggggacatctgacatctgaaacagcaagtgtaaaatgctttaaataagccaaaactaaaccaatcgttatgttaactaaaaatacatgaatgctaccgaagatagtcgaatattagaggaagagattaaactctgattttgagcactttgtgctttattcggaaaatgaataagatgcagttctgaaaacctgaaaatataaagaataggatatgatacgcacactagatgaaaacaaaactttcagaccatattttcttatttaaagctctaataagtgagatagcagagtaaactattcactcaaataattagtaactgatataagggtatgtatcaataacaggtattaagacaaaaactttatgagcttttccattttaacaagggatgatgattctagacttctgccacaacattatggtcgacaaaacattcttaattcattttacatagatctgactctagattctgaaacagcaagtcataatcttgtatctctaaagatagaatacagtgcgatttggaaagacaccacaaaaactcatgatccaaaaaagattaaggctgttattaccaggaggaagagaaagaggacaaaatcaaactggatagatataatagagttgtttgttagaattgtcttcccaggagatggaaaaagacgccatcacaataggattcatgctttagttttcagctatagaaatgtaataactttgccaaagtaattacactacatagagtggcaatcgttctattaaaagtaagacccagtaatgttaggatttgttctggacaatgaaggggatgaggtttaatcttatgacttgaatgccaggtctgaaatcttttcttcaagtgatatttttatgaaactacttaggctgtgtttcacactgggtatgatttctaacctcttataacctgtacagtaatagattatgaaggatgaattatttgaaagctattttgtattatttaggagaggagctcttcaattctgaattgtctgccacttacaagcagaagaaagtttttttctttcattattttagcaactatcaataaaacagtattagaaatgcctactcttcagagatgtaatgggaataaattgtaaagtacttttgatattctaagatgaaagatggtattacacagtcaataattcaatgcttcccacattatgaattttatcaaaattatgtagagagctattagttcattccagcaacaaaacaggcttatataaaaacaaaaacctcctgggtcatgccatcctacaccaaattcctgttaaacagaggcatgatttattccagtgaccttgctatttcttcataactgtaatatgtctaatgttagacattttaaattaacattctattagataaactgagaatttaggtctctcgcaccacccaggcacatactctatctttccccacaaatatccaaatatggtaatataattggattaatacgttcatatgactatataattgttcacagctgagccacttaggtgctataattataatttctttgatacacaaattttgttttattgtgattaaaattgcctgatttcttacttgctgc

SEQ ID NO: 4097 - protein, 157 aa, Homo sapiens; identical to SEQ ID NO: 486

SEQ ID NO: 4098 - DNA, 2971 bp, Homo sapiens
ctcatatacataaaaagtgataagaatccgaaaagacagccaggggaattaaatgccagttggggccaacggggccctgatcacggaagagggcgcccccagctctcaatcttcacacaatccctgcacccagggtcacagagcatgcgcaggtccttcccgcccacttccggggcaactgccaaccaccgcgcaggctgagccccaggcaggaagcagcccacttggtggggttggggtatgagtccttcctcgcgggggctcggtgggtcctgagtattctttggccggatttgctgatccgtctgctccaggtgagctgggaaggccgcaggaaaggcccagaagggcctcgccaggaggcttaactggacaggggcttcttgaacattctctgtgcctaaacctccgggtcgctgcctgcccacgactggatctccttagtgtctggcgtagctcttgtgaaaaattcaggattgtagagttagaatgggggtgttgagcctgtatcaattaagctttaaatgttatgatctgaattagggtttatgaagtggctatgttatcttcaaagagttaatgtacgtgtttgggagtgggggttggggagttaagggagcgaagtggtagctgccagttgagaacccaccagcctacgtcgtctgcaccctcgacctatgtaagcatcctgtaatcctcacaagggtcttacagcataggttcacaaagtacagtccgcaggccagcagcatcatctgggaacttaggaaaaaaccagccctactgagtcagaaactggggatgtggcccaggcaatcttttaccaagacctccaggtgattataatgcaaggaaggattccctatcttggacctgaggctgctttcttgaagaaaacttgactttatttcatttagtgggaagagcagcagcccagctattaagttctaatatgcaataggctgcaggctgtgaagtgttcgtggcagtagactctgaagctaaggagctgagggcttaacaagtttctagaagctgccatcaacatgccaagtcagtaaaactgatagttgatcagatttcaaggtctggggagtatatccactgtgtactgggtcttgagctctagagagctaggccttgctaaaataaaagaattaccttacctaccatctttgttcaagtctcaatggaatttgttacggccctggctgacctccgagcagaggctagctgtcccatctgtctggactacttgaaagacccagtgaccatcagctgtgggcataacttctgtctctcctgcatcattatgtcctggaaggatctacatgatagtttcccctgccccttttgccacttttgctgtccagaaaggaaatttataagcaatccccagctgggtagtttgactgaaattgctaagcaactccagataagaagcaagaagaggaagaggcaggaagagaagcatgtgtgtaagaagcataatcaggttttgactttcttctgtcagaaagacctagagcttttatgtccaaggtgcagtttgtccactgatcaccagcatcactgtgtttggcccataaagaaggctgcctcctatcataggaaaaaactggaggaatacaatgcaccgtggaaggagagagtggaactaattgaaaaagtcataactatgcaaaccaggaaatcactggaactgaagaaaaaggtaaaacatagggcagaagaagtcaagtctgaatttgagcaacttaggttatttctccaaaatgagcaagagactgttcttaggcaattacaagatgaagagatggatattttagcacaactaaatgaaagcctaacaaaattttcagattatacctcctcattaaaatatctactaaaggagatagagagcatatatgtgaagtcagaactggaattactggcaaatgttaaggatatctatcacagatatgagaatttaaaattccctgagctgtttttattcaaattaaaaaaatatggttaccatctgcctccacaatattctggcctagacaaaattatcaagcgatttcaagtagatgtaattctagatcctgaaacagcacatcgtaaacttatagtctcagaagatagaaaaactgtgcgctatggaaatacaacacaaaatgtacctcataacccaagaagattttatctcctcccagctgttctgggttctaagggatatagttgtggcaggcagtactgggaagtagaagtgaaagacaagcctgaatggattcttggtgtctgtaatgactgtcttcccagaaggaggaagagtcaaccaattttagtacaggatggattatggggaatttggcgatctagtcagaataattatattgtattgggccacagggaaattattctgctgccacaagtaattcctagtaagattggcatttttttagactatgaaatgaatgaagtttccttttataatttgaatgatagatctcttctctatacttttaatgataattttacaggagcactttggccttatttttatactggaactgactcaaaacctcttaaaatttctacagtaacagattctgaatgaattattagaagactcagtttctttcacctagtagacataactgagccagtgaatctagttttggctattctgtattttgtccagtttttcccataagaaagcaatatttttttatctcagtttcagcaacttccaaaaaatgtgattatgggacctactttatattaaattatggggtcagtgacaaggtactttagaaattctacagtaaaatacttgaaacatatattactgaagaaatgtattatgtaagaaaatctattacttttgtaattgccaataaaagcccagtaatttttttctgtatttcttatatacttttcctttaagaaagattaagtctttattaaaggcattcatcattac

SEQ ID NO: 4099 - protein, 471 aa, Homo sapiens
MEFVTALADLRAEASCPICLDYLKDPVTISCGHNFCLSCIIMSWKDLHDSFPCPFCHFCCPERKFISNPQLGSLTEIAKQLQIRSKKRKRQEEKHVCKKHNQVLTFFCQKDLELLCPRCSLSTDHQHHCVWPIKKAASYHRKKLEEYNAPWKERVELIEKVITMQTRKSLELKKKVKHRAEEVKSEFEQLRLFLQNEQETVLRQLQDEEMDILAQLNESLTKFSDYTSSLKYLLKEIESIYVKSELELLANVKDIYHRYENLKFPELFLFKLKKYGYHLPPQYSGLDKIIKRFQVDVILDPETAHRKLIVSEDRKTVRYGNTTQNVPHNPRRFYLLPAVLGSKGYSCGRQYWEVEVKDKPEWILGVCNDCLPRRRKSQPILVQDGLWGIWRSSQNNYIVLGHREIILLPQVIPSKIGIFLDYEMNEVSFYNLNDRSLLYTFNDNFTGALWPYFYTGTDSKPLKISTVTDSE

SEQ ID NO: 4100 - DNA, 1009 bp, Homo sapiens
ctttgtacaagcagatctcctgtgctgtcgccagctctcagctcatctgtcacttcctcctgacccaaacatcccctgctctccatgagaactcacctccctgacacagtgttatagagcagcggggagagtgccatgagctctcctactaaccctgcgactgtagtaaatgtgaccgtttggatatctgcagtcccagtaactgcgacctccatcttctcccggtcccgattctgtagtgtcaatccttgggaaccataataaacggcatctattttaaaatagccagatgccagtttggattccttcacaagttgccggctctcgttaggcagagcgggcacccagggagtcaggggtctttctaggctccatcttccccaggtactgagtcctactcccggcttacctggagcagatgattcagaatggtcttggacacggacctccaagagcgtcgaccgaggacactcttgcaccagactgaggtcagcgctgagacccagatttatatgcaccagcagcaaggtcgcacttagggccccgtccaccgaggacttgcggccctgcccctgaggagcctgggcagggccaggctgtaaatgagctcctgatggattcggacccaggacctctgaaaggctcagtggggcctctccaagtgccacccagctgtgtgcaggtttggagcacagcagtttcaccctgtctccctgatgcaatttctagcgctgcaggacgaggaatgaactttggccttcagttctgaaggcctggactgagtccacctcctgctccctgcccctcacaacaagctgaacctactccagtggctgcagaattccccaactagcagggggagatatagagagaccaactcagggccctcctgtatctagaaagagtaactgaaaagccccaagccaaggagttatgcagctgttgacggtttccgttccgggaatcactgtctccaagaaatgacctgggcacaaggaagccttgggag

SEQ ID NO: 4101 - protein, 51 aa, Homo sapiens [sequence omitted]

SEQ ID NO: 4102 - DNA, 2654 bp, Homo sapiens
atgaatggatagcactagataccgaccccaacggaaatgttagcggccctgttttctgctttgaaataaaactttataatacccaggaatatttatatccaaaggccaagtattaaagatacacttcacaaacgcactagtgcccactgtctttatctggaaggggttgagtaggttggcggggggcaacgctggtgtctacacagccaagagggaacattcacgcacacagaatctatgagacgacgggatcccttaccacacgggagtgtcctcttcgtattaaaatatggaatgcttttcttcaaatatccactttttttttggagggggagacggggagcagatgcctcaaagggggtcaaagagaggggaaggaaattgcacataaataaaccggatgattccaaatgcaaggagtcctcagagcggagcgcggacggcttttccggagtcctgggtctgcatctggcgccttggcccctgctcactcgcgctctcctcctcctccttctcctcctcctcactgcttgagctccagggcccagacgtgctgcggccagcccgtccggcctttggttttcttgtcgttgctgctcactgtgcttttcaagatttcgttctggacagaggaaaggcgagggcgagaaaagtggaaagagaaattcagagaggatacctggttccacaccaacccggagcttcctgcgccggaggagacagtgaaccagagaggaaaggatacgatgggggagtcccagcccctgcagagaagctaccaaggttagcgctaccctagccggcggggaggcctcggcgctgcagcgctcaacaaccggatccacaagtttataaacaaccgcccgttttcgagtcgtttatggaggagcggggggccttttctcttactccagatgtaggggcgggagctggagtcggcgctaagtctggtttctctgttttcattagcaatcctagatccacatctaggaaaaatagggcgaaggagcctctgtttcggcctgggcctctcggccagaggctctcggcctccagctcagcagtgcctctcctccaaggcttctgaaatctctggttattcgggaggtcactcgattatgcagccaccaaagggctgcaggggccaaagaagaaaaattcgacaaatgcaattattttccgggcccttcgtggacatagctctatcctgcaccactgccctgtgggcacttggtaggaatctgagaaaattttaagcggctcaatttactttcgtgttatttttaataacaatgaccatagtaatgccttttcccccttaaaatgtacaggcttattcaaataaaattagaaatgccaatggaatatactcatctgggaaattacattttaacgtcatagccaaggaaaaattggagctgtattttgaagtcaaaagtacttattttatgtttaccattacgttttccgggcatagtatgagaacaaccacaaaactcagggctcagtctctggcagcctccttctgggagtggggtagggggtgcgatcaatagtgaaataattggaatcaagggcttcttcgagacttattctggaaacatctgaaagcaagattggattggaggccaaaagaagggtctaacagagacggggtgaggcatccagaccagtgcgatcgcgatcgatcgcgacccagagttttcaaggtccgtcctaagtactaggggagcagcgataacccggagggacaccagtccctacgaagaccttgggcgattttgaagtgcgggcacctcgattccccgaatctgtagtgtggctggtatcggtgttcccctggtttaactagcctgtttgaaggcacagatcattcatggggatgtataaccgaaaccagtcctctccaccgcctggggatcttcactttcgcagtctacgactgcctgtgactccagaaagacaaactgcagattggccaagatggggaaattgaggcagagaagccaagacatgtgctaaaggtcatgcaggctatgaatggagctggaatgtgaacgcaggccatatgaccccagagcccatgttcttgaacccttagaaagacagcagcaacacacctggtgcagcagctgcttagttggagtggctgacaaggttggcagaggatcccgttcctcccgtggagtggctgccatgatactgcctgcactgaagctgctcctatttctgaaatatgtattgttatttttttccctgcatgttgaacattatactcttctgttctttcgcattctcttcttcccttccggatgacttctagggtttttgtgattctgtaattctaaaggagaaaggataataagaattgtgaggccgggcgcggtggctcatgcctgtaatcacagcactttgggaggccaaggtgggcggatcactaggtgaggagatggagaccatcctggctaacacggtgaaaccccgtctctactaaaaatacaaaaaattagcggggtgtggtggcgggcgcctgtagtcccagcaactcgggaggctgaggcaggagaatggcgtgaacccgggaagcggagcttgcagtgagccgagattgcgccactgcactccagcctgggcgaagagggagactccatctt

SEQ ID NO: 4103 - protein, 39 aa, Homo sapiens
MGMYNRNQSSPPPGDLHFRSLRLPVTPERQTADWPRWGN

SEQ ID NO: 4104 - DNA, 571 bp, Homo sapiens
tttttttatcagtcagaggataatgcaagtgtttaacagatgcttcactattaaaatattttccccccaagtctcaaatattgaagaatctctaaccagggacaccagtccctacgaagaccttgggcgattttgaagtgcgggcacctcgattccccgaatctgtagtgtggctggtatcggtgttcccctggtttaactagcctgtttggcacaacaaatgagacccaagtgctcatagaacattccaaagagtcaacagagagaagtggaaagtattagaaacatgattgtgtttgcaaagggagacataaacatggggaaattgaggcagagaagccaagacatgtgctaaaggtcatgcaggctatgaatggagctggaatgtgaacgcaggccatatgaccccagagcccatgttcttgaacccttagaaagacagcagcaacacacctggtgcagcagctgcttagttggagtggctgacaagagatcctggcaaatgggtgtttcttcccagaaagggatttttctccatgactgcagttgaattgcagagttgtagagacat

SEQ ID NO: 4105 - protein, 58 aa, Homo sapiens
MELECERRPYDPRAHVLEPLERQQQHTWCSSCLVGVADKRSWQMGVSSQKGIFLHDCS

SEQ ID NO: 4106 - DNA, 1991 bp, Homo sapiens
atgcaagtgtttaacagatgcttcactattaaaatattttccccccaagtctcaaatattgaagaatctctaaccagggacaccagtccctacgaagaccttgggcgattttgaagtgcgggcacctcgattccccgaatctgtagtgtggctggtatcggtgttcccctggtttaactagcctgtttgaaggcacagatcattcatggggatgtataaccgaaaccagtcctctccaccgcctggggatcttcactttcgcagtctacgactgcctgtgactccagaaagacaaactgcagattggccaagatggggaaattgaggcagagaagccaagacatgtgctaaaggtcatgcaggctatgaatggagctggaatgtgaacgcaggccatatgaccccagagcccatgttcttgaacccttagaaagacagcagcaacacacctggtgcagcagctgcttagttggagtggctgacaaggagagaatgatttccaggaagagcggaacacatatggaaggccttagcttatctttagcgcctcatacacccgttctggacttcagaaaggccagtgagtgggattaggcctcagagataggatgtcagtcccagtgagggatggcctagagcattctttaattctttcctttgggtcacacataagaaacaattttccagcactgatgagtgttattaacaatgagatgggatagaatttagttttccctatggctgtgcttcaaaaatagaaaagctgtcttttctctggaatgattgaatgaagctctggggaggaaaaggtggattggcagatctcttaaaggaagcttctccttctaggcactattctaaggcttaatattttaactccctatattaacctagttcaactaaacagtgatctgagtaattttatttttattaaagctcagatcaaaatgccattaacattgattgagaaaatcaaaggaatctttgatgtgagtggttaaattgctgaattatttcagtcccataccctcacagcatgagtacctgatctgatagacttctttggaattccttttttgtttgagacagagtcttgctctgtcgcccaggctggagtgcagcggtgtgatctcaaccattgcaacctccacctcccaggttcaagtgattctcatgcctcagcctcctgagtagctgggattacagatgtgcaccaccatgcccggctaattattttgtatctttagtagagatgaagttttgccatgtgggccaggctgttctcaaactactggcctcaagtgatctgcccgcctcggcctcccagactgctgggattacaggcgtgaggcaccgtgcctggctgggattccataataaatccctctgtgtctatttcttttttcaaatataattttcttcatttccaaacatcatctttaagactccaaggatttttccaggcacagtggctcatacctgtaatcccattgcttggagaggccaaggtggaagttcatttgaggccaggagttcgagaccaggtgggcaacatagtgaaaccttgtctctacaacataaaaaaaaaaataaaaccctaaggaaataatggtgcctcactacctttcaaagcttttgaccttcaagtcagaaaataaattatttttaggaaaggcatctcaaccttatttacaaatgaactatttgtcaagagcaacctctataaggataataggacttcctggtttgaaatgcagcatgaacaattctcagaggctcctggaagactaagaatgaggtttcttgatccgccttccctcggcatcttctcactctcttccctccttctcagaagctgtgtgcagcaatgggctatgcaactggtttcactggtgcctggtagaacttttaattcctccctgtcagcacatccctagtccactttcatagtttggataaggactggataagcagctgaacttctggggact

SEQ ID NO: 4107 - protein, 74 aa, Homo sapiens
MELECERRPYDPRAHVLEPLERQQQHTWCSSCLVGVADKERMISRKSGTHMEGLSLSLAPHTPVLDFRKASEWD

SEQ ID NO: 4108 - DNA, 1856 bp, Homo sapiens
aacagatgcttcactattaaaatattttccccccaagtctcaaatattgaagaatctctaaccagggacaccagtccctacgaagaccttgggcgattttgaagtgcgggcacctcgattccccgaatctgtagtgtggctggtatcggtgttcccctggtttaactagcctgtttgatggggaaattgaggcagagaagccaagacatgtgctaaaggtcatgcaggctatgaatggagctggaatgtgaacgcaggccatatgaccccagagcccatgttcttgaacccttagaaagacagcagcaacacacctggtgcagcagctgcttagttggagtggctgacaaggagagaatgatttccaggaagagcggaacacatatggaaggccttagcttatctttagcgcctcatacacccgttctggacttcagaaaggccagtgagtgggattaggcctcagagataggatgtcagtcccagtgagggatggcctagagcattctttaattctttcctttgggtcacacataagaaacaattttccagcactgatgagtgttattaacaatgagatgggatagaatttagttttccctatggctgtgcttcaaaaatagaaaagctgtcttttctctggaatgattgaatgaagctctggggaggaaaaggtggattggcagatctcttaaaggaagcttctccttctaggcactattctaaggcttaatattttaactccctatattaacctagttcaactaaacagtgatctgagtaattttatttttattaaagctcagatcaaaatgccattaacattgattgagaaaatcaaaggaatctttgatgtgagtggttaaattgctgaattatttcagtcccataccctcacagcatgagtacctgatctgatagacttctttggaattccttttttgtttgagacagagtcttgctctgtcgcccaggctggagtgcagcggtgtgatctcaaccattgcaacctccacctcccaggttcaagtgattctcatgcctcagcctcctgagtagctgggattacagatgtgcaccaccatgcccggctaattattttgtatctttagtagagatgaagttttgccatgtgggccaggctgttctcaaactactggcctcaagtgatctgcccgcctcggcctcccagactgctgggattacaggcgtgaggcaccgtgcctggctgggattccataataaatccctctgtgtctatttcttttttcaaatataattttcttcatttccaaacatcatctttaagactccaaggatttttccaggcacagtggctcatacctgtaatcccattgcttggagaggccaaggtggaagttcatttgaggccaggagttcgagaccaggtgggcaacatagtgaaaccttgtctctacaacataaaaaaaaaaataaaaccctaaggaaataatggtgcctcactacctttcaaagcttttgaccttcaagtcagaaaataaattatttttaggaaaggcatctcaaccttatttacaaatgaactatttgtcaagagcaacctctataaggataataggacttcctggtttgaaatgcagcatgaacaattctcagaggctcctggaagactaagaatgaggtttcttgatccgccttccctcggcatcttctcactctcttccctccttctcagaagctgtgtgcagcaatgggctatgcaactggtttcactggtgcctggtagaacttttaattcctccctgtcagcacatccctagtccactttcatagtttggataaggactggataagcagctgaacttctggggact

SEQ ID NO: 4109 - protein, 74 aa, Homo sapiens; identical to SEQ ID NO: 4107

SEQ ID NO: 4110 - DNA, 1112 bp, Homo sapiens
cttcactattaaaatattttccccccaagtctcaaatattgaagaatctctaaccaggctcgaaacgccggtctcagtggctattgagttacccaccaagttaccccggttagagctgtttggggtggctcacgttattgcggcaaactttggagatgacggctgagtcctccgggcgaacatgtcaagccgattgtaaatgctgttatttccacatccttcagggacaccagtccctacgaagaccttgggcgattttgaagtgcgggcacctcgattccccgaatctgtagtgtggctggtatcggtgttcccctggtttaactagcctgtttggcacaacaaatgagacccaagtgctcatagaacattccaaagagtcaacagagagaagtggaaagtattagaaacatgattgtgtttgcaaagggagacataaacatggggaaattgaggcagagaagccaagacatgtgctaaaggtcatgcaggctatgaatggagctggaatgtgaacgcaggccatatgaccccagagcccatgttcttgaacccttagaaagacagcagcaacacacctggtgcagcagctgcttagttggagtggctgacaaggttggcagaggatcccgttcctcccgtggagtggctgccatgatactgcctgcactgaagctgctcctatttctgaaatatgtattgttatttttttccctgcatgttgaacattatactcttctgttctttcgcattctcttcttcccttccggatgacttctagggtttttgtgattctgtaattctaaaggagaaaggataataagaattgtgaggccgggcgcggtggctcatgcctgtaatcacagcactttgggaggccaaggtgggcggatcactaggtgaggagatggagaccatcctggctaacacggtgaaaccccgtctctactaaaaatacaaaaaattagcggggtgtggtggcgggcgcctgtagtcccagcaactcgggaggctgaggcaggagaatggcgtgaacccgggaagcggagcttgcagtgagccgagattgcgccactgcactccagcctgggcgaagagggagactccatctt

SEQ ID NO: 4111 - protein, 91 aa, Homo sapiens
MELECERRPYDPRAHVLEPLERQQQHTWCSSCLVGVADKVGRGSRSSRGVAAMILPALKLLLFLKYVLLFFSLHVEHYTLLFFRILFFPSG

SEQ ID NO: 4112 - DNA, 816 bp, Homo sapiens
ccaagtctcaaatattgaagaatctctaaccagggacaccagtccctacgaagaccttgggcgattttgaagtgcgggcacctcgattccccgaatctgtagtgtggctggtatcggtgttcccctggtttaactagcctgtttgatggggaaattgaggcagagaagccaagacatgtgctaaaggtcatgcaggctatgaatggagctggaatgtgaacgcaggccatatgaccccagagcccatgttcttgaacccttagaaagacagcagcaacacacctggtgcagcagctgcttagttggagtggctgacaaggttggcagaggatcccgttcctcccgtggagtggctgccatgatactgcctgcactgaagctgctcctatttctgaaatatgtattgttatttttttccctgcatgttgaacattatactcttctgttctttcgcattctcttcttcccttccggatgacttctagggtttttgtgattctgtaattctaaaggagaaaggataataagaattgtgaggccgggcgcggtggctcatgcctgtaatcacagcactttgggaggccaaggtgggcggatcactaggtgaggagatggagaccatcctggctaacacggtgaaaccccgtctctactaaaaatacaaaaaattagcggggtgtggtggcgggcgcctgtagtcccagcaactcgggaggctgaggcaggagaatggcgtgaacccgggaagcggagcttgcagtgagccgagattgcgccactgcactccagcctgggcgaagagggagactccatctt

SEQ ID NO: 4113 - protein, 91 aa, Homo sapiens; identical to SEQ ID NO: 4111

SEQ ID NO: 4114 - DNA, 1098 bp, Homo sapiens
caaatattgaagaatctctaaccaggctcgaaacgccggtctcagtggctattgagttacccaccaagttaccccggttagagctgtttggggtggctcacgttattgcggcaaactttggagatgacggctgagtcctccgggcgaacatgtcaagccgattgtaaatgctgttatttccacatccttcagggacaccagtccctacgaagaccttgggcgattttgaagtgcgggcacctcgattccccgaatctgtagtgtggctggtatcggtgttcccctggtttaactagcctgtttgaaggcacagatcattcatggggatgtataaccgaaaccagtcctctccaccgcctggggatcttcactttcgcagtctacgactgcctgtgactccagaaagacaaactgcagattggccaagatggggaaattgaggcagagaagccaagacatgtgctaaaggtcatgcaggctatgaatggagctggaatgtgaacgcaggccatatgaccccagagcccatgttcttgaacccttagaaagacagcagcaacacacctggtgcagcagctgcttagttggagtggctgacaaggttggcagaggatcccgttcctcccgtggagtggctgccatgatactgcctgcactgaagctgctcctatttctgaaatatgtattgttatttttttccctgcatgttgaacattatactcttctgttctttcgcattctcttcttcccttccggatgacttctagggtttttgtgattctgtaattctaaaggagaaaggataataagaattgtgaggccgggcgcggtggctcatgcctgtaatcacagcactttgggaggccaaggtgggcggatcactaggtgaggagatggagaccatcctggctaacacggtgaaaccccgtctctactaaaaatacaaaaaattagcggggtgtggtggcgggcgcctgtagtcccagcaactcgggaggctgaggcaggagaatggcgtgaacccgggaagcggagcttgcagtgagccgagattgcgccactgcactccagcctgggcgaagagggagactccatctt

SEQ ID NO: 4115 - protein, 39 aa, Homo sapiens; identical to SEQ ID NO: 4103

SEQ ID NO: 4116 - DNA, 889 bp, Homo sapiens
aatattgaagaatctctaaccagggacaccagtccctacgaagaccttgggcgattttgaagtgcgggcacctcgattccccgaatctgtagtgtggctggtatcggtgttcccctggtttaactagcctgtttgtggaagtgactctgaccgttcccttaagaatctttaatgctcttacatgagatgagcctcagaacaagctaagaaccatcgaaagaacatcaagcctggaaggtgacagaaggagcaatgtgttcttgaagatgtcacctcagcccacctgctccaaggacagtgcttcttgcgacactctgatagctctgcattcttttctgtaccaggaaggcacagatcattcatggggatgtataaccgaaaccagtcctctccaccgcctggggatcttcactttcgcagtctacgactgcctgtgactccagaaagacaaactgcagattggccaagatggggaaattgaggcagagaagccaagacatgtgctaaaggtcatgcaggctatgaatggagctggaatgtgaacgcaggccatatgaccccagagcccatgttcttgaacccttagaaagacagcagcaacacacctggtgcagcagctgcttagttggagtggctgacaagagatcctggcaaatgggtgtttcttcccagaaagggatttttctccatgactgcagttgaattgcagagttgtagagacatccaggttcttgttagtgtggacgaactatccatgaagatcttaaatgcaggagtctatgagaacaccaattaatcaattgtcaaatatttgagtatctattgtgagcaaggcactgtataaccattatgtcatgtattaatctattggaaaataatttgaccttgg

SEQ ID NO: 4117 - protein, 58 aa, Homo sapiens; identical to SEQ ID NO: 4105

SEQ ID NO: 4118 - DNA, 635 bp, Homo sapiens
ataaaagcgggcatctgtggaaagcaggtttagttatcggaggggaaccattaaacgccagtttaagaggcaggccgggaggacggctcgtggatgttgagactgctggccttggtgatcttgaacgcattataacggaaaatggatctccacttaaggcacagatcattcatggggatgtataaccgaaaccagtcctctccaccgcctggggatcttcactttcgcagtctacgactgcctgtgactccagaaagacaaactgcagattggccaagatggggaaattgaggcagagaagccaagacatgtgctaaaggtcatgcaggctatgaatggagctggaatgtgaacgcaggccatatgaccccagagcccatgttcttgaacccttagaaagacagcagcaacacacctggtgcagcagctgcttagttggagtggctgacaagagatcctggcaaatgggtgtttcttcccagaaagggatttttctccatgactgcagttgaattgcagagttgtagagacatccaggttcttgttagtgtggacgaactatccatgaagatcttaaatgcaggagtctatgagaacaccaattaatcaattgtcaaatatttgagtatctattg

SEQ ID NO: 4119 - protein, 58 aa, Homo sapiens; identical to SEQ ID NO: 4105

SEQ ID NO: 4120 - DNA, 878 bp, Homo sapiens
atgagatgggctgccccaggaaagaagacatctggtctgcaacagaaaaatattgaagtgaaaacaaaaaagaacaaacagaaaacacctggaaatggagatggtggcagtaccagtgagactccccagcctcctcgaaagaaaagggcccaggtagatcctactgttgaaaatgaggaaacattcatgaacagagttgaagttaaagtaaagattcctgaagagctaaaaccatggcttgttgatgactgggacttaattaccaggcaaaaacagctcttctatcttcctgccgagaagaatgtggattccattcttgaggactatgcaaattacaagaaatctcatggaaacacagataataaggagtatgcagttaatgaagttgtggcagggataaaagaatacttcaacctaatgttgggcacccagctactcaacaaatttgagagaccacagtatgccgaaattcttgcagattgtcccgatgcacccatgtcccaggtgtatggagtgccacatctcctgagattatctgtacaaattggagcaatgttggcctatacacctctgaatgagaagagccttgctttattactcaattatcttcacgatttcctaaagtacctggcaaagaattctgcaactttgtttagtgccagcgattatgaagtggctcttcctgagtaccatcggaaagctgtgtgagaggcactctcactcacttatgtctggatctccataaacacatttttgttcttagtctatctcttgtacaaacgatgtgctttgaagatgttagtgtataacaattgatgtttgttttctgtttgattttaaacagagaaaataaaaggggtaatagctccttttctctt

SEQ ID NO: 4121 - protein, 235 aa, Homo sapiens; identical to SEQ ID NO: 489

SEQ ID NO: 4122 - DNA, 876 bp, Homo sapiens
cgcataagacatggccagctattccttgccttctgccataattgtgaggcctctccagccatatggaactattcctcttaggactctagatgcacggagagtggccagattaatacagactggcaaaagaagaacttggcaaagtgatttgatcacacacttctcaccctcacatctcctgacagttcccctaatccctgccccacttccccgccatgggcttccatcaggaaactccttgatatcatcttcgagaagaaaactgaggcatagaacatttgggaatgaatctaagactacacatctagaatagcagagtgcatatcatcgtcattcatctcacttttccttctaacatcaaggatctatacaaggccgttgatccccactgctgcatatttcttggatctatctgaggtcccagatcccattgcctcttcatcctcacagccactgctgggtctgggtcctcataagttctatctggaagtttcagtacagtctttctcgatgtgctccacactgttatgggaatgaattttcaaacacccctgctttgaagatagggtgcttccagggtaaggcataaagttctccagggaggcaacagtgcagtggtatacagacagcacagcctttcattcctgcgaggccacttacacctgagtgaggatgggaagaagagaagacaaggacgaatgtaggaaactgtcagttaaatgacaatgtatggatggcaagagagaaagaatagtcagtgatggaaaaataatcaataacagctttgggcttttgagtttgaaaatggtgtgtagggtgagacaacaataggaaacttctaataaagaatgaacaagtacttctacttgttcaatg

SEQ ID NO: 4123 - protein, 100 aa, Homo sapiens
MASYSLPSAIIVRPLQPYGTIPLRTLDARRVARLIQTGKRRTWQSDLITHFSPSHLLTVPLIPAPLPRHGLPSGNSLISSSRRKLRHRTFGNESKTTHLE

SEQ ID NO: 4124 - DNA, 542 bp, Homo sapiens
gattccacattgcagctaatcttcattaaactaccacgtggtgaattttaatgtagtatccaagaagcatactgacaccttctccattgtcctactatgtatctgtgtaaggccagattttcttcatatacattaaccaaagcaacatatggcaacagactgaatgaagaggcaggtttcctgggactctgttgcatcaaattctactgctaggcatcaattttaaagtatttcatcagttggacctaccaaatatcaagtcaggatttggccatctctgctcttgccattccacctctcacgactctatcctcaaagaaaagaaaacagtctttcatcaattatggttaaggatccccaaactgaaacacatgtggctaaacgccattcatatcaccagcccacaccagtctggtggtgggggagagaaggaaaaagaggagataaatggcctacatgattgatttcaactaagacccaaatcttggagaacaattattggatttaccactgtttgtttttgcaacatttcggaaatcggc

SEQ ID NO: 4125 - protein, 38 aa, Homo sapiens
MYLCKARFSSYTLTKATYGNRLNEEAGFLGLCCIKFYC

SEQ ID NO: 4126 - DNA, 2799 bp, Homo sapiens
ccggcgggcgctggcttgacagtttcctccccgcccactggcaggggagcgccccgccgggctgcacgcgcgcgcgcgcaggggggcataaaagccgcggccgcgcggagacgcggagctcgcccaccgcccgccccagcagtggctgcaccatgcacgtgaacggcaaagtggcgctggtgaccggcgcggctcagggcataggcagagcctttgcagaggcgctgctgcttaagggcgccaagacacttttagaaaagttgtagaccactttggaagactggacattttggtcaataatgctggagtgaataatgagaaaaactgggaaaaaactctgcaaattaatttggtttctgttatcagtggaacctatcttggtttggattacatgagtaagcaaaatggaggtgaaggcggcatcattatcaatatgtcatctttagcaggactcatgcccgttgcacagcagccggtttattgtgcttcaaagcatggcatagttggattcacacgctcagcagcgttggctgctaatcttatgaacagtggtgtgagactgaatgccatttgtccaggctttgttaacacagccatccttgaatcaattgaaaaagaagaaaacatgggacaatatatagaatataaggatcatatcaaggatatgattaaatactatggaattttggacccaccattgattgccaatggattgataacactcattgaagatgatgctttaaatggtgctattatgaagatcacaacttctaagggaattcattttcaagactatgatacaactccatttcaagcaaaaacccaatgaacagcttatgtgttagccatagctgaaaataagcacaaatagcttatattcagatcctatcttcatttgaatatagcttttaaatgaaatgttacagtttgaagttttccttcatgcacttggtgataaacgttttctaaatttttagttaagtatatggataaaaagttatgaactattaaaaatgtgatgtggaccaaaggctaggttgtaatcttgatagtctaaaaaatgatcaaaacaaatgattttcaaggaatattcaatattctgcctttcagaaagtgtatttatatctgtgcttcataaatattaatgttcttcagaacatcattttaaaggagatacttgaattgttatttaaatcaaaccagatgtaaaacactcacatacaagttcatactttaaaagaggaaagctacttaacaatgacaaatatttcacaataataatttttacttatataccatctttcaactgaacatttcagttcttccaagagcttcttagagtagtatattttgggggcagtcaaggaataaactacagtgtaaacatatcccagatgaaaactgctgtatggaaaaatgacagaaagtaactgattgacactgttgattcacagttcagcctcctatctgggaaagacatttctttcctctgctcactttaagaacttttaccgactccaaaaatctcaggaattaaacttttaacagttacagcaataaagaatagttagtactccaaaaatattatatttaagatgctcaacaagaaaaaaatgcaaatgtaatatttttttcaaattacttctttattgacttgtccaaatttcaaaagtgcctacccttcaataaaacttttttattctgatctccataaattacttagtcttctatgtatagctatcaaggaaataaaaccaattttgccacagccacaactgtaaatgtttttgtacccatgctgaaactcataacaacacagacataaaaatagctgtgaggttttgctttttttgttgtcagctatcttaagaatcattaaatacacctgctttgggtaaaactctttgcaagcagtaattaacactagtaacagtgaaagcacaagatttccaaatcagtcgttttctcaaaaaaatatcgtataagtgactcatcctgtctgctaactccagacctcccagcttgaagccaaatctttccatgtgagattgatatggatttcctagaagtactggaatgttgtcatatcttgccctattttaattctgctatagaaaacaattgccttcacttttaaggagtaatttgaatattaataactctggtctagattttcatataatgtattaaagacaaagtagtgaacatcaatgaacatctgatagagataaactgtaatcaggcataagcttgtttgtatgttctggcagtgactaatcagtaaatgatgtcggtttgcccagtatcacttatcttctgtatttttcctctgtcgtgtaaatagtataaccttttcatttatggacaattttttggactagtagccttcaatatacattctgctttgaattaattttttcaaatcaataaattatgtagacatttaaaatcaaatatcaagtagaattgaaaaatgtgagttacataagttaaaaacttactttaaatcttaccttctataggtagctctaaataaattcatatggttatatggcatctctggtgtatactgattgagaaaataattaaactgaagttaggggagggggaccttggtttcttgtatttttcagtgaatatcctaatgtaaatggtatatatatttttccaatgtgtttttcttagtaaaatgaagttggtacttctcagaacagcaacactagaaatacgtagacattgagaaaaagatcaagacttgataatgcattgaaatgtcctacaaattttattttctcatgt

SEQ ID NO: 4127 - protein, 145 aa, Homo sapiens
MSKQNGGEGGIIINMSSLAGLMPVAQQPVYCASKHGIVGFTRSAALAANLMNSGVRLNAICPGFVNTAILESIEKEENMGQYIEYKDHIKDMIKYYGILDPPLIANGLITLIEDDALNGAIMKITTSKGIHFQDYDTTPFQAKTQ

SEQ ID NO: 4128 - DNA, 2940 bp, Homo sapiens
gcctctgctccgctctccttctatccagttggtctttagggcactgaaggaaactcttcttcagaaataaccttttaacttttcttctgtcagctgcctgccaatcacggagccagaggctgaggggaggctttgagccggtctgcgagtccggaaggcaaagatcgcgaagcttggcgctccagaacgctcagggggcaggtgacacagtcgtgggttccccggcgggcgctggcttgacagtttcctccccgcccactggcaggggagcgccccgccgggctgcacgcgcgcgcgcgcaggggggcataaaagccgcggccgcgcggagacgcggagctcgcccaccgcccgccccagcagtggctgcaccatgcacgtgaacggcaaagtggcgctggtgaccggcgcggctcagggcataggcagagcctttgcagaggcgctgctgcttaagggcgccaaggtagcgctggtggattggaatcttgaagcaggtgtacagtgtaaagctgccctggatgagcagtttgaacctcagaagactctgttcatccagtgcgatgtggctgaccagcaacaactgagaggactcatgcccgttgcacagcagccggtttattgtgcttcaaagcatggcatagttggattcacacgctcagcagcgttggctgctaatcttatgaacagtggtgtgagactgaatgccatttgtccaggctttgttaacacagccatccttgaatcaattgaaaaagaagaaaacatgggacaatatatagaatataaggatcatatcaaggatatgattaaatactatggaattttggacccaccattgattgccaatggattgataacactcattgaagatgatgctttaaatggtgctattatgaagatcacaacttctaagggaattcattttcaagactatgatacaactccatttcaagcaaaaacccaatgaacagcttatgtgttagccatagctgaaaataagcacaaatagcttatattcagatcctatcttcatttgaatatagcttttaaatgaaatgttacagtttgaagttttccttcatgcacttggtgataaacgttttctaaatttttagttaagtatatggataaaaagttatgaactattaaaaatgtgatgtggaccaaaggctaggttgtaatcttgatagtctaaaaaatgatcaaaacaaatgattttcaaggaatattcaatattctgcctttcagaaagtgtatttatatctgtgcttcataaatattaatgttcttcagaacatcattttaaaggagatacttgaattgttatttaaatcaaaccagatgtaaaacactcacatacaagttcatactttaaaagaggaaagctacttaacaatgacaaatatttcacaataataatttttacttatataccatctttcaactgaacatttcagttcttccaagagcttcttagagtagtatattttgggggcagtcaaggaataaactacagtgtaaacatatcccagatgaaaactgctgtatggaaaaatgacagaaagtaactgattgacactgttgattcacagttcagcctcctatctgggaaagacatttctttcctctgctcactttaagaacttttaccgactccaaaaatctcaggaattaaacttttaacagttacagcaataaagaatagttagtactccaaaaatattatatttaagatgctcaacaagaaaaaaatgcaaatgtaatatttttttcaaattacttctttattgacttgtccaaatttcaaaagtgcctacccttcaataaaacttttttattctgatctccataaattacttagtcttctatgtatagctatcaaggaaataaaaccaattttgccacagccacaactgtaaatgtttttgtacccatgctgaaactcataacaacacagacataaaaatagctgtgaggttttgctttttttgttgtcagctatcttaagaatcattaaatacacctgctttgggtaaaactctttgcaagcagtaattaacactagtaacagtgaaagcacaagatttccaaatcagtcgttttctcaaaaaaatatcgtataagtgactcatcctgtctgctaactccagacctcccagcttgaagccaaatctttccatgtgagattgatatggatttcctagaagtactggaatgttgtcatatcttgccctattttaattctgctatagaaaacaattgccttcacttttaaggagtaatttgaatattaataactctggtctagattttcatataatgtattaaagacaaagtagtgaacatcaatgaacatctgatagagataaactgtaatcaggcataagcttgtttgtatgttctggcagtgactaatcagtaaatgatgtcggtttgcccagtatcacttatcttctgtatttttcctctgtcgtgtaaatagtataaccttttcatttatggacaattttttggactagtagccttcaatatacattctgctttgaattaattttttcaaatcaataaattatgtagacatttaaaatcaaatatcaagtagaattgaaaaatgtgagttacataagttaaaaacttactttaaatcttaccttctataggtagctctaaataaattcatatggttatatggcatctctggtgtatactgattgagaaaataattaaactgaagttaggggagggggaccttggtttcttgtatttttcagtgaatatcctaatgtaaatggtatatatatttttccaatgtgtttttcttagtaaaatgaagttggtacttctcagaacagcaacactagaaatacgtagacattgagaaaaagatcaagacttgataatgcattgaaatgtcctacaaattttattttctcatgt

SEQ ID NO: 4129 - protein, 198 aa, Homo sapiens
MHVNGKVALVTGAAQGIGRAFAEALLLKGAKVALVDWNLEAGVQCKAALDEQFEPQKTLFIQCDVADQQQLRGLMPVAQQPVYCASKHGIVGFTRSAALAANLMNSGVRLNAICPGFVNTAILESIEKEENMGQYIEYKDHIKDMIKYYGILDPPLIANGLITLIEDDALNGAIMKITTSKGIHFQDYDTTPFQAKTQ

SEQ ID NO: 4130 - DNA, 2980 bp, Homo sapiens
gcctctgctccgctctccttctatccagttggtctttagggcactgaaggaaactcttcttcagaaataaccttttaacttttcttctgtcagctgcctgccaatcacggagccagaggctgaggggaggctttgagccggtctgcgagtccggaaggcaaagatcgcgaagcttggcgctccagaacgctcagggggcaggtgacacagtcgtgggttccccggcgggcgctggcttgacagtttcctccccgcccactggcaggggagcgccccgccgggctgcacgcgcgcgcgcgcaggggggcataaaagccgcggccgcgcggagacgcggagctcgcccaccgcccgccccagcagtggctgcaccatgcacgtgaacggcaaagtggcgctggtgaccggcgcggctcagggcataggcagagcctttgcagaggcgctgctgcttaagggcgccaaggtagcgctggtggattggaatcttgaagcaggtgtacagtgtaaagctgccctggatgagcagtttgaacctcagaagactctgttcatccagtgcgatgtggctgaccagcaacaactgagagacacttttagaaaagttgtagaccactttggaagactggacattttggtcaataatgctggagtgaataatgagaaaaactgggaaaaaactctgcaaattaatttggtttctgttatcagtggaacctatcttggtttggattacatgagtaagcaaaatggaggtgaaggcggcatcattatcaatatgtcatctttagcaggactcatgcccgttgcacagcagccggtttattgtgcttcaaagcatggcatagttggattcacacgctcagcagcgcccaccattgattgccaatggattgataacactcattgaagatgatgctttaaatggtgctattatgaagatcacaacttctaagggaattcattttcaagactatgatacaactccatttcaagcaaaaacccaatgaacagcttatgtgttagccatagctgaaaataagcacaaatagcttatattcagatcctatcttcatttgaatatagcttttaaatgaaatgttacagtttgaagttttccttcatgcacttggtgataaacgttttctaaatttttagttaagtatatggataaaaagttatgaactattaaaaatgtgatgtggaccaaaggctaggttgtaatcttgatagtctaaaaaatgatcaaaacaaatgattttcaaggaatattcaatattctgcctttcagaaagtgtatttatatctgtgcttcataaatattaatgttcttcagaacatcattttaaaggagatacttgaattgttatttaaatcaaaccagatgtaaaacactcacatacaagttcatactttaaaagaggaaagctacttaacaatgacaaatatttcacaataataatttttacttatataccatctttcaactgaacatttcagttcttccaagagcttcttagagtagtatattttgggggcagtcaaggaataaactacagtgtaaacatatcccagatgaaaactgctgtatggaaaaatgacagaaagtaactgattgacactgttgattcacagttcagcctcctatctgggaaagacatttctttcctctgctcactttaagaacttttaccgactccaaaaatctcaggaattaaacttttaacagttacagcaataaagaatagttagtactccaaaaatattatatttaagatgctcaacaagaaaaaaatgcaaatgtaatatttttttcaaattacttctttattgacttgtccaaatttcaaaagtgcctacccttcaataaaacttttttattctgatctccataaattacttagtcttctatgtatagctatcaaggaaataaaaccaattttgccacagccacaactgtaaatgtttttgtacccatgctgaaactcataacaacacagacataaaaatagctgtgaggttttgctttttttgttgtcagctatcttaagaatcattaaatacacctgctttgggtaaaactctttgcaagcagtaattaacactagtaacagtgaaagcacaagatttccaaatcagtcgttttctcaaaaaaatatcgtataagtgactcatcctgtctgctaactccagacctcccagcttgaagccaaatctttccatgtgagattgatatggatttcctagaagtactggaatgttgtcatatcttgccctattttaattctgctatagaaaacaattgccttcacttttaaggagtaatttgaatattaataactctggtctagattttcatataatgtattaaagacaaagtagtgaacatcaatgaacatctgatagagataaactgtaatcaggcataagcttgtttgtatgttctggcagtgactaatcagtaaatgatgtcggtttgcccagtatcacttatcttctgtatttttcctctgtcgtgtaaatagtataaccttttcatttatggacaattttttggactagtagccttcaatatacattctgctttgaattaattttttcaaatcaataaattatgtagacatttaaaatcaaatatcaagtagaattgaaaaatgtgagttacataagttaaaaacttactttaaatcttaccttctataggtagctctaaataaattcatatggttatatggcatctctggtgtatactgattgagaaaataattaaactgaagttaggggagggggaccttggtttcttgtatttttcagtgaatatcctaatgtaaatggtatatatatttttccaatgtgtttttcttagtaaaatgaagttggtacttctcagaacagcaacactagaaatacgtagacattgagaaaaagatcaagacttgataatgcattgaaatgtcctacaaattttattttctcatgt

SEQ ID NO: 4131 - protein, 178 aa, Homo sapiens
MHVNGKVALVTGAAQGIGRAFAEALLLKGAKVALVDWNLEAGVQCKAALDEQFEPQKTLFIQCDVADQQQLRDTFRKVVDHFGRLDILVNNAGVNNEKNWEKTLQINLVSVISGTYLGLDYMSKQNGGEGGIIINMSSLAGLMPVAQQPVYCASKHGIVGFTRSAAPTIDCQWIDNTH

SEQ ID NO: 4132 - DNA, 2903 bp, Homo sapiens
gcctctgctccgctctccttctatccagttggtctttagggcactgaaggaaactcttcttcagaaataaccttttaacttttcttctgtcagctgcctgccaatcacggagccagaggctgaggggaggctttgagccggtctgcgagtccggaaggcaaagatcgcgaagcttggcgctccagaacgctcagggggcaggtgacacagtcgtgggttccccggcgggcgctggcttgacagtttcctccccgcccactggcaggggagcgccccgccgggctgcacgcgcgcgcgcgcaggggggcataaaagccgcggccgcgcggagacgcggagctcgcccaccgcccgccccagcagtggctgcaccatgcacgtgaacggcaaagtggcgctggtgaccggcgcggctcagggcataggcagagcctttgcagaggcgctgctgcttaagggcgccaaggtagcgctggtggattggaatcttgaagcaggtgtacagtgtaaagctgccctggatgagcagtttgaacctcagaagactctgttcatccagtgcgatgtggctgaccagcaacaactgagagacacttttagaaaagttgtagaccactttggaagactggacattttggtcaataatgctggagtgaataatgagaaaaactgggaaaaaactctgcaaattaatttggtttctgttatcagtggaacctatcttggtttggattacatgagtaagcaaaatggaggtgaaggcggcatcattatcaatatgtcatctttagcagcccaccattgattgccaatggattgataacactcattgaagatgatgctttaaatggtgctattatgaagatcacaacttctaagggaattcattttcaagactatgatacaactccatttcaagcaaaaacccaatgaacagcttatgtgttagccatagctgaaaataagcacaaatagcttatattcagatcctatcttcatttgaatatagcttttaaatgaaatgttacagtttgaagttttccttcatgcacttggtgataaacgttttctaaatttttagttaagtatatggataaaaagttatgaactattaaaaatgtgatgtggaccaaaggctaggttgtaatcttgatagtctaaaaaatgatcaaaacaaatgattttcaaggaatattcaatattctgcctttcagaaagtgtatttatatctgtgcttcataaatattaatgttcttcagaacatcattttaaaggagatacttgaattgttatttaaatcaaaccagatgtaaaacactcacatacaagttcatactttaaaagaggaaagctacttaacaatgacaaatatttcacaataataatttttacttatataccatctttcaactgaacatttcagttcttccaagagcttcttagagtagtatattttgggggcagtcaaggaataaactacagtgtaaacatatcccagatgaaaactgctgtatggaaaaatgacagaaagtaactgattgacactgttgattcacagttcagcctcctatctgggaaagacatttctttcctctgctcactttaagaacttttaccgactccaaaaatctcaggaattaaacttttaacagttacagcaataaagaatagttagtactccaaaaatattatatttaagatgctcaacaagaaaaaaatgcaaatgtaatatttttttcaaattacttctttattgacttgtccaaatttcaaaagtgcctacccttcaataaaacttttttattctgatctccataaattacttagtcttctatgtatagctatcaaggaaataaaaccaattttgccacagccacaactgtaaatgtttttgtacccatgctgaaactcataacaacacagacataaaaatagctgtgaggttttgctttttttgttgtcagctatcttaagaatcattaaatacacctgctttgggtaaaactctttgcaagcagtaattaacactagtaacagtgaaagcacaagatttccaaatcagtcgttttctcaaaaaaatatcgtataagtgactcatcctgtctgctaactccagacctcccagcttgaagccaaatctttccatgtgagattgatatggatttcctagaagtactggaatgttgtcatatcttgccctattttaattctgctatagaaaacaattgccttcacttttaaggagtaatttgaatattaataactctggtctagattttcatataatgtattaaagacaaagtagtgaacatcaatgaacatctgatagagataaactgtaatcaggcataagcttgtttgtatgttctggcagtgactaatcagtaaatgatgtcggtttgcccagtatcacttatcttctgtatttttcctctgtcgtgtaaatagtataaccttttcatttatggacaattttttggactagtagccttcaatatacattctgctttgaattaattttttcaaatcaataaattatgtagacatttaaaatcaaatatcaagtagaattgaaaaatgtgagttacataagttaaaaacttactttaaatcttaccttctataggtagctctaaataaattcatatggttatatggcatctctggtgtatactgattgagaaaataattaaactgaagttaggggagggggaccttggtttcttgtatttttcagtgaatatcctaatgtaaatggtatatatatttttccaatgtgtttttcttagtaaaatgaagttggtacttctcagaacagcaacactagaaatacgtagacattgagaaaaagatcaagacttgataatgcattgaaatgtcctacaaattttattttctcatgt

SEQ ID NO: 4133 - protein, 143 aa, Homo sapiens
MHVNGKVALVTGAAQGIGRAFAEALLLKGAKVALVDWNLEAGVQCKAALDEQFEPQKTLFIQCDVADQQQLRDTFRKVVDHFGRLDILVNNAGVNNEKNWEKTLQINLVSVISGTYLGLDYMSKQNGGEGGIIINMSSLAAHH

SEQ ID NO: 4134 - DNA, 3144 bp, Homo sapiens
gcctctgctccgctctccttctatccagttggtctttagggcactgaaggaaactcttcttcagaaataaccttttaacttttcttctgtcagctgcctgccaatcacggagccagaggctgaggggaggctttgagccggtctgcgagtccggaaggcaaagatcgcgaagcttggcgctccagaacgctcagggggcaggtgacacagtcgtgggttccccggcgggcgctggcttgacagtttcctccccgcccactggcaggggagcgccccgccgggctgcacgcgcgcgcgcgcaggggggcataaaagccgcggccgcgcggagacgcggagctcgcccaccgcccgccccagcagtggctgcaccatgcacgtgaacggcaaagtggcgctggtgaccggcgcggctcagggcataggcagagcctttgcagaggcgctgctgcttaagggcgccaaggtagcgctggtggattggaatcttgaagcaggtgtacagtgtaaagctgccctggatgagcagtttgaacctcagaagactctgttcatccagtgcgatgtggctgaccagcaacaactgagagacacttttagaaaagttgtagaccactttggaagactggacattttggtcaataatgctggagtgaataatgagaaaaactgggaaaaaactctgcaaattaatttggtttctgttatcagtggaacctatcttggtttggattacatgagtaagcaaaatggaggtgaaggcggcatcattatcaatatgtcatctttagcaggactcatgcccgttgcacagcagccggtttattgtgcttcaaagcatggcatagttggattcacacgctcagcagcgttggctgctaatcttatgaacagtggtgtgagactgaatgccatttgtccaggctttgttaacacagccatccttgaatcaattgaaaaagaagaaaacatgggacaatatatagaatataaggatcatatcaaggatatgattaaatactatggaattttggacccaccattgattgccaatggattgataacactcattgaagatgatgctttaaatggtgctattatgaagatcacaacttctaagggaattcattttcaagactatgatacaactccatttcaagcaaaaacccaatgaacagcttatgtgttagccatagctgaaaataagcacaaatagcttatattcagatcctatcttcatttgaatatagcttttaaatgaaatgttacagtttgaagttttccttcatgcacttggtgataaacgttttctaaatttttagttaagtatatggataaaaagttatgaactattaaaaatgtgatgtggaccaaaggctaggttgtaatcttgatagtctaaaaaatgatcaaaacaaatgattttcaaggaatattcaatattctgcctttcagaaagtgtatttatatctgtgcttcataaatattaatgttcttcagaacatcattttaaaggagatacttgaattgttatttaaatcaaaccagatgtaaaacactcacatacaagttcatactttaaaagaggaaagctacttaacaatgacaaatatttcacaataataatttttacttatataccatctttcaactgaacatttcagttcttccaagagcttcttagagtagtatattttgggggcagtcaaggaataaactacagtgtaaacatatcccagatgaaaactgctgtatggaaaaatgacagaaagtaactgattgacactgttgattcacagttcagcctcctatctgggaaagacatttctttcctctgctcactttaagaacttttaccgactccaaaaatctcaggaattaaacttttaacagttacagcaataaagaatagttagtactccaaaaatattatatttaagatgctcaacaagaaaaaaatgcaaatgtaatatttttttcaaattacttctttattgacttgtccaaatttcaaaagtgcctacccttcaataaaacttttttattctgatctccataaattacttagtcttctatgtatagctatcaaggaaataaaaccaattttgccacagccacaactgtaaatgtttttgtacccatgctgaaactcataacaacacagacataaaaatagctgtgaggttttgctttttttgttgtcagctatcttaagaatcattaaatacacctgctttgggtaaaactctttgcaagcagtaattaacactagtaacagtgaaagcacaagatttccaaatcagtcgttttctcaaaaaaatatcgtataagtgactcatcctgtctgctaactccagacctcccagcttgaagccaaatctttccatgtgagattgatatggatttcctagaagtactggaatgttgtcatatcttgccctattttaattctgctatagaaaacaattgccttcacttttaaggagtaatttgaatattaataactctggtctagattttcatataatgtattaaagacaaagtagtgaacatcaatgaacatctgatagagataaactgtaatcaggcataagcttgtttgtatgttctggcagtgactaatcagtaaatgatgtcggtttgcccagtatcacttatcttctgtatttttcctctgtcgtgtaaatagtataaccttttcatttatggacaattttttggactagtagccttcaatatacattctgctttgaattaattttttcaaatcaataaattatgtagacatttaaaatcaaatatcaagtagaattgaaaaatgtgagttacataagttaaaaacttactttaaatcttaccttctataggtagctctaaataaattcatatggttatatggcatctctggtgtatactgattgagaaaataattaaactgaagttaggggagggggaccttggtttcttgtatttttcagtgaatatcctaatgtaaatggtatatatatttttccaatgtgtttttcttagtaaaatgaagttggtacttctcagaacagcaacactagaaatacgtagacattgagaaaaagatcaagacttgataatgcattgaaatgtcctacaaattttattttctcatgt

SEQ ID NO: 4135 - protein, 266 aa, Homo sapiens [sequence omitted]

SEQ ID NO: 4136 - DNA, 2555 bp, Homo sapiens
ccggcgggcgctggcttgacagtttcctccccgcccactggcaggggagcgccccgccgggctgcacgcgcgcgcgcgcaggggggcataaaagccgcggccgcgcggagacgcggagctcgcccaccgcccgccccagcagtggctgcaccatgcacgtgaacggcaaagtggcgctggtgaccggcgcggctcagggcataggcagagcctttgcagaggcgctgctgcttaagggcgccaagacacttttagaaaagttgtagaccactttggaagactggacattttggtcaataatgctggagtgaataatgagaaaaactgggaaaaaactctgcaaattaatttggtttctgttatcagtggaacctatcttggtttggattacatgagtaagcaaaatggaggtgaaggcggcatcattatcaatatgtcatctttagcaggactcatgcccgttgcacagcagccggtttattgtgcttcaaagcatggcatagttggattcacacgctcagcagcgttggctgctaatcttatgaacagtggtgtgagactgaatgccatttgtccaggctttgttaacacagccatccttgaatcaattgaaaaagaagaaaacatgggacaatatatagaatataaggatcatatcaaggatatgattaaatactatggaattttggacccaccattgattgccaatggattgataacactcattgaagatgatgctttaaatggtgctattatgaagatcacaacttctaagggaattcattttcaagactatgatacaactccatttcaagcaaaaacccaatgaacagcttatgtgttagccatagctgaaaataagcacaaatagcttatattcagatcctatcttcatttgaatatagcttttaaatgaaatgttacagtttgaagttttccttcatgcacttggtgataaacgttttctaaatttttagttaagtatatggataaaaagttatgaactattaaaaatgtgatgtggaccaaaggctaggttgtaatcttgatagtctaaaaaatgatcaaaacaaatgattttcaaggaatattcaatattctgcctttcagaaagtgtatttatatctgtgcttcataaatattaatgttcttcagaacatcattttaaaggagatacttgaattgttatttaaatcaaaccagatgtaaaacactcacatacaagttcatactttaaaagaggaaagctacttaacaatgacaaatatttcacaataataatttttacttatataccatctttcaactgaacatttcagttcttccaagagcttcttagagtagtatattttgggggcagtcaaggaataaactacagtgtaaacatatcccagatgaaaactgctgtatggaaaaatgacagaaagtaactgattgacactgttgattcacagttcagcctcctatctgggaaagacatttctttcctctgctcactttaagaacttttaccgactccaaaaatctcaggaattaaacttttaacagttacagcaataaagaatagttagtactccaaaaatattatatttaagatgctcaacaagaaaaaaatgcaaatgtaatatttttttcaaattacttctttattgacttgtccaaatttcaaaagtgcctacccttcaataaaacttttttattctgatctccataaattacttagtcttctatgtatagctatcaaggaaataaaaccaattttgccacagccacaactgtaaatgtttttgtacccatgctgaaactcataacaacacagacataaaaatagctgtgaggttttgctttttttgttgtcagctatcttaagaatcattaaatacacctgctttgggtaaaactctttgcaagcagtaattaacactagtaacagtgaaagcacaagatttccaaatcagtcgttttctcaaaaaaatatcgtataagtgactcatcctgtctgctaactccagacctcccagcttgaagccaaatctttccatgtgagattgatatggatttcctagaagtactggaatgttgtcatatcttgccctattttaattctgctatagaaaacaattgccttcacttttaaggagtaatttgaatattaataactctggtctagattttcatataatgtattaaagacaaagtagtgaacatcaatgaacatctgatagagataaactgtaatcaggcataagcttgtttgtatgttctggcagtgactaatcagtaaatgatgtcggtttgcccagtatcacttatcttctgtatttttcctctgtcgtgtaaatagtataaccttttcatttatggacaattttttggactagtagccttcaatatacattctgctttgaattaattttttcaaatcaataaattatgtagacatttaaaatcaaatatcaagtagaattgaaaaatgtgagttacataagttaaaaacttactttaaatcttaccttctataggtagctctaaataaattcatatggttatatggc

SEQ ID NO: 4137 - protein, 145 aa, Homo sapiens; identical to SEQ ID NO: 4127

SEQ ID NO: 4138 - DNA, 2696 bp, Homo sapiens
gcctctgctccgctctccttctatccagttggtctttagggcactgaaggaaactcttcttcagaaataaccttttaacttttcttctgtcagctgcctgccaatcacggagccagaggctgaggggaggctttgagccggtctgcgagtccggaaggcaaagatcgcgaagcttggcgctccagaacgctcagggggcaggtgacacagtcgtgggttccccggcgggcgctggcttgacagtttcctccccgcccactggcaggggagcgccccgccgggctgcacgcgcgcgcgcgcaggggggcataaaagccgcggccgcgcggagacgcggagctcgcccaccgcccgccccagcagtggctgcaccatgcacgtgaacggcaaagtggcgctggtgaccggcgcggctcagggcataggcagagcctttgcagaggcgctgctgcttaagggcgccaaggtagcgctggtggattggaatcttgaagcaggtgtacagtgtaaagctgccctggatgagcagtttgaacctcagaagactctgttcatccagtgcgatgtggctgaccagcaacaactgagaggactcatgcccgttgcacagcagccggtttattgtgcttcaaagcatggcatagttggattcacacgctcagcagcgttggctgctaatcttatgaacagtggtgtgagactgaatgccatttgtccaggctttgttaacacagccatccttgaatcaattgaaaaagaagaaaacatgggacaatatatagaatataaggatcatatcaaggatatgattaaatactatggaattttggacccaccattgattgccaatggattgataacactcattgaagatgatgctttaaatggtgctattatgaagatcacaacttctaagggaattcattttcaagactatgatacaactccatttcaagcaaaaacccaatgaacagcttatgtgttagccatagctgaaaataagcacaaatagcttatattcagatcctatcttcatttgaatatagcttttaaatgaaatgttacagtttgaagttttccttcatgcacttggtgataaacgttttctaaatttttagttaagtatatggataaaaagttatgaactattaaaaatgtgatgtggaccaaaggctaggttgtaatcttgatagtctaaaaaatgatcaaaacaaatgattttcaaggaatattcaatattctgcctttcagaaagtgtatttatatctgtgcttcataaatattaatgttcttcagaacatcattttaaaggagatacttgaattgttatttaaatcaaaccagatgtaaaacactcacatacaagttcatactttaaaagaggaaagctacttaacaatgacaaatatttcacaataataatttttacttatataccatctttcaactgaacatttcagttcttccaagagcttcttagagtagtatattttgggggcagtcaaggaataaactacagtgtaaacatatcccagatgaaaactgctgtatggaaaaatgacagaaagtaactgattgacactgttgattcacagttcagcctcctatctgggaaagacatttctttcctctgctcactttaagaacttttaccgactccaaaaatctcaggaattaaacttttaacagttacagcaataaagaatagttagtactccaaaaatattatatttaagatgctcaacaagaaaaaaatgcaaatgtaatatttttttcaaattacttctttattgacttgtccaaatttcaaaagtgcctacccttcaataaaacttttttattctgatctccataaattacttagtcttctatgtatagctatcaaggaaataaaaccaattttgccacagccacaactgtaaatgtttttgtacccatgctgaaactcataacaacacagacataaaaatagctgtgaggttttgctttttttgttgtcagctatcttaagaatcattaaatacacctgctttgggtaaaactctttgcaagcagtaattaacactagtaacagtgaaagcacaagatttccaaatcagtcgttttctcaaaaaaatatcgtataagtgactcatcctgtctgctaactccagacctcccagcttgaagccaaatctttccatgtgagattgatatggatttcctagaagtactggaatgttgtcatatcttgccctattttaattctgctatagaaaacaattgccttcacttttaaggagtaatttgaatattaataactctggtctagattttcatataatgtattaaagacaaagtagtgaacatcaatgaacatctgatagagataaactgtaatcaggcataagcttgtttgtatgttctggcagtgactaatcagtaaatgatgtcggtttgcccagtatcacttatcttctgtatttttcctctgtcgtgtaaatagtataaccttttcatttatggacaattttttggactagtagccttcaatatacattctgctttgaattaattttttcaaatcaataaattatgtagacatttaaaatcaaatatcaagtagaattgaaaaatgtgagttacataagttaaaaacttactttaaatcttaccttctataggtagctctaaataaattcatatggttatatggc

SEQ ID NO: 4139 - protein, 198 aa, Homo sapiens; identical to SEQ ID NO: 4129

SEQ ID NO: 4140 - DNA, 2659 bp, Homo sapiens
gcctctgctccgctctccttctatccagttggtctttagggcactgaaggaaactcttcttcagaaataaccttttaacttttcttctgtcagctgcctgccaatcacggagccagaggctgaggggaggctttgagccggtctgcgagtccggaaggcaaagatcgcgaagcttggcgctccagaacgctcagggggcaggtgacacagtcgtgggttccccggcgggcgctggcttgacagtttcctccccgcccactggcaggggagcgccccgccgggctgcacgcgcgcgcgcgcaggggggcataaaagccgcggccgcgcggagacgcggagctcgcccaccgcccgccccagcagtggctgcaccatgcacgtgaacggcaaagtggcgctggtgaccggcgcggctcagggcataggcagagcctttgcagaggcgctgctgcttaagggcgccaaggtagcgctggtggattggaatcttgaagcaggtgtacagtgtaaagctgccctggatgagcagtttgaacctcagaagactctgttcatccagtgcgatgtggctgaccagcaacaactgagagacacttttagaaaagttgtagaccactttggaagactggacattttggtcaataatgctggagtgaataatgagaaaaactgggaaaaaactctgcaaattaatttggtttctgttatcagtggaacctatcttggtttggattacatgagtaagcaaaatggaggtgaaggcggcatcattatcaatatgtcatctttagcagcccaccattgattgccaatggattgataacactcattgaagatgatgctttaaatggtgctattatgaagatcacaacttctaagggaattcattttcaagactatgatacaactccatttcaagcaaaaacccaatgaacagcttatgtgttagccatagctgaaaataagcacaaatagcttatattcagatcctatcttcatttgaatatagcttttaaatgaaatgttacagtttgaagttttccttcatgcacttggtgataaacgttttctaaatttttagttaagtatatggataaaaagttatgaactattaaaaatgtgatgtggaccaaaggctaggttgtaatcttgatagtctaaaaaatgatcaaaacaaatgattttcaaggaatattcaatattctgcctttcagaaagtgtatttatatctgtgcttcataaatattaatgttcttcagaacatcattttaaaggagatacttgaattgttatttaaatcaaaccagatgtaaaacactcacatacaagttcatactttaaaagaggaaagctacttaacaatgacaaatatttcacaataataatttttacttatataccatctttcaactgaacatttcagttcttccaagagcttcttagagtagtatattttgggggcagtcaaggaataaactacagtgtaaacatatcccagatgaaaactgctgtatggaaaaatgacagaaagtaactgattgacactgttgattcacagttcagcctcctatctgggaaagacatttctttcctctgctcactttaagaacttttaccgactccaaaaatctcaggaattaaacttttaacagttacagcaataaagaatagttagtactccaaaaatattatatttaagatgctcaacaagaaaaaaatgcaaatgtaatatttttttcaaattacttctttattgacttgtccaaatttcaaaagtgcctacccttcaataaaacttttttattctgatctccataaattacttagtcttctatgtatagctatcaaggaaataaaaccaattttgccacagccacaactgtaaatgtttttgtacccatgctgaaactcataacaacacagacataaaaatagctgtgaggttttgctttttttgttgtcagctatcttaagaatcattaaatacacctgctttgggtaaaactctttgcaagcagtaattaacactagtaacagtgaaagcacaagatttccaaatcagtcgttttctcaaaaaaatatcgtataagtgactcatcctgtctgctaactccagacctcccagcttgaagccaaatctttccatgtgagattgatatggatttcctagaagtactggaatgttgtcatatcttgccctattttaattctgctatagaaaacaattgccttcacttttaaggagtaatttgaatattaataactctggtctagattttcatataatgtattaaagacaaagtagtgaacatcaatgaacatctgatagagataaactgtaatcaggcataagcttgtttgtatgttctggcagtgactaatcagtaaatgatgtcggtttgcccagtatcacttatcttctgtatttttcctctgtcgtgtaaatagtataaccttttcatttatggacaattttttggactagtagccttcaatatacattctgctttgaattaattttttcaaatcaataaattatgtagacatttaaaatcaaatatcaagtagaattgaaaaatgtgagttacataagttaaaaacttactttaaatcttaccttctataggtagctctaaataaattcatatggttatatggc

SEQ ID NO: 4141 - protein, 143 aa, Homo sapiens; identical to SEQ ID NO: 4133

SEQ ID NO: 4142 - DNA, 2736 bp, Homo sapiens
gcctctgctccgctctccttctatccagttggtctttagggcactgaaggaaactcttcttcagaaataaccttttaacttttcttctgtcagctgcctgccaatcacggagccagaggctgaggggaggctttgagccggtctgcgagtccggaaggcaaagatcgcgaagcttggcgctccagaacgctcagggggcaggtgacacagtcgtgggttccccggcgggcgctggcttgacagtttcctccccgcccactggcaggggagcgccccgccgggctgcacgcgcgcgcgcgcaggggggcataaaagccgcggccgcgcggagacgcggagctcgcccaccgcccgccccagcagtggctgcaccatgcacgtgaacggcaaagtggcgctggtgaccggcgcggctcagggcataggcagagcctttgcagaggcgctgctgcttaagggcgccaaggtagcgctggtggattggaatcttgaagcaggtgtacagtgtaaagctgccctggatgagcagtttgaacctcagaagactctgttcatccagtgcgatgtggctgaccagcaacaactgagagacacttttagaaaagttgtagaccactttggaagactggacattttggtcaataatgctggagtgaataatgagaaaaactgggaaaaaactctgcaaattaatttggtttctgttatcagtggaacctatcttggtttggattacatgagtaagcaaaatggaggtgaaggcggcatcattatcaatatgtcatctttagcaggactcatgcccgttgcacagcagccggtttattgtgcttcaaagcatggcatagttggattcacacgctcagcagcgcccaccattgattgccaatggattgataacactcattgaagatgatgctttaaatggtgctattatgaagatcacaacttctaagggaattcattttcaagactatgatacaactccatttcaagcaaaaacccaatgaacagcttatgtgttagccatagctgaaaataagcacaaatagcttatattcagatcctatcttcatttgaatatagcttttaaatgaaatgttacagtttgaagttttccttcatgcacttggtgataaacgttttctaaatttttagttaagtatatggataaaaagttatgaactattaaaaatgtgatgtggaccaaaggctaggttgtaatcttgatagtctaaaaaatgatcaaaacaaatgattttcaaggaatattcaatattctgcctttcagaaagtgtatttatatctgtgcttcataaatattaatgttcttcagaacatcattttaaaggagatacttgaattgttatttaaatcaaaccagatgtaaaacactcacatacaagttcatactttaaaagaggaaagctacttaacaatgacaaatatttcacaataataatttttacttatataccatctttcaactgaacatttcagttcttccaagagcttcttagagtagtatattttgggggcagtcaaggaataaactacagtgtaaacatatcccagatgaaaactgctgtatggaaaaatgacagaaagtaactgattgacactgttgattcacagttcagcctcctatctgggaaagacatttctttcctctgctcactttaagaacttttaccgactccaaaaatctcaggaattaaacttttaacagttacagcaataaagaatagttagtactccaaaaatattatatttaagatgctcaacaagaaaaaaatgcaaatgtaatatttttttcaaattacttctttattgacttgtccaaatttcaaaagtgcctacccttcaataaaacttttttattctgatctccataaattacttagtcttctatgtatagctatcaaggaaataaaaccaattttgccacagccacaactgtaaatgtttttgtacccatgctgaaactcataacaacacagacataaaaatagctgtgaggttttgctttttttgttgtcagctatcttaagaatcattaaatacacctgctttgggtaaaactctttgcaagcagtaattaacactagtaacagtgaaagcacaagatttccaaatcagtcgttttctcaaaaaaatatcgtataagtgactcatcctgtctgctaactccagacctcccagcttgaagccaaatctttccatgtgagattgatatggatttcctagaagtactggaatgttgtcatatcttgccctattttaattctgctatagaaaacaattgccttcacttttaaggagtaatttgaatattaataactctggtctagattttcatataatgtattaaagacaaagtagtgaacatcaatgaacatctgatagagataaactgtaatcaggcataagcttgtttgtatgttctggcagtgactaatcagtaaatgatgtcggtttgcccagtatcacttatcttctgtatttttcctctgtcgtgtaaatagtataaccttttcatttatggacaattttttggactagtagccttcaatatacattctgctttgaattaattttttcaaatcaataaattatgtagacatttaaaatcaaatatcaagtagaattgaaaaatgtgagttacataagttaaaaacttactttaaatcttaccttctataggtagctctaaataaattcatatggttatatggc

SEQ ID NO: 4143 - protein, 178 aa, Homo sapiens; identical to SEQ ID NO: 4131

SEQ ID NO: 4144 - DNA, 2900 bp, Homo sapiens
gcctctgctccgctctccttctatccagttggtctttagggcactgaaggaaactcttcttcagaaataaccttttaacttttcttctgtcagctgcctgccaatcacggagccagaggctgaggggaggctttgagccggtctgcgagtccggaaggcaaagatcgcgaagcttggcgctccagaacgctcagggggcaggtgacacagtcgtgggttccccggcgggcgctggcttgacagtttcctccccgcccactggcaggggagcgccccgccgggctgcacgcgcgcgcgcgcaggggggcataaaagccgcggccgcgcggagacgcggagctcgcccaccgcccgccccagcagtggctgcaccatgcacgtgaacggcaaagtggcgctggtgaccggcgcggctcagggcataggcagagcctttgcagaggcgctgctgcttaagggcgccaaggtagcgctggtggattggaatcttgaagcaggtgtacagtgtaaagctgccctggatgagcagtttgaacctcagaagactctgttcatccagtgcgatgtggctgaccagcaacaactgagagacacttttagaaaagttgtagaccactttggaagactggacattttggtcaataatgctggagtgaataatgagaaaaactgggaaaaaactctgcaaattaatttggtttctgttatcagtggaacctatcttggtttggattacatgagtaagcaaaatggaggtgaaggcggcatcattatcaatatgtcatctttagcaggactcatgcccgttgcacagcagccggtttattgtgcttcaaagcatggcatagttggattcacacgctcagcagcgttggctgctaatcttatgaacagtggtgtgagactgaatgccatttgtccaggctttgttaacacagccatccttgaatcaattgaaaaagaagaaaacatgggacaatatatagaatataaggatcatatcaaggatatgattaaatactatggaattttggacccaccattgattgccaatggattgataacactcattgaagatgatgctttaaatggtgctattatgaagatcacaacttctaagggaattcattttcaagactatgatacaactccatttcaagcaaaaacccaatgaacagcttatgtgttagccatagctgaaaataagcacaaatagcttatattcagatcctatcttcatttgaatatagcttttaaatgaaatgttacagtttgaagttttccttcatgcacttggtgataaacgttttctaaatttttagttaagtatatggataaaaagttatgaactattaaaaatgtgatgtggaccaaaggctaggttgtaatcttgatagtctaaaaaatgatcaaaacaaatgattttcaaggaatattcaatattctgcctttcagaaagtgtatttatatctgtgcttcataaatattaatgttcttcagaacatcattttaaaggagatacttgaattgttatttaaatcaaaccagatgtaaaacactcacatacaagttcatactttaaaagaggaaagctacttaacaatgacaaatatttcacaataataatttttacttatataccatctttcaactgaacatttcagttcttccaagagcttcttagagtagtatattttgggggcagtcaaggaataaactacagtgtaaacatatcccagatgaaaactgctgtatggaaaaatgacagaaagtaactgattgacactgttgattcacagttcagcctcctatctgggaaagacatttctttcctctgctcactttaagaacttttaccgactccaaaaatctcaggaattaaacttttaacagttacagcaataaagaatagttagtactccaaaaatattatatttaagatgctcaacaagaaaaaaatgcaaatgtaatatttttttcaaattacttctttattgacttgtccaaatttcaaaagtgcctacccttcaataaaacttttttattctgatctccataaattacttagtcttctatgtatagctatcaaggaaataaaaccaattttgccacagccacaactgtaaatgtttttgtacccatgctgaaactcataacaacacagacataaaaatagctgtgaggttttgctttttttgttgtcagctatcttaagaatcattaaatacacctgctttgggtaaaactctttgcaagcagtaattaacactagtaacagtgaaagcacaagatttccaaatcagtcgttttctcaaaaaaatatcgtataagtgactcatcctgtctgctaactccagacctcccagcttgaagccaaatctttccatgtgagattgatatggatttcctagaagtactggaatgttgtcatatcttgccctattttaattctgctatagaaaacaattgccttcacttttaaggagtaatttgaatattaataactctggtctagattttcatataatgtattaaagacaaagtagtgaacatcaatgaacatctgatagagataaactgtaatcaggcataagcttgtttgtatgttctggcagtgactaatcagtaaatgatgtcggtttgcccagtatcacttatcttctgtatttttcctctgtcgtgtaaatagtataaccttttcatttatggacaattttttggactagtagccttcaatatacattctgctttgaattaattttttcaaatcaataaattatgtagacatttaaaatcaaatatcaagtagaattgaaaaatgtgagttacataagttaaaaacttactttaaatcttaccttctataggtagctctaaataaattcatatggttatatggc

SEQ ID NO: 4145 - protein, 266 aa, Homo sapiens [sequence omitted]

SEQ ID NO: 4146 - DNA, 1712 bp, Homo sapiens
ccggcgggcgctggcttgacagtttcctccccgcccactggcaggggagcgccccgccgggctgcacgcgcgcgcgcgcaggggggcataaaagccgcggccgcgcggagacgcggagctcgcccaccgcccgccccagcagtggctgcaccatgcacgtgaacggcaaagtggcgctggtgaccggcgcggctcagggcataggcagagcctttgcagaggcgctgctgcttaagggcgccaagacacttttagaaaagttgtagaccactttggaagactggacattttggtcaataatgctggagtgaataatgagaaaaactgggaaaaaactctgcaaattaatttggtttctgttatcagtggaacctatcttggtttggattacatgagtaagcaaaatggaggtgaaggcggcatcattatcaatatgtcatctttagcaggactcatgcccgttgcacagcagccggtttattgtgcttcaaagcatggcatagttggattcacacgctcagcagcgttggctgctaatcttatgaacagtggtgtgagactgaatgccatttgtccaggctttgttaacacagccatccttgaatcaattgaaaaagaagaaaacatgggacaatatatagaatataaggatcatatcaaggatatgattaaatactatggaattttggacccaccattgattgccaatggattgataacactcattgaagatgatgctttaaatggtgctattatgaagatcacaacttctaagggaattcattttcaagactatgatacaactccatttcaagcaaaaacccaatgaacagcttatgtgttagccatagctgaaaataagcacaaatagcttatattcagatcctatcttcatttgaatatagcttttaaatgaaatgttacagtttgaagttttccttcatgcacttggtgataaacgttttctaaatttttagttaagtatatggataaaaagttatgaactattaaaaatgtgatgtggaccaaaggctaggttgtaatcttgatagtctaaaaaatgatcaaaacaaatgattttcaaggaatattcaatattctgcctttcagaaagtgtatttatatctgtgcttcataaatattaatgttcttcagaacatcattttaaaggagatacttgaattgttatttaaatcaaaccagatgtaaaacactcacatacaagttcatactttaaaagaggaaagctacttaacaatgacaaatatttcacaataataatttttacttatataccatctttcaactgaacatttcagttcttccaagagcttcttagagtagtatattttgggggcagtcaaggaataaactacagtgtaaacatatcccagatgaaaactgctgtatggaaaaatgacagaaagtaactgattgacactgttgattcacagttcagcctcctatctgggaaagacatttctttcctctgctcactttaagaacttttaccgactccaaaaatctcaggaattaaacttttaacagttacagcaataaagaatagttagtactccaaaaatattatatttaagatgctcaacaagaaaaaaatgcaaatgtaatatttttttcaaattacttctttattgacttgtccaaatttcaaaagtgcctacccttcaataaaacttttttattctgatctccat

SEQ ID NO: 4147 - protein, 145 aa, Homo sapiens; identical to SEQ ID NO: 4127

SEQ ID NO: 4148 - DNA, 1816 bp, Homo sapiens
gcctctgctccgctctccttctatccagttggtctttagggcactgaaggaaactcttcttcagaaataaccttttaacttttcttctgtcagctgcctgccaatcacggagccagaggctgaggggaggctttgagccggtctgcgagtccggaaggcaaagatcgcgaagcttggcgctccagaacgctcagggggcaggtgacacagtcgtgggttccccggcgggcgctggcttgacagtttcctccccgcccactggcaggggagcgccccgccgggctgcacgcgcgcgcgcgcaggggggcataaaagccgcggccgcgcggagacgcggagctcgcccaccgcccgccccagcagtggctgcaccatgcacgtgaacggcaaagtggcgctggtgaccggcgcggctcagggcataggcagagcctttgcagaggcgctgctgcttaagggcgccaaggtagcgctggtggattggaatcttgaagcaggtgtacagtgtaaagctgccctggatgagcagtttgaacctcagaagactctgttcatccagtgcgatgtggctgaccagcaacaactgagagacacttttagaaaagttgtagaccactttggaagactggacattttggtcaataatgctggagtgaataatgagaaaaactgggaaaaaactctgcaaattaatttggtttctgttatcagtggaacctatcttggtttggattacatgagtaagcaaaatggaggtgaaggcggcatcattatcaatatgtcatctttagcagcccaccattgattgccaatggattgataacactcattgaagatgatgctttaaatggtgctattatgaagatcacaacttctaagggaattcattttcaagactatgatacaactccatttcaagcaaaaacccaatgaacagcttatgtgttagccatagctgaaaataagcacaaatagcttatattcagatcctatcttcatttgaatatagcttttaaatgaaatgttacagtttgaagttttccttcatgcacttggtgataaacgttttctaaatttttagttaagtatatggataaaaagttatgaactattaaaaatgtgatgtggaccaaaggctaggttgtaatcttgatagtctaaaaaatgatcaaaacaaatgattttcaaggaatattcaatattctgcctttcagaaagtgtatttatatctgtgcttcataaatattaatgttcttcagaacatcattttaaaggagatacttgaattgttatttaaatcaaaccagatgtaaaacactcacatacaagttcatactttaaaagaggaaagctacttaacaatgacaaatatttcacaataataatttttacttatataccatctttcaactgaacatttcagttcttccaagagcttcttagagtagtatattttgggggcagtcaaggaataaactacagtgtaaacatatcccagatgaaaactgctgtatggaaaaatgacagaaagtaactgattgacactgttgattcacagttcagcctcctatctgggaaagacatttctttcctctgctcactttaagaacttttaccgactccaaaaatctcaggaattaaacttttaacagttacagcaataaagaatagttagtactccaaaaatattatatttaagatgctcaacaagaaaaaaatgcaaatgtaatatttttttcaaattacttctttattgacttgtccaaatttcaaaagtgcctacccttcaataaaacttttttattctgatctccat

SEQ ID NO: 4149 - protein, 143 aa, Homo sapiens; identical to SEQ ID NO: 4133

SEQ ID NO: 4150 - DNA, 1893 bp, Homo sapiens
gcctctgctccgctctccttctatccagttggtctttagggcactgaaggaaactcttcttcagaaataaccttttaacttttcttctgtcagctgcctgccaatcacggagccagaggctgaggggaggctttgagccggtctgcgagtccggaaggcaaagatcgcgaagcttggcgctccagaacgctcagggggcaggtgacacagtcgtgggttccccggcgggcgctggcttgacagtttcctccccgcccactggcaggggagcgccccgccgggctgcacgcgcgcgcgcgcaggggggcataaaagccgcggccgcgcggagacgcggagctcgcccaccgcccgccccagcagtggctgcaccatgcacgtgaacggcaaagtggcgctggtgaccggcgcggctcagggcataggcagagcctttgcagaggcgctgctgcttaagggcgccaaggtagcgctggtggattggaatcttgaagcaggtgtacagtgtaaagctgccctggatgagcagtttgaacctcagaagactctgttcatccagtgcgatgtggctgaccagcaacaactgagagacacttttagaaaagttgtagaccactttggaagactggacattttggtcaataatgctggagtgaataatgagaaaaactgggaaaaaactctgcaaattaatttggtttctgttatcagtggaacctatcttggtttggattacatgagtaagcaaaatggaggtgaaggcggcatcattatcaatatgtcatctttagcaggactcatgcccgttgcacagcagccggtttattgtgcttcaaagcatggcatagttggattcacacgctcagcagcgcccaccattgattgccaatggattgataacactcattgaagatgatgctttaaatggtgctattatgaagatcacaacttctaagggaattcattttcaagactatgatacaactccatttcaagcaaaaacccaatgaacagcttatgtgttagccatagctgaaaataagcacaaatagcttatattcagatcctatcttcatttgaatatagcttttaaatgaaatgttacagtttgaagttttccttcatgcacttggtgataaacgttttctaaatttttagttaagtatatggataaaaagttatgaactattaaaaatgtgatgtggaccaaaggctaggttgtaatcttgatagtctaaaaaatgatcaaaacaaatgattttcaaggaatattcaatattctgcctttcagaaagtgtatttatatctgtgcttcataaatattaatgttcttcagaacatcattttaaaggagatacttgaattgttatttaaatcaaaccagatgtaaaacactcacatacaagttcatactttaaaagaggaaagctacttaacaatgacaaatatttcacaataataatttttacttatataccatctttcaactgaacatttcagttcttccaagagcttcttagagtagtatattttgggggcagtcaaggaataaactacagtgtaaacatatcccagatgaaaactgctgtatggaaaaatgacagaaagtaactgattgacactgttgattcacagttcagcctcctatctgggaaagacatttctttcctctgctcactttaagaacttttaccgactccaaaaatctcaggaattaaacttttaacagttacagcaataaagaatagttagtactccaaaaatattatatttaagatgctcaacaagaaaaaaatgcaaatgtaatatttttttcaaattacttctttattgacttgtccaaatttcaaaagtgcctacccttcaataaaacttttttattctgatctccat

SEQ ID NO: 4151 - protein, 178 aa, Homo sapiens; identical to SEQ ID NO: 4131

SEQ ID NO: 4152 - DNA, 2057 bp, Homo sapiens
gcctctgctccgctctccttctatccagttggtctttagggcactgaaggaaactcttcttcagaaataaccttttaacttttcttctgtcagctgcctgccaatcacggagccagaggctgaggggaggctttgagccggtctgcgagtccggaaggcaaagatcgcgaagcttggcgctccagaacgctcagggggcaggtgacacagtcgtgggttccccggcgggcgctggcttgacagtttcctccccgcccactggcaggggagcgccccgccgggctgcacgcgcgcgcgcgcaggggggcataaaagccgcggccgcgcggagacgcggagctcgcccaccgcccgccccagcagtggctgcaccatgcacgtgaacggcaaagtggcgctggtgaccggcgcggctcagggcataggcagagcctttgcagaggcgctgctgcttaagggcgccaaggtagcgctggtggattggaatcttgaagcaggtgtacagtgtaaagctgccctggatgagcagtttgaacctcagaagactctgttcatccagtgcgatgtggctgaccagcaacaactgagagacacttttagaaaagttgtagaccactttggaagactggacattttggtcaataatgctggagtgaataatgagaaaaactgggaaaaaactctgcaaattaatttggtttctgttatcagtggaacctatcttggtttggattacatgagtaagcaaaatggaggtgaaggcggcatcattatcaatatgtcatctttagcaggactcatgcccgttgcacagcagccggtttattgtgcttcaaagcatggcatagttggattcacacgctcagcagcgttggctgctaatcttatgaacagtggtgtgagactgaatgccatttgtccaggctttgttaacacagccatccttgaatcaattgaaaaagaagaaaacatgggacaatatatagaatataaggatcatatcaaggatatgattaaatactatggaattttggacccaccattgattgccaatggattgataacactcattgaagatgatgctttaaatggtgctattatgaagatcacaacttctaagggaattcattttcaagactatgatacaactccatttcaagcaaaaacccaatgaacagcttatgtgttagccatagctgaaaataagcacaaatagcttatattcagatcctatcttcatttgaatatagcttttaaatgaaatgttacagtttgaagttttccttcatgcacttggtgataaacgttttctaaatttttagttaagtatatggataaaaagttatgaactattaaaaatgtgatgtggaccaaaggctaggttgtaatcttgatagtctaaaaaatgatcaaaacaaatgattttcaaggaatattcaatattctgcctttcagaaagtgtatttatatctgtgcttcataaatattaatgttcttcagaacatcattttaaaggagatacttgaattgttatttaaatcaaaccagatgtaaaacactcacatacaagttcatactttaaaagaggaaagctacttaacaatgacaaatatttcacaataataatttttacttatataccatctttcaactgaacatttcagttcttccaagagcttcttagagtagtatattttgggggcagtcaaggaataaactacagtgtaaacatatcccagatgaaaactgctgtatggaaaaatgacagaaagtaactgattgacactgttgattcacagttcagcctcctatctgggaaagacatttctttcctctgctcactttaagaacttttaccgactccaaaaatctcaggaattaaacttttaacagttacagcaataaagaatagttagtactccaaaaatattatatttaagatgctcaacaagaaaaaaatgcaaatgtaatatttttttcaaattacttctttattgacttgtccaaatttcaaaagtgcctacccttcaataaaacttttttattctgatctccat

SEQ ID NO: 4153 - protein, 266 aa, Homo sapiens [sequence omitted]

SEQ ID NO: 4154 - DNA, 1853 bp, Homo sapiens
gcctctgctccgctctccttctatccagttggtctttagggcactgaaggaaactcttcttcagaaataaccttttaacttttcttctgtcagctgcctgccaatcacggagccagaggctgaggggaggctttgagccggtctgcgagtccggaaggcaaagatcgcgaagcttggcgctccagaacgctcagggggcaggtgacacagtcgtgggttccccggcgggcgctggcttgacagtttcctccccgcccactggcaggggagcgccccgccgggctgcacgcgcgcgcgcgcaggggggcataaaagccgcggccgcgcggagacgcggagctcgcccaccgcccgccccagcagtggctgcaccatgcacgtgaacggcaaagtggcgctggtgaccggcgcggctcagggcataggcagagcctttgcagaggcgctgctgcttaagggcgccaaggtagcgctggtggattggaatcttgaagcaggtgtacagtgtaaagctgccctggatgagcagtttgaacctcagaagactctgttcatccagtgcgatgtggctgaccagcaacaactgagaggactcatgcccgttgcacagcagccggtttattgtgcttcaaagcatggcatagttggattcacacgctcagcagcgttggctgctaatcttatgaacagtggtgtgagactgaatgccatttgtccaggctttgttaacacagccatccttgaatcaattgaaaaagaagaaaacatgggacaatatatagaatataaggatcatatcaaggatatgattaaatactatggaattttggacccaccattgattgccaatggattgataacactcattgaagatgatgctttaaatggtgctattatgaagatcacaacttctaagggaattcattttcaagactatgatacaactccatttcaagcaaaaacccaatgaacagcttatgtgttagccatagctgaaaataagcacaaatagcttatattcagatcctatcttcatttgaatatagcttttaaatgaaatgttacagtttgaagttttccttcatgcacttggtgataaacgttttctaaatttttagttaagtatatggataaaaagttatgaactattaaaaatgtgatgtggaccaaaggctaggttgtaatcttgatagtctaaaaaatgatcaaaacaaatgattttcaaggaatattcaatattctgcctttcagaaagtgtatttatatctgtgcttcataaatattaatgttcttcagaacatcattttaaaggagatacttgaattgttatttaaatcaaaccagatgtaaaacactcacatacaagttcatactttaaaagaggaaagctacttaacaatgacaaatatttcacaataataatttttacttatataccatctttcaactgaacatttcagttcttccaagagcttcttagagtagtatattttgggggcagtcaaggaataaactacagtgtaaacatatcccagatgaaaactgctgtatggaaaaatgacagaaagtaactgattgacactgttgattcacagttcagcctcctatctgggaaagacatttctttcctctgctcactttaagaacttttaccgactccaaaaatctcaggaattaaacttttaacagttacagcaataaagaatagttagtactccaaaaatattatatttaagatgctcaacaagaaaaaaatgcaaatgtaatatttttttcaaattacttctttattgacttgtccaaatttcaaaagtgcctacccttcaataaaacttttttattctgatctccat

SEQ ID NO: 4155 - protein, 198 aa, Homo sapiens; identical to SEQ ID NO: 4129

SEQ ID NO: 4156 - DNA, 951 bp, Homo sapiens
gcctctgctccgctctccttctatccagttggtctttagggcactgaaggaaactcttcttcagaaataaccttttaacttttcttctgtcagctgcctgccaatcacggagccagaggctgaggggaggctttgagccggtctgcgagtccggaaggcaaagatcgcgaagcttggcgctccagaacgctcagggggcaggtgacacagtcgtgggttccccggcgggcgctggcttgacagtttcctccccgcccactggcaggggagcgccccgccgggctgcacgcgcgcgcgcgcaggggggcataaaagccgcggccgcgcggagacgcggagctcgcccaccgcccgccccagcagtggctgcaccatgcacgtgaacggcaaagtggcgctggtgaccggcgcggctcagggcataggcagagcctttgcagaggcgctgctgcttaagggcgccaaggtagcgctggtggattggaatcttgaagcaggtgtacagtgtaaagctgccctggatgagcagtttgaacctcagaagactctgttcatccagtgcgatgtggctgaccagcaacaactgagagacacttttagaaaagttgtagaccactttggaagactggacattttggtcaataatgctggagtgaataatgagaaaaactgggaaaaaactctgcaaattaatttggtttctgttatcagtggaacctatcttggtttggattacatgagtaagcaaaatggaggtgaaggcggcatcattatcaatatgtcatctttagcaggactcatgcccgttgcacagcagccggtttattgtgcttcaaagcatggcatagttggattcacacgctcagcagcgttggctgctaatcttatgaacagtggtgtgagactgaatgccatttgtccaggctttgttaacacagccatccttgaatc

SEQ ID NO: 4157 - protein, 191 aa, Homo sapiens
MHVNGKVALVTGAAQGIGRAFAEALLLKGAKVALVDWNLEAGVQCKAALDEQFEPQKTLFIQCDVADQQQLRDTFRKVVDHFGRLDILVNNAGVNNEKNWEKTLQINLVSVISGTYLGLDYMSKQNGGEGGIIINMSSLAGLMPVAQQPVYCASKHGIVGFTRSAALAANLMNSGVRLNAICPGFVNTAIL

SEQ ID NO: 4158 - DNA, 1058 bp, Homo sapiens
gcctctgctccgctctccttctatccagttggtctttagggcactgaaggaaactcttcttcagaaataaccttttaacttttcttctgtcagctgcctgccaatcacggagccagaggctgaggggaggctttgagccggtctgcgagtccggaaggcaaagatcgcgaagcttggcgctccagaacgctcagggggcaggtgacacagtcgtgggttccccggcgggcgctggcttgacagtttcctccccgcccactggcaggggagcgccccgccgggctgcacgcgcgcgcgcgcaggggggcataaaagccgcggccgcgcggagacgcggagctcgcccaccgcccgccccagcagtggctgcaccatgcacgtgaacggcaaagtggcgctggtgaccggcgcggctcagggcataggcagagcctttgcagaggcgctgctgcttaagggcgccaaggtagcgctggtggattggaatcttgaagcaggtgtacagtgtaaagctgccctggatgagcagtttgaacctcagaagactctgttcatccagtgcgatgtggctgaccagcaacaactgagagacacttttagaaaagttgtagaccactttggaagactggacattttggtcaataatgctggagtgaataatgagaaaaactgggaaaaaactctgcaaattaatttggtttctgttatcagtggaacctatcttggtttggattacatgagtaagcaaaatggaggtgaaggcggcatcattatcaatatgtcatctttagcaggactcatgcccgttgcacagcagccggtttattgtgcttcaaagcatggcatagttggattcacacgctcagcagcggtgaggctacaacaaccgtcatatctcattttctctttgtacacatttataaaacatgaattctgtagagaggaatcacttgagaaatcacttggatgaaaggtggaaaaatgacatacctccatctcaattataaaaagttatcagatcacataaagaaccaaataaataatagatcatttttaaa

SEQ ID NO: 4159 - protein, 198 aa, Homo sapiens
MHVNGKVALVTGAAQGIGRAFAEALLLKGAKVALVDWNLEAGVQCKAALDEQFEPQKTLFIQCDVADQQQLRDTFRKVVDHFGRLDILVNNAGVNNEKNWEKTLQINLVSVISGTYLGLDYMSKQNGGEGGIIINMSSLAGLMPVAQQPVYCASKHGIVGFTRSAAVRLQQPSYLIFSLYTFIKHEFCREESLEKSLG

SEQ ID NO: 4160 - DNA, 2233 bp, Homo sapiens
gcctctgctccgctctccttctatccagttggtctttagggcactgaaggaaactcttcttcagaaataaccttttaacttttcttctgtcagctgcctgccaatcacggagccagaggctgaggggaggctttgagccggtctgcgagtccggaaggcaaagatcgcgaagcttggcgctccagaacgctcagggggcaggtgacacagtcgtgggttccccggcgggcgctggcttgacagtttcctccccgcccactggcaggggagcgccccgccgggctgcacgcgcgcgcgcgcaggggggcataaaagccgcggccgcgcggagacgcggagctcgcccaccgcccgccccagcagtggctgcaccatgcacgtgaacggcaaagtggcgctggtgaccggcgcggctcagggcataggcagagcctttgcagaggcgctgctgcttaagggcgccaaggtagcgctggtggattggaatcttgaagcaggtgtacagtgtaaagctgccctggatgagcagtttgaacctcagaagactctgttcatccagtgcgatgtggctgaccagcaacaactgagagacacttttagaaaagttgtagaccactttggaagactggacattttggtcaataatgctggagtgaataatgagaaaaactgggaaaaaactctgcaaattaatttggtttctgttatcagtggaacctatcttggtttggattacatgagtaagcaaaatggaggtgaaggcggcatcattatcaatatgtcatctttagcaggtatctcttctgtatgcagacatttgaaaacctggctggcagaagttctgccgtcttcagcagggagctcccagggttactttagaactgctggattcctttttctctagcagaaagagaagaagaacatggaggaggcatggctactcttttaagaaccccagcccagtaatggcagaccttctgctcacatttcagtatagaacttgagctcatgtttcacctaactgtaagcgagtctgtctgggaaatgcagtctagctgtgtgcctaagagaagaatggatttcagagggcagctaatcatcttttccacagcatgcaatcctaaactatagtattttcagagtagtatgatttagtatcagctgatatcttatccttcaatactagccttaaacctctgactggactttttggagcaactgagtcaagtgactttactttttaaaactctaggaaaaaatcatcaatgattcttgaatagttcaagtgaaattgtgaagtttaagaagtctgatcaacatggacagcaaatctaagctatcttgtccaaaaaagtgagactttaaaaaattatctgtttggttttagttaatgtggtgatttcagaatagaaatttcagccccacaccccaccccaaccttggcatctcagctccagtgatttgggaagttgggtttggaggtacctgtgattgaacctctgtctgattctcagcatttgtctcatccctctaggaatgattatcaaatggttcttttatatcactgtaaagctgccaccagaggagatttagaaatctcctttagaagttctcaaaaatagactagcatctcattttctgggtcgcttaaagtcaaaatcatgtccctaaagctattacaaacctatttctataaatttttcagggtaatcagattctttttcctagtggtacaactacttataaattataacattttaatcctaatgatactttaaaaggtgagcgcacgggcaatatttgaaaggggtatgtgttccagagagggccaaatgttaagctgtgggagactgaaaccctaaaagcaaattggcaaagctaaatctatactattttgaaataaaatcataagaaaaaaacaagtgactggagaattaaaaagagatatttagtattttcttaaaagtttaaatatttaaaaacctggggctgtgatcaagattgataattctctgtattctttcataaagctaagagggtcagcaaagcttggagtaccatgaatattctacaaggagcccctggcctttatgtcactggaggcactgatttcattctttggaaggctgaaagcctcagagttggatcaatttaggacgatctgggagaaattctttaccataagagggtgcttccttgccccaaagagcatgaataaagaaatgcaatgtag

SEQ ID NO: 4161 - protein, 176 aa, Homo sapiens
MHVNGKVALVTGAAQGIGRAFAEALLLKGAKVALVDWNLEAGVQCKAALDEQFEPQKTLFIQCDVADQQQLRDTFRKVVDHFGRLDILVNNAGVNNEKNWEKTLQINLVSVISGTYLGLDYMSKQNGGEGGIIINMSSLAGISSVCRHLKTWLAEVLPSSAGSSQGYFRTAGFLFL

SEQ ID NO: 4162 - DNA, 2202 bp, Homo sapiens
ggtcacctgcaagtcccagctcgctccacctacagaaagagaagccatctcagtatgatctttatgaacatagccgacctttaatgacttctgagaggaatggagtttccttgatgagcctgagagctgtgccccgtgatgcagagaactttgcctatataacctcgccaggttgttggtgtggagcaaagggaaagcagacaccctcagtgaagtgtttcagtagaaagtgtcacagctaggtccattcatccagaaggctcatccctgtgagatgtgtgttctggtcttaagggacattttgtatctggctgagcaacaaggaacgctatctgggcagaaatagtacacttgtgaggcatgtgggaaacaattctggtttagtgcaaacatgcaccagcaccagaaggaacacaatggaatagagacgtggacaatgctttctctgtgaaaggctgcagattttaagtgtcaggaaggcctttcgcctgtgggaaagttgggaaggattttcctggcaactgtaccttctccaacataggccactcacaactggattgaagccacacatcagcaccaaatgtggggaggcctttcacagcagaaaaagtcattacaagtgcagtgaaccaggaaagctttcaggtacaaatacaaacttgttcaacatcagggaattcacaatggagaaaaggccttaggagtgtggcaaatgtgggaaattatttagccaaaactccaatctcatttgtcactggataattcacgctggagaaagacttatgagtgtggtgaatgtggagaatttctttagccaaagctctgtcttcattgaacactagagaattcacactagagctaggcctcatgtgtatggtgaatataggatgtcctttagccagagctccatccttagttaatcacagagcgttcacactggagcaaagccctgtgaatttggtaaatatgggaaatcccttcaacagaaagccctggactcaatcaacactggagagtgcatgctggagaaaggcttccatattcactataacaactcaggaggaaagcctctgtgaatgtaaaggaggcatcgaactccatacatctgaacatccacagtggagaggttccccacaaattccagagacagagtctcattacattgcccatgcctggtctctaactccaagcctcaaggccatcctctcacctcagccttccaaagcactgagattacaagcatgagccgctgcacccggcgaataccacatttttggaagaaaagcttactttataataaggaatctgagacccagagttgaagcaaattgcccaaggttacacagctggtcagtagcagacacaagatccaaacccggtttgtctgaatccagtgctgacgtccttgtgcctcacctatccgccaccgccaaactgcttcctgttcttccagttgtcactatccttgactcattgcactttgacctcaatcaatcttcttatcttttcttaaaagaaaaacatgtttgctgtctaatcttttcaactattatccagtccatttctctttccatgtaaccttggtcttcagtccatgacaatatctatcttctcacagatcatttcagctgttcagtttttgtgccttctaaatttactcacactaaatattgtcctgaaaaattcaaaatatttctccatcctttattccctggtgctcacctgagtattttgcattattaactacttctttcttcttgaaagtatttctcccacaagagctgcaaacctgtgttctcccagcatgttgccattttaccccagcagttccttttctgtcttttttgccagttccttcatcagaaacttctatgttctgtgcatgccattagaggagctgaagttttgtttggttccttgttttctttttgtcttctactattattccctttcaatatgacccctcaatttactcttcatattacaattttaattatcatcctagagtacaaatatctattttcctgttttaatttctcaagattttgtcaagacctaatttcaaattaatgttaaagacatttgcttagcggcttaccaacaacgcgacaagacacattttacacagtctcctcatacactccttccctgctgagccagccacctttcccagtaaagaaggtaaagaagatataaaaatga

SEQ ID NO: 4163 - protein, 149 aa, Homo sapiens
MWRISLAKALSSLNTREFTLELGLMCMVNIGCPLARAPSLVNHRAFTLEQSPVNLVNMGNPFNRKPWTQSTLESACWRKASIFTITTQEESLCECKGGIELHTSEHPQWRGSPQIPETESHYIAHAWSLTPSLKAILSPQPSKALRLQA

SEQ ID NO: 4164 - DNA, 446 bp, Homo sapiens
gatacttttagaaggagtaataattattaatcccaacaaatgacattcttcagtgtctaagcattttcttttgtgattaaagagctgccgtgaacaaacctggaggagaacgtgatgggtaccagagaccagaaatttacacatggctatgttttcaaaggacaggtcaagatgttccagctacttgggaagctgagacaggatatctgcttgagcccaggagttcgtggctgcagagagctgtgatcacaccaccgcactccagccagggcaacagagtgagaccctgactccaaaagcaaaaacaaaagagcaaaaacgagattccaatgtatactcccaccaattaatttgaaggtgaccatatccctcctatcaaatactgtcactcatttacatctttgccaaatgtgggtaagaaaagaaataaatagtttttttattta

SEQ ID NO: 4165 - protein, 43 aa, Homo sapiens
MGTRDQKFTHGYVFKGQVKMFQLLGKLRQDICLSPGVRGCREL

SEQ ID NO: 4166 - DNA, 852 bp, Homo sapiens
agttccagctacttgggaagctgagacaggatatctgcttgagcccaggagttcgtggctgcagagagctgtgatcacaccaccgcactccagccagggcaacagagtgagaccctgactccaaaagcaaaaacaaaagagcaaaaacgagattccaatgtatactcccaccaattaatttgaaggtgaccatatccctcctatcaaatactgtcactcatttacatctttgccaaatgtgggaaaacataaagtttggcaaccctatattgactccaccatgccttgggaaaggcagcccgcatcagtggcaggaaatattggtggagcgagctgggacttgcaggtgaccaagaagggggatcccggaaccggaattgtctcccttggcgttccggaagtagaagcagagtcattgctgggtggcgccagccctcagacttgcctctttgcagtaggaagaaggcctccccacataccttcccacactcatcaccttaagccagactcggtgtccagtgaatatgaccatctcttgcccattttctaatgagtgttttcattaatgagttataagaatgtggtgggtaaatctatgggctttgaactagtgaatcaacttggtttcagaatctggcactgctacttactagtgaatttaagcaagttatttcacctttcagagtgtcagttccctcatgcatacaaggaagataaaaaataatgtatacaaaagtattggagtaattaatacatggagaactacatgtaaagcgtttagcatgatgtctgacatattaagcatccaatattagttgcttgcagaattattagtaaaagagattgcttctg

SEQ ID NO: 4167 - protein, 89 aa, Homo sapiens
MPWERQPASVAGNIGGASWDLQVTKKGDPGTGIVSLGVPEVEAESLLGGASPQTCLFAVGRRPPHIPSHTHHLKPDSVSSEYDHLLPIF

SEQ ID NO: 4168 - DNA, 1033 bp, Homo sapiens
gtgcgtggaaatggccggctcaagcagccgagacagagcagagtgtgagagagctaatggaagtaagctgctgaagaaaccgtattcacctgcctatggcccgtgagtgttcttgaagctatctggcgttcatccacccactcccctcggacctcagcatgggctggaacctcaccctagacctaacagatgctctcatgagcactcttcaaactcagaaatttcccttacgtcatcacgagccgaagatttctaattaaattcctcccgagttcattctgcttcctgccacactgtgaaaaaggtgcctttcttctggtttgccttctaccatgactgcaagtttcctgaggcctccccagccatgcagaactaacatttggataccacttacctctgagacagttcttttggaaattataaatatatttctttccggggatcaaaagaatccacatcaacatgaaagatgaagtgttgaatctgaattcacagctgctttatgcaatctggaaaaaggtcaagctggagtgcagtggcccaatcctggctcactgcaacctctgcctcctgggctcaaggcatccttccacctcagcctcccaagtagctgggactacaggagagaagacaatgaggtcagctagaatgatggattgtcatcactggggcacgggaaaggggttgagcaagtcaatgtatgttttccagagcctacagaatgtgtctgattctctgaagtatattttttctaaatgccagattcaagcattaagcactgtgcagttttgagagaagaagttataaagcaaaactgacttgagtaaccaccagcccaacattcgggactttgtggggattgctatggctctgccggacttacaagcaatagtgatgcagaacctgtcattagcatgtgtaatgcttgtcaaaaaataatctcccaagaaatgttttaattttcactggtcagtgcactaccaatactagttttggcatggcggataataaataacaaacctttgtttcgaat

SEQ ID NO: 4169 - protein, 109 aa, Homo sapiens
MKDEVLNLNSQLLYAIWKKVKLECSGPILAHCNLCLLGSRHPSTSASQVAGTTGEKTMRSARMMDCHHWGTGKGLSKSMYVFQSLQNVSDSLKYIFSKCQIQALSTVQF

SEQ ID NO: 4170 - DNA, 485 bp, Homo sapiens
cagaaagcagaggggaggaagctccaccgtcatgagaatgggaagcagaggcagcggcagcgtgcacagacatcctttgaaggtttgttataaacacagaaactgatgtctgggaaaagacaacacagcggaacatatccaagggacaacagtttacctgcctcccagaaggatgctgagtagccatgtcaactctctcaaccaacaacagtcaatgtagctcaaagtgcagggtggatgtgagatgagacatttgagagagagtgagcaaaccctgctggaataaagataacctggcctcatattaacatcaaatgtctagaattccaaaaacagaagatcacacaaactatgctaactccgagtggaatttcaagacattaatgtaagagagggtgaccaaaccatgctggagtaaagataacctgtccagtattatcccaacggactgcttgacaaatcatgatttgccaaacttaattcag

SEQ ID NO: 4171 - protein, 32 aa, Homo sapiens
RFVINTETDVWEKTTQRNISKGQQFTCLPEGC

SEQ ID NO: 4172 - DNA, 1148 bp, Homo sapiens
aaacatttgagaaagccagaaagcagaggggaggaagctccaccgtcatgagaatgggaagcagaggcagcggcagcgtgcacagacatcctttgaaggtttgttataaacacagaaactgatgtctgggaaaagggccagttgggttatccttcttgtttcattgtttgtcctgcttaaaattgagaatgaacagagactcactgatttcatcttctgaatttgaaaagaatgacacacattgccctgcaattcaggtctgacttcagctgcaggaagacagacccccaacccagaacaaccctgcgtggggaatccttcgggaaaaggctaagcaaaatacaacactggaatttggggaggggcttggagagtttgtttttaaaagtcttgagcaataaatcatctaaccacaagagtaagaaaattagttttcaactttaatttctttggtctttcagttttaacaggcacacctttaacattcattttcgacccactgaagaggagatgagcttattggctggtgcaccttgacagcatgtaggtggaaaacaggacattcagtctttggtgcagagtgggagatacttatgaaccattttagcacatttcaggaccatgtaacaaaatcaacactgcattgaagtggcatcaggaagatccatccacagaagcaatgtctgctatgcaggaagcagcttcatcaaggtggaagcaggtctgtgcttccaggctggccagtatcgttcatgaaaacagcacattgtggctgactatggtttgaagaaacaaaggaagccaaagaaaacaaaaaatgctaacggagaatttaatccatctctcagaggtggaagaagtttcatttgaattgctccctgttcttttactcttctttcccccgaaagggagtgtggtagattgagtttagaagacagccctgaacatgtatggttcagcccttttgctccattttgtcttggagaagggctggattctgtgctattctcctgtgctttaagttttgtagctacgggatttatctaacacagcctgactggtttggaaagtctgtcttattttgatgttttctgttacctagcccgctaacatttttttcaagaaatatagctagtattgtctccctc

SEQ ID NO: 4173 - protein, 32 aa, Homo sapiens
MSGKRASWVILLVSLFVLLKIENEQRLTDFIF

SEQ ID NO: 4174 - DNA, 758 bp, Homo sapiens
ggagaaaaagaggaggaatggcaaaggctgattgactttgtcagctacttactttaaaaaacatttgagaaagccagaaagcagaggggaggaagctccaccgtcatgagaatgggaagcagaggcagcggcagcgtgcacagacatcctttgaaggtttgttataaacacagaaactgatgtctgggaaaaggctggagtgcaatggcgcgatctcggctcaccgcaacctccgccacccaggttcaagcagttctcctgcctttgtctcccgagtagctgggattacaggcatgcaccaccacgcccggctaattttgtatttttagtagagacagggtttctccatgttaaggctgttttcgaactcctgacctcaggtgatccgcccgcctcggcctcccaaagtgctgggattacaagcgtgagccactgtgcccagcccaagctgtacttttatttaagtataatttagttagatatgtgaactcactgaaaatgtatacacaattttctgtgtatgtataaaatttgatatttaaatgtatttatggcaagagtatctgtaacttttatgaacatatcaagtggacatgatcacaaaacatgcaatttattaccatagagcttcagaaataccccttccaaaaagtatgtataatgatatgatacttacaatggaggcaactatgatatttaactgtcagtaaactgaaagaaaaaaatgactcaaaaagtttgtaaagatgatacctttc

SEQ ID NO: 4175 - protein, 49 aa, Homo sapiens
MSGKRLECNGAISAHRNLRHPGSSSSPAFVSRVAGITGMHHHARLILYF

SEQ ID NO: 4176 - DNA, 552 bp, Homo sapiens
agtgcactgttttcactcacccgcctctccctccggctcttgagctgaacgagggcagggactgtgtcgtgtttgctgttgtattctcggtaccctctaaggtgcctggggcatggtaggagaccgataaatattggacaaataaattaacaaatgagtggggtgcggtggctcactcctgcaatcccagcactgtgggaggccaagaccaaggtttgctgcaggtaactgaaaccatggagagcaaaactgtccataggggtaatccattgcattttcagaaacattcctaggtggttgaggagggtgacttacgacttcctctcaaagatatctaaaccaagacgtcttcaactttagcctgcatatgcatcacctggaaatcgaggtgtagggtgggccctgagtttgcctttctaaggagagatgctaacaagatctggaccatcagccactcaagacctttaacatgtttcatacctgtcgacaccctgatacaccttggcctctgaaatactttacaagctttgctaaagaacacgttcataatgt

SEQ ID NO: 4177 - protein, 43 aa, Homo sapiens
LKPWRAKLSIGVIHCIFRNIPRWLRRVTYDFLSKISKPRRLQL

SEQ ID NO: 4178 - DNA, 491 bp, Homo sapiens
cctctccctccggctcttgagctgaacgagggcagggactgtgtcgtgtttgctgttgtattctcggtaccctctaaggtgcctggggcatggtaggagaccgataaatattggacaaataaattaacaaatgagtggggtgcggtggctcactcctgcaatcccagcactgtgggaggccaaggaaacattcctaggtggttgaggagggtgacttacgacttcctctcaaagatatctaaaccaagacgtcttcaactttagcctgcatatgcatcacctggaaatcgaggtgtagggtgggccctgagtttgcctttctaaggagagatgctaacaagatctggaccatcagccactcaagacctttaacatgtttcatacctgtcgacaccctgatacaccttggcctctgaaatactttacaagctttgctaaagaacacgttcataatgtaccagttctttagcactgattcccttagggaaatc

SEQ ID NO: 4179 - protein, 31 aa, Homo sapiens
MFHTCRHPDTPWPLKYFTSFAKEHVHNVPVL

SEQ ID NO: 4180 - DNA, 545 bp, Homo sapiens
gatgaggtgctacaggtggtccaggtcactgggccatgacagtgttgatggttgaacgtcaggagccaatgatgttgatagttggggatcctggatagttgaaagattttttgctgaaaacttttggaagaacattgtaatcagaagttgtccctaactcttcaaagctttgctgcagacgttctaatcctttgaccaaggtttgctgcaggtaactgaaaccatggagagcaaaactgtccataggggtaatccattgcattttcagaaacattcctaggtggttgaggagggtgacttacgacttcctctcaaagatatctaaaccaagacgtcttcaactttagcctgcatatgcatcacctggaaatcgaggtgtagggtgggccctgagtttgcctttctaaggagagatgctaacaagatctggaccatcagccactcaagacctttaacatgtttcatacctgtcgacaccctgatacaccttggcctctgaaatactttacaagctttgctaaagaacacgttcataatgtaccagt

SEQ ID NO: 4181 - protein, 43 aa, Homo sapiens; identical to SEQ ID NO: 4177

SEQ ID NO: 4182 - DNA, 2305 bp, Homo sapiens
atatttttcagattaagcaaaatacaatttattccactgaatagaaaacgttgccttccatatctgtctttgaatttgtagtcgttccgattataatttgagttctcaaacatttgaattacacagtctcttggttcactccgacaggtgtttaaacaggtgtgcgtaggtctttctacttcagctctcagagccggtcttgtttgcaggttagtgggtggcgcacctcgcggttgctcccaccccacccttagtaacagggtttgagtaggaccctggggtgggggagtggatgctgctgtttcaagctcgttcgcccaaatacatctttctacccaccttccctatcgtcagagaggtggcctgaccccagcacgtgcaagcttgtcaggctggaagaggactgtcagaaggacgtagaaggcacggttttactgtgaggagcaaagattctttacctacgcattttacaagaaatgtgcagaaagccattgataaatatacctgcaaatccttgtcatccttttcctccagcggaagccatacacccacgggagcccacacctcttggtctgggtcggccacacagagctctaccaccggctcatccacggagaggggctccgtttattcctggagagatgacgaatttgacgaagccagttcacagtcagtgcagcggttactctgggaggtggaggaaatgttatttgaagggaaagtgaaccctcagacccagagtctgctggccgaatgcggggagtggacaagaagatccctccatttgagagtattaggaagacagctgatcctgcccactgacaaaggcgtccagcatttccagggcagcactcctgcctccgcagtccacagacccccgctcagtgcctgcggacacagcagcaacatcagagagttgtgcatttctggctctcaaatagtcccagcagcactctcagcctctgccctgccaggccctgatgacacaggggttgctgacctaacggcacgttcatccctggaagaagaggtttaccatgtggatggaaagattgaggagtatttcgcttttgacagaaaagaggatgatgatgaatgtcttgaacaaaaaccagctcagcccggtaggaaatggcgcaaactcggacttcctcctgtttccccgcgtgactgtgtcaaagatgccgtggcagcagaagtgtttgatcacgtctggacaaatatggtagaacttttggaagagctgattagaaaacactgggaaactacactcacagaagggaaaaaacagagagaaacattgaaagtggctggaaacagatttccgcacgtcctcgttccacacgctcacgccgatggagccagtggccccccgtccggacacgccgaggctcacggcatctccctggcttctcgtctgaacccgccccagattcatcacttctccagcagtttttatagtgacatgaatggtgtcatgacaattcaagcaaaaccgcttcagcggagacctgcctattttgctgacagaacgcagaatgagaaggaggacaaagcatcgggtggaggggcaggtgctctctcctccgcaccgcacagactgggacgggcctcagacactcatggattatcaccttctgcaaagaaaacaccagtgccctggaggctgccttctcttgcttcagattcacagagactaaaaactcccaacatctatagtgacgaagttcttcggggaacaaaactgccgactggcgtggaccacatggcttccccactggttcaaacgtcacggagcaggttccccccgctagtcacggagaccagggggcagaatacagcagttcctggatgccgccttgtttcttacagaggaaggcatctacaaaaccgtgtgttgagtgccatgcctgacggtacagaacgatcgcgtcttcgagaaagaacagccaccctggaacggttgtcaaggcccagcacaacccacacgttccggcagtcggatacgcctcgaaaaagttcattgacacaaatggaatttgctgctcacacatggacaggtcaaagtattttgacaggttcacaatatgtgcctaaatcttttcagaggacaactttgactttcaagaggagattccaagtgacatcttgaaaccacctcaccagaaccattggagcacctgtggcctcggcacactgcttatcacttgaaaaatggaggaacaagtgttatatttatctgtgtgtctgacagtgtgagatgttagaccgagagaaaagcaaacaaataaatcacttaatcttg

SEQ ID NO: 4183 - protein, 482 aa, Homo sapiens; identical to SEQ ID NO: 493

SEQ ID NO: 4184 - DNA, 2827 bp, Homo sapiens
atatttttcagattaagcaaaatacaatttattccactgaatagaaaacgttgccttccatatctgtctttgaatttgtagtcgttccgattataatttgagttctcaaacatttgaattacacagtctcttggttcactccgacaggtgtttaaacaggtgtgcgtaggtctttctacttcagctctcagagccggtcttgtttgcaggttagtgggtggcgcacctcgcggttgctcccaccccacccttagtaacagggtttgagtaggaccctggggtgggggagtggatgctgctgtttcaagctcgttcgcccaaatacatctttctacccaccttccctatcgtcagagaggtggcctgaccccagcacgtgcaagcttgtcaggctggaagaggactgtcagaaggacgtagaaggcacggttttactgtgaggagcaaagattctttacctacgcattttacaagaaatgtgcagaaagccattgataaatatacctgcaaatccttgtcatccttttcctccagcggaagccatacacccacgggagcccacacctcttggtctgggtcggccacacagagctctaccaccggctcatccacggagaggggctccgtttattcctggagagatgacgaatttgacgaagccagttcacagtcagtgcagcggttactctgggaggtggaggaaatgttatttgaagggaaagtgaaccctcagacccagagtctgctggccgaatgcggggagtggacaagaagatccctccatttgagagtattaggaagacagctgatcctgcccactgacaaaggcgtccagcatttccagggcagcactcctgcctccgcagtccacagacccccgctcagtgcctgcggacacagcagcaacatcagagagttgtgcatttctggctctcaaatagtcccagcagcactctcagcctctgccctgccaggccctgatgacacaggggttgctgacctaacggcacgttcatccctggaagaagaggtttaccatgtggatggaaagattgaggagtatttcgcttttgacagaaaagaggatgatgatgaatgtcttgaacaaaaaccagctcagcccggtaggaaatggcgcaaactcggacttcctcctgtttccccgcgtgactgtgtcaaagatgccgtggcagcagaagtgtttgatcacgtctggacaaatatggtagaacttttggaagagctgattagaaaacactgggaaactacactcacagaagggaaaaaacagagagaaacattgaaagtggctggaaacagatttccgcacgtcctcgttccacacgctcacgccgatggagccagtggccccccgtccggacacgccgaggctcacggcatctccctggcttctcgtctgaacccgccccagattcatcacttctccagcagtttttatagtgacatgaatggtgtcatgacaattcaagcaaaaccgcttcagcggagacctgcctattttgctgacagaacgcagaatgagaaggaggacaaagcatcgggtggaggggcaggtgctctctcctccgcaccgcacagactgggacgggcctcagacactcatggattatcaccttctgcaaagaaaacaccagtgccctggaggctgccttctcttgcttcagattcacagagactaaaaactcccaacatctatagtgacgaagttcttcggggaacaaaactgccgactggcgtggaccacatggcttccccactggttcaaacgtcacggagcaggttccccccgctagtcacggagaccagggggcagaatacagcagttcctggatgccgccttgtttcttacagaggaaggcatctacaaaaccgtgtgttgagtgccatgcctgacggtacagaacgatcgcgtcttcgagaaagaacagccaccctggaacggttgtcaaggcccagcacaacccacacgttccggcagtcggatacgcctcgaaaaagttcattgacacaaatggaatttgctgctcacacatggacaggtcaaagtattttgacaggttcacaatatgtgcctaaatcttttcagaggacaactttgactttcaagaggagattccaagtgacatcttgaaaccacctcaccagaaccattggagcacctgtggcctcggcacactgcttatcacttgaaaaatggaggaacaagtgttatatttatctgtgtgtctgacagtgtgagatgttagaccgagagaaaagcaaacaaataaatcacttaatcttgaacactttgcactgtaaagagagtgaaagtcaaacccaccaagctgccttgctgaaagcatctccaaggttctgtaggctttgttcagaagcccctgatgtgtgtttgcagtccgtcattttatcaatgatacgcaaacataattagcatgtgtatgtactcacacactaattacatgtaagaatatattatctaggaatatgtcatttgtaactttgtactctgacgtattttctagtctcaccctattagtaattctgtcaaaatcctagacgctagtagatattagtatttgagacaatatgtcagagtctgaataagactcagcttgttctagtcatgctgagtttctcatatattttttaaaagtgcttccgccatgaacctctttgagaaatgtcagtggcaaaatctcccaagctaattttctttttctatgttccatcttcaaattcagacagttcacgtgaagtaccccacatttattgatcttagggttgaatataaacgcaattaaaagct

SEQ ID NO: 4185 - protein, 482 aa, Homo sapiens; identical to SEQ ID NO: 493

SEQ ID NO: 4186 - DNA, 2181 bp, Homo sapiens
gcggaggatctggagagggaaggggcgtgcgagccccgcggaccccgggcgcgcccgggccgcctgagctgggccagccgcgcggcgggcgcgggcgcgggcgcgggcgcgggcgcgggcgggtggggagccccagccccggggccgcgggggcgcgtgaccggctgtctgcgtggggcccgcgcgcggtgcctctgcctgacggtgcccgagcctagcgcggagcctggcgcgggggctgcgagcacaggcccggggctgatcgtaatcggaagaggactgtcagaaggacgtagaaggcacggttttactgtgaggagcaaagattctttacctacgcattttacaagaaatgtgcagaaagccattgataaatatacctgcaaatccttgtcatccttttcctccagcggaagccatacacccacgggagcccacacctcttggtctgggtcggccacacagagctctaccaccggctcatccacggagaggggctccgtttattcctggagagatgacgaatttgacgaagccagttcacagtcagtgcagcggttactctgggaggtggaggaaatgttatttgaagggaaagtgaaccctcagacccagagtctgctggccgaatgcggggagtggacaagaagatccctccatttgagagtattaggaagacagctgatcctgcccactgacaaaggcgtccagcatttccagggcagcactcctgcctccgcagtccacagacccccgctcagtgcctgcggacacagcagcaacatcagagagttgtgcatttctggctctcaaatagtcccagcagcactctcagcctctgccctgccaggccctgatgacacaggggttgctgacctaacggcacgttcatccctggaagaagaggtttaccatgtggatggaaagattgaggagtatttcgcttttgacagaaaagaggatgatgatgaatgtcttgaacaaaaaccagctcagcccggtaggaaatggcgcaaactcggacttcctcctgtttccccgcgtgactgtgtcaaagatgccgtggcagcagaagtgtttgatcacgtctggacaaatatggtagaacttttggaagagctgattagaaaacactgggaaactacactcacagaagggaaaaaacagagagaaacattgaaagtggctggaaacagatttccgcacgtcctcgttccacacgctcacgccgatggagccagtggccccccgtccggacacgccgaggctcacggcatctccctggcttctcgtctgaacccgccccagattcatcacttctccagcagtttttatagtgacatgaatggtgtcatgacaattcaagcaaaaccgcttcagcggagacctgcctattttgctgacagaacgcagaatgagaaggaggacaaagcatcgggtggaggggcaggtgctctctcctccgcaccgcacagactgggacgggcctcagacactcatggattatcaccttctgcaaagaaaacaccagtgccctggaggctgccttctcttgcttcagattcacagagactaaaaactcccaacatctatagtgacgaagttcttcggggaacaaaactgccgactggcgtggaccacatggcttccccactggttcaaacgtcacggagcaggttccccccgctagtcacggagaccagggggcagaatacagcagttcctggatgccgccttgtttcttacagaggaaggcatctacaaaaccgtgtgttgagtgccatgcctgacggtacagaacgatcgcgtcttcgagaaagaacagccaccctggaacggttgtcaaggcccagcacaacccacacgttccggcagtcggatacgcctcgaaaaagttcattgacacaaatggaatttgctgctcacacatggacaggtcaaagtattttgacaggttcacaatatgtgcctaaatcttttcagaggacaactttgactttcaagaggagattccaagtgacatcttgaaaccacctcaccagaaccattggagcacctgtggcctcggcacactgcttatcacttgaaaaatggaggaacaagtgttatatttatctgtgtgtctgacagtgtgagatgttagaccgagagaaaagcaaacaaataaatcacttaatcttg

SEQ ID NO: 4187 - protein, 482 aa, Homo sapiens; identical to SEQ ID NO: 493

SEQ ID NO: 4188 - DNA, 2703 bp, Homo sapiens
gcggaggatctggagagggaaggggcgtgcgagccccgcggaccccgggcgcgcccgggccgcctgagctgggccagccgcgcggcgggcgcgggcgcgggcgcgggcgcgggcgcgggcgggtggggagccccagccccggggccgcgggggcgcgtgaccggctgtctgcgtggggcccgcgcgcggtgcctctgcctgacggtgcccgagcctagcgcggagcctggcgcgggggctgcgagcacaggcccggggctgatcgtaatcggaagaggactgtcagaaggacgtagaaggcacggttttactgtgaggagcaaagattctttacctacgcattttacaagaaatgtgcagaaagccattgataaatatacctgcaaatccttgtcatccttttcctccagcggaagccatacacccacgggagcccacacctcttggtctgggtcggccacacagagctctaccaccggctcatccacggagaggggctccgtttattcctggagagatgacgaatttgacgaagccagttcacagtcagtgcagcggttactctgggaggtggaggaaatgttatttgaagggaaagtgaaccctcagacccagagtctgctggccgaatgcggggagtggacaagaagatccctccatttgagagtattaggaagacagctgatcctgcccactgacaaaggcgtccagcatttccagggcagcactcctgcctccgcagtccacagacccccgctcagtgcctgcggacacagcagcaacatcagagagttgtgcatttctggctctcaaatagtcccagcagcactctcagcctctgccctgccaggccctgatgacacaggggttgctgacctaacggcacgttcatccctggaagaagaggtttaccatgtggatggaaagattgaggagtatttcgcttttgacagaaaagaggatgatgatgaatgtcttgaacaaaaaccagctcagcccggtaggaaatggcgcaaactcggacttcctcctgtttccccgcgtgactgtgtcaaagatgccgtggcagcagaagtgtttgatcacgtctggacaaatatggtagaacttttggaagagctgattagaaaacactgggaaactacactcacagaagggaaaaaacagagagaaacattgaaagtggctggaaacagatttccgcacgtcctcgttccacacgctcacgccgatggagccagtggccccccgtccggacacgccgaggctcacggcatctccctggcttctcgtctgaacccgccccagattcatcacttctccagcagtttttatagtgacatgaatggtgtcatgacaattcaagcaaaaccgcttcagcggagacctgcctattttgctgacagaacgcagaatgagaaggaggacaaagcatcgggtggaggggcaggtgctctctcctccgcaccgcacagactgggacgggcctcagacactcatggattatcaccttctgcaaagaaaacaccagtgccctggaggctgccttctcttgcttcagattcacagagactaaaaactcccaacatctatagtgacgaagttcttcggggaacaaaactgccgactggcgtggaccacatggcttccccactggttcaaacgtcacggagcaggttccccccgctagtcacggagaccagggggcagaatacagcagttcctggatgccgccttgtttcttacagaggaaggcatctacaaaaccgtgtgttgagtgccatgcctgacggtacagaacgatcgcgtcttcgagaaagaacagccaccctggaacggttgtcaaggcccagcacaacccacacgttccggcagtcggatacgcctcgaaaaagttcattgacacaaatggaatttgctgctcacacatggacaggtcaaagtattttgacaggttcacaatatgtgcctaaatcttttcagaggacaactttgactttcaagaggagattccaagtgacatcttgaaaccacctcaccagaaccattggagcacctgtggcctcggcacactgcttatcacttgaaaaatggaggaacaagtgttatatttatctgtgtgtctgacagtgtgagatgttagaccgagagaaaagcaaacaaataaatcacttaatcttgaacactttgcactgtaaagagagtgaaagtcaaacccaccaagctgccttgctgaaagcatctccaaggttctgtaggctttgttcagaagcccctgatgtgtgtttgcagtccgtcattttatcaatgatacgcaaacataattagcatgtgtatgtactcacacactaattacatgtaagaatatattatctaggaatatgtcatttgtaactttgtactctgacgtattttctagtctcaccctattagtaattctgtcaaaatcctagacgctagtagatattagtatttgagacaatatgtcagagtctgaataagactcagcttgttctagtcatgctgagtttctcatatattttttaaaagtgcttccgccatgaacctctttgagaaatgtcagtggcaaaatctcccaagctaattttctttttctatgttccatcttcaaattcagacagttcacgtgaagtaccccacatttattgatcttagggttgaatataaacgcaattaaaagct

SEQ ID NO: 4189 - protein, 482 aa, Homo sapiens; identical to SEQ ID NO: 493

SEQ ID NO: 4190 - DNA, 2020 bp, Homo sapiens
gggcgtgcgagccccgcggaccccgggcgcgcccgggccgcctgagctgggccagccgcgcggcgggcgcgggcgcgggcgcgggcgcgggcgcgggcgggtggggagccccagccccggggccgcgggggcgcgtgaccggctgtctgcgtggggcccgcgcgcggtgcctctgcctgacggtgcccgagcctagcgcggagcctggcgcgggggctgcgagcacaggcccggggctgatcgtaatcggaagaggactgtcagaaggacgtagaaggcacggttttactgtgaggagcaaagattctttacctacgcattttacaagaaatgtgcagaaagccattgataaatatacctggaatttgacgaagccagttcacagtcagtgcagcggttactctgggaggtggaggaaatgttatttgaagggaaagtgaaccctcagacccagagtctgctggccgaatgcggggagtggacaagaagatccctccatttgagagtattaggaagacagctgatcctgcccactgacaaaggcgtccagcatttccagggcagcactcctgcctccgcagtccacagacccccgctcagtgcctgcggacacagcagcaacatcagagagttgtgcatttctggctctcaaatagtcccagcagcactctcagcctctgccctgccaggccctgatgacacaggggttgctgacctaacggcacgttcatccctggaagaagaggtttaccatgtggatggaaagattgaggagtatttcgcttttgacagaaaagaggatgatgatgaatgtcttgaacaaaaaccagctcagcccggtaggaaatggcgcaaactcggacttcctcctgtttccccgcgtgactgtgtcaaagatgccgtggcagcagaagtgtttgatcacgtctggacaaatatggtagaacttttggaagagctgattagaaaacactgggaaactacactcacagaagggaaaaaacagagagaaacattgaaagtggctggaaacagatttccgcacgtcctcgttccacacgctcacgccgatggagccagtggccccccgtccggacacgccgaggctcacggcatctccctggcttctcgtctgaacccgccccagattcatcacttctccagcagtttttatagtgacatgaatggtgtcatgacaattcaagcaaaaccgcttcagcggagacctgcctattttgctgacagaacgcagaatgagaaggaggacaaagcatcgggtggaggggcaggtgctctctcctccgcaccgcacagactgggacgggcctcagacactcatggattatcaccttctgcaaagaaaacaccagtgccctggaggctgccttctcttgcttcagattcacagagactaaaaactcccaacatctatagtgacgaagttcttcggggaacaaaactgccgactggcgtggaccacatggcttccccactggttcaaacgtcacggagcaggttccccccgctagtcacggagaccagggggcagaatacagcagttcctggatgccgccttgtttcttacagaggaaggcatctacaaaaccgtgtgttgagtgccatgcctgacggtacagaacgatcgcgtcttcgagaaagaacagccaccctggaacggttgtcaaggcccagcacaacccacacgttccggcagtcggatacgcctcgaaaaagttcattgacacaaatggaatttgctgctcacacatggacaggtcaaagtattttgacaggttcacaatatgtgcctaaatcttttcagaggacaactttgactttcaagaggagattccaagtgacatcttgaaaccacctcaccagaaccattggagcacctgtggcctcggcacactgcttatcacttgaaaaatggaggaacaagtgttatatttatctgtgtgtctgacagtgtgagatgttagaccgagagaaaagcaaacaaataaatcacttaatcttg

SEQ ID NO: 4191 - protein, 482 aa, Homo sapiens; identical to SEQ ID NO: 493

SEQ ID NO: 4192 - DNA, 2542 bp, Homo sapiens
gggcgtgcgagccccgcggaccccgggcgcgcccgggccgcctgagctgggccagccgcgcggcgggcgcgggcgcgggcgcgggcgcgggcgcgggcgggtggggagccccagccccggggccgcgggggcgcgtgaccggctgtctgcgtggggcccgcgcgcggtgcctctgcctgacggtgcccgagcctagcgcggagcctggcgcgggggctgcgagcacaggcccggggctgatcgtaatcggaagaggactgtcagaaggacgtagaaggcacggttttactgtgaggagcaaagattctttacctacgcattttacaagaaatgtgcagaaagccattgataaatatacctggaatttgacgaagccagttcacagtcagtgcagcggttactctgggaggtggaggaaatgttatttgaagggaaagtgaaccctcagacccagagtctgctggccgaatgcggggagtggacaagaagatccctccatttgagagtattaggaagacagctgatcctgcccactgacaaaggcgtccagcatttccagggcagcactcctgcctccgcagtccacagacccccgctcagtgcctgcggacacagcagcaacatcagagagttgtgcatttctggctctcaaatagtcccagcagcactctcagcctctgccctgccaggccctgatgacacaggggttgctgacctaacggcacgttcatccctggaagaagaggtttaccatgtggatggaaagattgaggagtatttcgcttttgacagaaaagaggatgatgatgaatgtcttgaacaaaaaccagctcagcccggtaggaaatggcgcaaactcggacttcctcctgtttccccgcgtgactgtgtcaaagatgccgtggcagcagaagtgtttgatcacgtctggacaaatatggtagaacttttggaagagctgattagaaaacactgggaaactacactcacagaagggaaaaaacagagagaaacattgaaagtggctggaaacagatttccgcacgtcctcgttccacacgctcacgccgatggagccagtggccccccgtccggacacgccgaggctcacggcatctccctggcttctcgtctgaacccgccccagattcatcacttctccagcagtttttatagtgacatgaatggtgtcatgacaattcaagcaaaaccgcttcagcggagacctgcctattttgctgacagaacgcagaatgagaaggaggacaaagcatcgggtggaggggcaggtgctctctcctccgcaccgcacagactgggacgggcctcagacactcatggattatcaccttctgcaaagaaaacaccagtgccctggaggctgccttctcttgcttcagattcacagagactaaaaactcccaacatctatagtgacgaagttcttcggggaacaaaactgccgactggcgtggaccacatggcttccccactggttcaaacgtcacggagcaggttccccccgctagtcacggagaccagggggcagaatacagcagttcctggatgccgccttgtttcttacagaggaaggcatctacaaaaccgtgtgttgagtgccatgcctgacggtacagaacgatcgcgtcttcgagaaagaacagccaccctggaacggttgtcaaggcccagcacaacccacacgttccggcagtcggatacgcctcgaaaaagttcattgacacaaatggaatttgctgctcacacatggacaggtcaaagtattttgacaggttcacaatatgtgcctaaatcttttcagaggacaactttgactttcaagaggagattccaagtgacatcttgaaaccacctcaccagaaccattggagcacctgtggcctcggcacactgcttatcacttgaaaaatggaggaacaagtgttatatttatctgtgtgtctgacagtgtgagatgttagaccgagagaaaagcaaacaaataaatcacttaatcttgaacactttgcactgtaaagagagtgaaagtcaaacccaccaagctgccttgctgaaagcatctccaaggttctgtaggctttgttcagaagcccctgatgtgtgtttgcagtccgtcattttatcaatgatacgcaaacataattagcatgtgtatgtactcacacactaattacatgtaagaatatattatctaggaatatgtcatttgtaactttgtactctgacgtattttctagtctcaccctattagtaattctgtcaaaatcctagacgctagtagatattagtatttgagacaatatgtcagagtctgaataagactcagcttgttctagtcatgctgagtttctcatatattttttaaaagtgcttccgccatgaacctctttgagaaatgtcagtggcaaaatctcccaagctaattttctttttctatgttccatcttcaaattcagacagttcacgtgaagtaccccacatttattgatcttagggttgaatataaacgcaattaaaagct

SEQ ID NO: 4193 - protein, 482 aa, Homo sapiens; identical to SEQ ID NO: 493

SEQ ID NO: 4194 - DNA, 420 bp, Homo sapiens
tgagaagcctgggaggtttgagttctgtctccatgaccataagtctgcagccacacaattgtgtgatgggttgtgtgatcttcctgacaaggaaccagttgaaggatgctgactgggaagccgtgcacgcgaccggccgtcaggatgtgcccgagaaaattaaaaacattaagtactccatccggacacaaagcgtctccatatgacagagttttgttactgtggggagaggacaaagcaccagccacacccctcattccacagcctttcccaaccctcccctcgagatgaaacactggccatctgcagcgcttcacctctgagctggaaagaagcttgtttcttttgctttgatgaggttctgctggttttggcgggactttgaagtttatttattgtcattaaattgcattaattatt

SEQ ID NO: 4195 - protein, 61 aa, Homo sapiens
MLTGKPCTRPAVRMCPRKLKTLSTPSGHKASPYDRVLLLWGEDKAPATPLIPQPFPTLPSR

SEQ ID NO: 4196 - DNA, 685 bp, Homo sapiens
ggcgccaggggctctgaacaggcagaggcacagggaaagcatgggccaaaacagcaaaacccagccccgcgcagcccacatggcgccccccttccttgcgggcaggggtcccacagtgccccggccttggcgtctttgtggccctgctgcccattcaactcgagctgcaggtcctgcctctgggcctctgcctgccagcccctcccggggtcttggggtctctgctcggggtggggctgaagcaggctggggtctctgctggggggaatgcgatctggcggtggtaagtggttttgttgttgccctggcccataagctttctctgaccccaggcaaaaggctgcgctgtgtggcgcccctggctggccctgggagaaggagctccgataatgagggagatcaagagggccccagatcctggctgggccctggcgtctgttccagctgccttcttcccactctgccccctcatatggaaataatgttggacctcataaaagatccaggttcttgtttcaaattatgaaacaaacattctccttgattaataccatgtcaagccaccagtgaggttttgaattccaacttcaaggggaagttaaaattagttctaaaccattgcatgtaagtttgtaataaattgggggccatattctgctgccaattaaaagtaactgttggatcc

SEQ ID NO: 4197 - protein, 161 aa, Homo sapiens
MGQNSKTQPRAAHMAPPFLAGRGPTVPRPWRLCGPAAHSTRAAGPASGPLPASPSRGLGVSARGGAEAGWGLCWGECDLAVVSGFVVALAHKLSLTPGKRLRCVAPLAGPGRRSSDNEGDQEGPRSWLGPGVCSSCLLPTLPPHMEIMLDLIKDPGSCFKL

SEQ ID NO: 4198 - DNA, 602 bp, Homo sapiens
ggcactttgagggtggggaggatgagacaggaatgtgctgaccgtggtggctgagaggctacaggaggcactctttgaagggaagttaaagacaaagaggaagaggctgtatttcattctcccagatggctcctgccagcctccagagaaaaggcagctttcttctttagaaaattggcaggacaaaagaaggaagtcgacttggaaagtccagcgacagacctcgtgcccctgctctgggaggccgcaggtcaatggctccccctggcttcaggggacacagctcaagcctggaaggagcccatggccagcctgaaagccttgctcacacccagcatccgcagctggggcaagagcggctactcccaagacaggaaaagacacacagcctaactttgccactgtgaagggagacttctctctaatgcctaactagacacttatcttccaacctcctcaaaatgccttcaatagaagtcccaggaagacacggagccccagccgcccactgactcctacaggatgcagctgcgccaggcagcccatcccagggggcccaggccaaagaggggccagggtgcttcccctgagaatgaaaaggg

SEQ ID NO: 4199 - protein, 50 aa, Homo sapiens
MAPPGFRGHSSSLEGAHGQPESLAHTQHPQLGQERLLPRQEKTHSLTLPL

SEQ ID NO: 4200 - DNA, 549 bp, Homo sapiens
gtgctgaccgtggtggctgagaggctacaggaggcactgaggggtgctgggggcttgatgccaccaaggaccccagaccaagtcatcttttttttctcgctcagctttgaagggaagttaaagacaaagaggaagaggctgtatttcattctcccagatggctcctgccagcctccagagaaaaggcagctttcttctttagaaaattggcaggacaaaagaaggaagtcgacttggaaagtccagcgacagacctcgtgcccctgctctgggaggccgcaggtcaatggctccccctggcttcaggggacacagctcaagcctggaaggagcccatggccagcctgaaagccttgctcacacccagcatccgcagctggggcaagagcggctactcccaagacaggaaaagacacacagcctaactttgccactgtgaagggagacttctctctaatgcctaactagacacttatcttccaacctcctcaaaatgccttcaatagaagtcccaggaagacacggagccccagccgcccactgactcct

SEQ ID NO: 4201 - protein, 96 aa, Homo sapiens
MPPRTPDQVIFFFSLSFEGKLKTKRKRLYFILPDGSCQPPEKRQLSSLENWQDKRRKSTWKVQRQTSCPCSGRPQVNGSPWLQGTQLKPGRSPWPA

SEQ ID NO: 4202 - DNA, 774 bp, Homo sapiens
atgctttcccggtgctgcctcagtggtggctgccgcgagatgcccatctacttttcgtggaggcctcgggaccagtgtggggccctgcagggacttccaggttcctcaggcccgtcctgcctcgcctttcgctctgcgtctgcccggggcagcccgagctgggaccttctggcgggagccgcagcttttcagggcaactgtccttgtccctgggggacggccagtgtacgcggggacacttgcggccccagcccactgccggcctggaggaaaggacgcgggggacccccatacgtgaccagcggctgcagcgcagctcgggctcacagcggggcggccggagcagcctggacccccgacgcccgcgccgtccagtccggggactcggaggctgagcccccgcgggcggggcaggggcctggtctccggatggaggaggaggtgcggccgcaggacgcccagcggggagacccggggagacccggccggcgtccgcctccgctcccggcacggccgcccgcgcccgcccttctctgccccagcccgggaccggcagggtcagaagcgggcggcggcgggcgcggggctctgtcctcccggcccctccacctcagcgggcgcagccgtggggtccccaccaacagcgttcgtgggggcagcgcgggccccgtctccccccgtggctattctccccgcgaggccttggcgctcgtgcggccttgggagcaagagcgcccccgcgcgctcctcactcggcttgggacacgctcgtga

SEQ ID NO: 4203 - protein, 257 aa, Homo sapiens
MLSRCCLSGGCREMPIYFSWRPRDQCGALQGLPGSSGPSCLAFRSASARGSPSWDLLAGAAAFQGNCPCPWGTASVRGDTCGPSPLPAWRKGRGGPPYVTSGCSAARAHSGAAGAAWTPDARAVQSGDSEAEPPRAGQGPGLRMEEEVRPQDAQRGDPGRPGRRPPPLPARPPAPALLCPSPGPAGSEAGGGGRGALSSRPLHLSGRSRGVPTNSVRGGSAGPVSPRGYSPREALALVRPWEQERPRALLTRLGTRS

SEQ ID NO: 4204 - DNA, 1629 bp, Homo sapiens
cgcgcgggggcgctcttgctcccaaggccgcacgagcgccaaggcctcgcggggagaatagccacggggggagacggggcccgcgctgcccccacgaacgctgttggtggggaccccacggcgcacctcctcctccatccggagaccaggcccctgccccgcccgcggctgaggagataaggagaggctgatttgaaaagctgcgaggacgcgcattttaacctccagggacggcttgagccccgccctgcctttcgaaagtgctgggaacggattttatcagcaggcgaaactgtcctcaaagctccgtggcccagcaaaaggcagggcggggacgcccatggcccccgggccggccccctacgggctcagcctccgagtccccggactggacggcgcgggcgtcgggggtccaggctgctccggccgccccgctgtgagcccgagctgcgctgcagccgctggtcacgtatgggggtcccccgcgtcctttcctccaggccggcagtgggctggggccgcaagtgtccccgcgtacactggccgtcccccagggacaaggacagttgccctgaaaagctgcggctcccgccagaaggtcccagctcgggctgccccgggcagacgcagagcgaaaggcgaggcaggacgggcctgaggaacctggaagtccctgcagggcccctggaagaggcaggcagggggctgccccacagacgggcccaggagaggacacgccgggctggcatcacgtgaggagagcgtccagcaaaccacactggtcccgaggcctccacgaaaagtagatgggcatctcgcggcagccaccactgaggcagcaccgggaaagcatggtgggtgcccactggccccgcagagggcaaaggcatgcacacgccagaagggaacgtcaaggggagcaaagagaaccccttcctcctggaatggctgaggggaccaggccgctctgtgatgcagacatctcaaggggctctcccttgcactaccccatgtggactttaactcccaatttggaaagtaatgatgtcatcttctgtggtctcagggtcctagtgagtgtgtgaggataatagtgttacatgttatgcaaagggattgtgaactggcatgggggtcaggtttgcagggcctggagctggtgactccagctctagaacaaccccaggccggctctgccctacccaggagagatggtcataggggaaagagtccagtgggcattggaggcgtaggggccacttagggttgccctttgagctgacagtggggtacagattcagctctgcagtgcccctaacccccactgcggatccacccgggggaatgccctgaggacacgcgaggtgagggtcaggcgtgtcctgctgggtgggaactccggaccctctgggaaggaatgggtgaatcggctgctctcactctccagctcccactcagaggagccctgggggatcccattcctctacctcagaggactcccaggacactgtctgagcccagtgggaggaggacacacagccctgatctgccagtcagtggggctgagggtcaagctgtgcgccttgtgtgctggcggcgtcccgcctgggatggatggagatggtctgt

SEQ ID NO: 4205 - protein, 105 aa, Homo sapiens
MAPGPAPYGLSLRVPGLDGAGVGGPGCSGRPAVSPSCAAAAGHVWGSPASFPPGRQWAGAASVPAYTGRPPGTRTVALKSCGSRQKVPARAAPGRRRAKGEAGRA

SEQ ID NO: 4206 - DNA, 554 bp, Homo sapiens
agagggagccgggccgccgtcgctgccgccgctgtccccgcgccctgcgcccgctggcatgagggacccctgggaaaggccccagaagatccttccccctgtggagttgggcgtgttggcgtgggtaggaggcgaggtcccggcccccacgtccccccacaggcactccagtgcgatgtctcggtggaggaggacgaccgccaggagtggacgttcacgctctatgactttgacaactgcgggaaggtcaccagggaggacatgtccagcctcatgcacaccatctatgaggtcgtggatgcctcggtcaaccactcctcgggcagcagcaagaccctccgtgtgaagctaaccgtcagccctgagccctccagcaagaggaaggagggtcctcctgctggccaggaccgggagcccacccgttgcaggatggagggtgaactggcagaggagccaagggtggctgacaggaggttgtctgcacacgtcaggcgtccactctccttcctgctctgcgaggaggtgggtgctggtcaggatgcaccccggacccc

SEQ ID NO: 4207 - protein, 96 aa, Homo sapiens
MSSLMHTIYEVVDASVNHSSGSSKTLRVKLTVSPEPSSKRKEGPPAGQDREPTRCRMEGELAEEPRVADRRLSAHVRRPLSFLLCEEVGAGQDAPR

SEQ ID NO: 4208 - DNA, 2077 bp, Homo sapiens
gccgctgtccccgcgccctgcgcccggtggccccccacctccgccccgcggccgtacctggcgccccctggctcccccggcccccgcgcggcgtggagccatcttccctcacctcctaccggcaccctagcttgctcccggcccatgcggcccccgcgggctcccggccccggcttcagaactcagccctgcacctgagcgcggggcccggcggggcgtggcggcggcgatggggaaactgcagtcgaagcacgccgccgccgcccgcaagcggagagagagcccggaaggggacagcttcgtggcgtccgcgtacgcgagcggccgcaaaggcgcggaggaagcggagcggcgcgcgcgggacaagcaggagctgcccaatggggaccccaaggaggggcctttccgggaggaccagtgtcccctacaggtggcactccccgctgagaaagctgagggccgcgagcacccgggacaactcctcagcgcagatgacggagagagggcagcaaaccgcgagggcccgcgaggaccgggcgggcagcgcctcaacattgacgcactccagtgcgatgtctcggtggaggaggacgaccgccaggagtggacgttcacgctctatgactttgacaactgcgggaaggtcaccagggaggacatgtccagcctcatgcacaccatctatgaggtcgtggatgcctcggtcaaccactcctcgggcagcagcaagaccctccgtgtgaagctaaccgtcagccctgagccctccagcaagaggaaggagggtcctcctgctggccaggaccgggagcccacccgttgcaggatggagggtgaactggcagaggagccaagggtggctgacaggaggttgtctgcacacgtcaggaggcccagtactgacccccagccctgctcggagcgggggccctactgcgtggacgagaacacggagcgcagaaaccactacctggacctcgccgggattgagaactacacgtccagattcggccctgggtctcagctgtgcgagaagagaagctccgctcccaggacacacagtggggacaaggctagaggagtcggcctttgcagggagctgtggagccaggcaggtcacccacagtggccaggccccttcccttcagggctggtggccgtctgactgcagacttggctaacagactggcctcagggtcccctcctgtgcaagcaaagcaggagccccagggcagggcctcgcacctccaggcccggtcccgctcccaggagccagatacacatgccgtacaccaccgcaggtcacaggtgctggtggaacacgtcgtgccagcctcggagcctgctgcccgggccctggacacgcagccccggccgaaggggccggagaagcagttcctcaagtcccccaagggctccgggaagccgcctggggtgccagccagcagcaagtccgggaaagccttcagctactacctgccggccgtcctgccgccccaggcccctcaggacggccaccacctcccgcagcccccaccgccaccctacggccacaagcggtaccgccaaaagggcagggagggccactcgccactcaaggccccacacgctcagcctgccacagtggagcacgaggtggtgcgggacctgccgcccacgccagcaggagagggctacgcggtgccagtgatccagcggcacgagcaccaccaccaccacgagcaccaccaccaccaccaccaccaccacttccacccgtcctagcgccactgccaagcacacctcgctcccagcacaccacagcccgcgacctcagggcagggagcagagcagctgccggctgtgtgcccatggggagcccagcccccaccccccacctccgacagcaaacagcaactgactgcaggtgctggcatgatggaggtggtgcaccttggacacgtggacaaggcccaggcgccctctgctcttctgccctcgatgccacatggcggtgaacacatctgaagccactatgtttcctggctctaaggctcgtctgtgtaacccataaaacctgctttgattccaaaatgag

SEQ ID NO: 4209 - protein, 311 aa, Homo sapiens
MGKLQSKHAAAARKRRESPEGDSFVASAYASGRKGAEEAERRARDKQELPNGDPKEGPFREDQCPLQVALPAEKAEGREHPGQLLSADDGERAANREGPRGPGGQRLNIDALQCDVSVEEDDRQEWTFTLYDFDNCGKVTREDMSSLMHTIYEVVDASVNHSSGSSKTLRVKLTVSPEPSSKRKEGPPAGQDREPTRCRMEGELAEEPRVADRRLSAHVRRPSTDPQPCSERGPYCVDENTERRNHYLDLAGIENYTSRFGPGSQLCEKRSSAPRTHSGDKARGVGLCRELWSQAGHPQWPGPFPSGLVAV

SEQ ID NO: 4210 - DNA, 1898 bp, Homo sapiens
gccgctgtccccgcgccctgcgcccggtggccccccacctccgccccgcggccgtacctggcgccccctggctcccccggcccccgcgcggcgtggagccatcttccctcacctcctaccggcaccctagcttgctcccggcccatgcggcccccgcgggctcccggccccggcttcagaactcagccctgcacctgagcgcggggcccggcggggcgtggcggcggcgatggggaaactgcagtcgaagcacgccgccgccgcccgcaagcggagagagagcccggaaggggacagcttcgtggcgtccgcgtacgcgagcggccgcaaaggcgcggaggaagcggagcggcgcgcgcgggacaagcaggagctgcccaatggggaccccaaggaggggcctttccgggaggaccagtgtcccctacaggtggcactccccgctgagaaagctgagggccgcgagcacccgggacaactcctcagcgcagatgacggagagagggcagcaaaccgcgagggcccgcgaggaccgggcgggcagcgcctcaacattgacgcactccagtgcgatgtctcggtggaggaggacgaccgccaggagtggacgttcacgctctatgactttgacaactgcgggaaggtcaccagggaggacatgtccagcctcatgcacaccatctatgaggtcgtggatgcctcggtcaaccactcctcgggcagcagcaagaccctccgtgtgaagctaaccgtcagccctgagccctccagcaagaggaaggagggtcctcctgctggccaggaccgggagcccacccgttgcaggatggagggtgaactggcagaggagccaagggtggctgacaggaggttgtctgcacacgtcaggaggcccagtactgacccccagccctgctcggagcgggggccctactgcgtggacgagaacacggagcgcagaaaccactacctggacctcgccgggattgagaactacacgtccagattcggccctgggtcccctcctgtgcaagcaaagcaggagccccagggcagggcctcgcacctccaggcccggtcccgctcccaggagccagatacacatgccgtacaccaccgcaggtcacaggtgctggtggaacacgtcgtgccagcctcggagcctgctgcccgggccctggacacgcagccccggccgaaggggccggagaagcagttcctcaagtcccccaagggctccgggaagccgcctggggtgccagccagcagcaagtccgggaaagccttcagctactacctgccggccgtcctgccgccccaggcccctcaggacggccaccacctcccgcagcccccaccgccaccctacggccacaagcggtaccgccaaaagggcagggagggccactcgccactcaaggccccacacgctcagcctgccacagtggagcacgaggtggtgcgggacctgccgcccacgccagcaggagagggctacgcggtgccagtgatccagcggcacgagcaccaccaccaccacgagcaccaccaccaccaccaccaccaccacttccacccgtcctagcgccactgccaagcacacctcgctcccagcacaccacagcccgcgacctcagggcagggagcagagcagctgccggctgtgtgcccatggggagcccagcccccaccccccacctccgacagcaaacagcaactgactgcaggtgctggcatgatggaggtggtgcaccttggacacgtggacaaggcccaggcgccctctgctcttctgccctcgatgccacatggcggtgaacacatctgaagccactatgtttcctggctctaaggctcgtctgtgtaacccataaaacctgctttgattccaaaatgag

SEQ ID NO: 4211 - protein, 451 aa, Homo sapiens; identical to SEQ ID NO: 497

SEQ ID NO: 4212 - DNA, 2155 bp, Homo sapiens
gccgctgtccccgcgccctgcgcccggtggccccccacctccgccccgcggccgtacctggcgccccctggctcccccggcccccgcgcggcgtggagccatcttccctcacctcctaccggcaccctagcttgctcccggcccatgcggcccccgcgggctcccggccccggcttcagaactcagccctgcacctgagcgcggggcccggcggggcgtggcggcggcgatggggaaactgcagtcgaagcacgccgccgccgcccgcaagcggagagagagcccggaaggggacagcttcgtggcgtccgcgtacgcgagcggccgcaaaggcgcggaggaagcggagcggcgcgcgcgggacaagcaggagctgcccaatggggaccccaaggaggggcctttccgggaggaccagtgtcccctacaggtggcactccccgctgagaaagctgagggccgcgagcacccgggacaactcctcagcgcagatgacggagagagggcagcaaaccgcgagggcccgcgaggaccgggcgggcagcgcctcaacattgacgcactccagtgcgatgtctcggtggaggaggacgaccgccaggagtggacgttcacgctctatgactttgacaactgcgggaaggtcaccagggaggacatgtccagcctcatgcacaccatctatgaggtcgtggatgcctcggtcaaccactcctcgggcagcagcaagaccctccgtgtgaagctaaccgtcagccctgagccctccagcaagaggaaggagggtcctcctgctggccaggaccgggagcccacccgttgcaggatggagggtgaactggcagaggagccaagggtggctgacaggaggttgtctgcacacgtcaggaggcccagtactgacccccagccctgctcggagcgggggccctactgcgtggacgagaacacggagcgcagaaaccactacctggacctcgccgggattgagaactacacgtccagattcggccctgggtcccctcctgtgcaagcaaagcaggagccccagggcagggcctcgcacctccaggcccggtcccgctcccaggagccagatacacatgccgtacaccaccgcaggtcacaggtgctggtggaacacgtcgtgccagcctcggagcctgctgcccgggccctggacacgcagccccggccgaaggggccggagaagcagttcctcaagtcccccaagggctccgggaagccgcctggggtgccagccagcagcaagtccgggaaagccttcagctactacctgccggccgtcctgccgccccaggcccctcaggacggccaccacctcccgcagcccccaccgccaccctacggccacaagcggtaccgccaaaagggcagggagggccactcgccactcaaggccccacacgctcagcctgccacagtggagcacgaggtggtgcgggacctgccgcccacgccagcaggagagggctacgcggtgccagtgatccagcggcacgagcaccaccaccaccacgagcaccaccaccaccaccaccaccaccacttccacccgtcctagcgccactgccaagcacacctcgctcccagcacaccacagcccgcgacctcagggcagggagcagagcagctgccggctgtgtgcccatggggagcccagcccccaccccccacctccgacagcaaacagcaactgactgcaggtgctggcatgatggaggtggtgcaccttggacacgtggacaaggcccaggcgccctctgctcttctgccctcgatgccacatggcggtgaacacatctgaagccactatgtttcctggctctaaggctcgtctgtgtaacccataaaacctgctttgattccaaaatgaggccctggagtgcgcaaggagtgcccggatgcttggggtgggtgttcctcccggggcttcaaggggtgactgctgtaggctgtcccagtgcgaggccgggagcgaatggaaaagctgaggctttgcctggcttgtgcatcatgaagtgagaggggacagggccggtggggggaagcagcttgtgcttagcagggagcatccgcggctccccgcaggaggccaagcagcagaaggcagcagtgctagaaagagaagtgc

SEQ ID NO: 4213 - protein, 451 aa, Homo sapiens; identical to SEQ ID NO: 497

SEQ ID NO: 4214 - DNA, 1235 bp, Homo sapiens
ggagggagggagtgagtaatggcaggacccccctttcagaccgggagcccacccgttgcaggatggagggtgaacctggccacacccctgcttcccgcaggccacaggccacaggccacacaccatcctctaggtcagacctgcagggggcacctggtccagcagctctgtggggcatgggcccttccagcatctggcaccctggctgagctgggcccccaagtctgtctgagcagagggctttgaggggcagcagccacagcggccttgacaccctcagtctggacttgctgtggctcactgtggctccctgtggctccactcagcagctttgggggcaacaggcagtgtggatggcaggcaggcagtgtggatggcgggcagtgtggatggcagccaggcagtgatggcaggcagcatagatagctggcagcctgcccagcacacgtttatttccgactagcagcacccctatgtggcctgcatggagattcttgtaccaaagcccaggccactccccaagggctggggccaagtctctctcataaccccggcttcaggagtccccaggggcaggaggggtggagctggatcagggtcatgggggctcagtgcgctgtgtgctgaccctgccctccttggccgcgctctgcacaggagctgcaccctacagggctcgcactgcacgttgtgaaggtggcagtcctgagtccttctcaaatctattttgtaatgagggtttaggggatgcgaatcctgggggcgccctccctgactgccacagtggagcacgaggtggtgcgggacctgccgcccacgccagcaggagagggctacgcggtgccagtgatccagcggcacgagcaccaccaccaccacgagcaccaccaccaccaccaccaccaccacttccacccgtcctagcgccactgccaagcacacctcgctcccagcacaccacagcccgcgacctcagggcagggagcagagcagctgccggctgtgtgcccatggggagcccagcccccaccccccacctccgacagcaaacagcaactgactgcaggtgctggcatgatggaggtggtgcaccttggacacgtggacaaggcccaggcgccctctgctcttctgccctcgatgccacatggcggtgaacacatctgaagccactatgtttcctggctctaaggctcgtctgtgtaacccataaaacctgctttgattccaaaatg

SEQ ID NO: 4215 - protein, 75 aa, Homo sapiens
MAGPPFQTGSPPVAGWRVNLATPLLPAGHRPQATHHPLGQTCRGHLVQQLCGAWALPASGTLAELGPQVCLSRGL

SEQ ID NO: 4216 - DNA, 1494 bp, Homo sapiens
ggagggagggagtgagtaatggcaggacccccctttcagaccgggagcccacccgttgcaggatggagggtgaacctggccacacccctgcttcccgcaggccacaggccacaggccacacaccatcctctaggtcagacctgcagggggcacctggtccagcagctctgtggggcatgggcccttccagcatctggcaccctggctgagctgggcccccaagtctgtctgagcagagggctttgaggggcagcagccacagcggccttgacaccctcagtctggacttgctgtggctcactgtggctccctgtggctccactcagcagctttgggggcaacaggcagtgtggatggcaggcaggcagtgtggatggcgggcagtgtggatggcagccaggcagtgatggcaggcagcatagatagctggcagcctgcccagcacacgtttatttccgactagcagcacccctatgtggcctgcatggagattcttgtaccaaagcccaggccactccccaagggctggggccaagtctctctcataaccccggcttcaggagtccccaggggcaggaggggtggagctggatcagggtcatgggggctcagtgcgctgtgtgctgaccctgccctccttggccgcgctctgcacaggagctgcaccctacagggctcgcactgcacgttgtgaaggtggcagtcctgagtccttctcaaatctattttgtaatgagggtttaggggatgcgaatcctgggggcgccctccctgactgccacagtggagcacgaggtggtgcgggacctgccgcccacgccagcaggagagggctacgcggtgccagtgatccagcggcacgagcaccaccaccaccacgagcaccaccaccaccaccaccaccaccacttccacccgtcctagcgccactgccaagcacacctcgctcccagcacaccacagcccgcgacctcagggcagggagcagagcagctgccggctgtgtgcccatggggagcccagcccccaccccccacctccgacagcaaacagcaactgactgcaggtgctggcatgatggaggtggtgcaccttggacacgtggacaaggcccaggcgccctctgctcttctgccctcgatgccacatggcggtgaacacatctgaagccactatgtttcctggctctaaggctcgtctgtgtaacccataaaacctgctttgattccaaaatgaggccctggagtgcgcaaggagtgcccggatgcttggggtgggtgttcctcccggggcttcaaggggtgactgctgtaggctgtcccagtgcgaggccgggagcgaatggaaaagctgaggctttgcctggcttgtgcatcatgaagtgagaggggacagggccggtggggggaagcagcttgtgcttagcagggagcatccgcggctccccgcaggaggccaagcagcagaaggcagcagtgctagaaagagaagtgc

SEQ ID NO: 4217 - protein, 75 aa, Homo sapiens; identical to SEQ ID NO: 4215

SEQ ID NO: 4218 - DNA, 1784 bp, Homo sapiens
ggggtgccagggtggggctgtgccttaggcgggggcaccctggccacacccctgcttcccgcaggccacaggccacaggccacacaccatcctctaggtcagacctgcagggggcacctggtccagcagctctgtggggcatgggcccttccagcatctggcaccctggctgagctgggcccccaagtctgtctgagcagagggctttgaggggcagcagccacagcggccttgacaccctcagtctggacttgctgtggctcactgtggctccctgtggctccactcagcagctttgggggcaacagggctgggggtggctggggcagtggctgagggtggctggggcagtggttgggggtggctggggcaatggctaagggtggctggggtagtggctggggatggctcaggcagtggctgaggcagtggctgggggtggctgggtggctggggtgtggctggcgcagtggctacagtggtcccagagtggtgatcaggtgccactacagcatgagccactccctagagcacctgcggctctggtgcctgggagggagttcacagggttctgggggtcggctgtgaccttgtttctctggacggcacttgactgtctgtgcccaggcgtccactctccttcctgctctgcgaggaggtgggtgctggtcaggatgcaccccggacccctgccgcctgctgtaggcaccccgtcatcaggggtgcgccacccagtctgtgcgggggtcaggcccttctctgtgctccaagcaggaggcccagtactgacccccagccctgctcggagcgggggccctactgcgtggacgagaacacggagcgcagaaaccactacctggacctcgccgggattgagaactacacgtccagattcggccctgggtcccctcctgtgcaagcaaagcaggagccccagggcagggcctcgcacctccaggcccggtcccgctcccaggagccagatacacatgccgtacaccaccgcaggtcacaggtgctggtggaacacgtcgtgccagcctcggagcctgctgcccgggccctggacacgcagccccggccgaaggggccggagaagcagttcctcaagtcccccaagggctccgggaagccgcctggggtgccagccagcagcaagtccgggaaagccttcagctactacctgccggccgtcctgccgccccaggcccctcaggacggccaccacctcccgcagcccccaccgccaccctacggccacaagcggtaccgccaaaagggcagggagggccactcgccactcaaggccccacacgctcagcctgccacagtggagcacgaggtggtgcgggacctgccgcccacgccagcaggagagggctacgcggtgccagtgatccagcggcacgagcaccaccaccaccacgagcaccaccaccaccaccaccaccaccacttccacccgtcctagcgccactgccaagcacacctcgctcccagcacaccacagcccgcgacctcagggcagggagcagagcagctgccggctgtgtgcccatggggagcccagcccccaccccccacctccgacagcaaacagcaactgactgcaggtgctggcatgatggaggtggtgcaccttggacacgtggacaaggcccaggcgccctctgctcttctgccctcgatgccacatggcggtgaacacatctgaagccactatgtttcctggctctaaggctcgtctgtgtaacccataaaacctgctttgattccaaaatgag

SEQ ID NO: 4219 - protein, 330 aa, Homo sapiens [sequence omitted]

SEQ ID NO: 4220 - DNA, 1105 bp, Homo sapiens
ttggcccagggaaacagacggcagacacacctgtcccccagtgatgccgcccaagctgcccatggggcttcctacggaagtttctaggcccgtcacctagggctctcctgttcagccttaacaggctcagcaaatcagggcgtggctggacgatttccttgcatctgagggcagacgctgctaccggagtgacctggacgtggccagatcttctcgcaggtcacaagaagccagtgagcccttgccttggtttctggaagttcttttccttggctggatttacccagtggttaggttgcatttctaccccatccagaacattcttggaagagcacccggagctgaagctgtccctgatgatgaaggtgaaacgtcagccctggccatggctccgctcagggccccggtcacctccgagtcactctgttccttgactgtctttgtgtttctgtacctcaaggcactgaagctggaggactctgtccatgcccgtgtcaccctcgtgtgggagcctctgggctcggcaggtccacatttcatgagctgaggcgtgggccagggccatctggaaagggaactcggcttttccagaacgtggtggatcatctgtcgggtggctggcattgctgtagagtgacggctgctgcccagagcgtgtcccagacatcacagcggggctcagcagttcccacagcctctgcctgccttggctaagcatgagttaagcagcaaaacgctcctccatgtctggatggggccggcaggtcctgtgtcccctgcacctggaggagagcaggctagaggcacagcggccacatggtgctggctctgaacgttggttggtggctggaaaacagccctgcttctgagggccgctcagttctgcacacgaaaccacctcctgagggctcagctctgcccccgccctgggctgcagcctctgcacgcaagcaccaggcatcctttgtgttgtcaactccgtgtaaccagtaactacagccatttacaattgactccgtttccttttgtaggtttccctgtctgtctgtgttagtagaaaaataaaatcctatgaaatctgagtacgttgaagaatctcttgagt

SEQ ID NO: 4221 - protein, 58 aa, Homo sapiens [sequence omitted]

SEQ ID NO: 4222 - DNA, 5314 bp, Homo sapiens
gcgtcggcgggagcggcgcagcgcgggccgggccgggacggggactgtcggctgcaggcggccatgcccaccaacttcaccgtggtgcccgtggaggctcacgccgacggcggcggggacgagactgccgagcggacggaggctccgggcacccccgagggccccgagcccgagcgccccagcccgggagatggaaatccaagagaaaacagcccattcctcaacaatgtcgaggtggaacaagagagcttctttgaagggaagaacatggcacttttcgaggaggagatggacagtaaccccatggtgtcctcgctgctcaacaagctggccaactacaccaacctgagccagggcgtggtggagcacgaggaggacgaggagagccggcggcgggaggccaaggctccgcgcatgggcaccttcatcggcgtctacctgccgtgcctgcagaacatcctgggcgtcatcctcttcctgcgcctgacgtggatcgtgggggtggctggtgtcctggagtccttcctcatcgtggccatgtgctgcacatgtacaatgctgaccgccatttccatgagtgcgatcgctaccaacggtgtggtcccagctggcgggtcctactacatgatatcgcgctcgctgggacccgagtttggaggcgctgtcggcctctgcttctacctgggcacgacgtttgcaggggccatgtatattttggggaccatcgagatttttctgacgtacatctccccgggtgcggccatcttccaggcggaggctgcaggtggcgaggcggccgccatgctgcacaacatgcgtgtgtacggcacgtgcacgctcgtgctcatggccctggtggtcttcgtgggcgtcaagtatgtcaacaagctggcgctggtcttcctggcctgcgtcgtgctgtccatcctggccatctatgccggcgtcatcaagtctgccttcgaccccccggacatcccggtctgcctcctggggaaccgcacgctgtcacggcgcagcttcgatgcctgcgtcaaggcctacggcatccacaacaactcagccacctccgcgctctggggcctcttctgcaacggctcccagcccagcgccgcctgtgacgagtacttcatccagaacaacgtcaccgaaatccagggcatcccgggcgcggccagtggtgtcttcctggagaacctgtggagtacgtacgcgcacgcgggggcgtttgtggagaagaaaggtgtgccctcggtgcccgtggcagaggagagccgtgccagcgcactgccctacgtgctcaccgacatcgcggcctccttcaccctgctggttggcatctacttcccttccgtgaccggtatcatggcgggttcaaaccggtccggggacctcaaggatgcacagaagtccatccccacggggaccatcctggccatagtgacgacgtctttcatctatctctcctgcattgtgctgtttggggcctgcattgaaggcgtggtcttacgagataagttcggggaggccctgcaggggaacctggtcatcggcatgctggcctggccctccccctgggtcatcgtcatcggctccttcttctccacctgcggtgccggcctgcagagcctcacgggggcaccgcgcctactgcaggccattgcccgtgacggcatcgtccccttcctgcaggtgtttggccacgggaaggccaacggggagcccacgtgggcgctgctgctgacagtcctcatctgcgagactggcatcctcatcgcctctctggacagcgtggccccgatcctctccatgttcttcctcatgtgctacctgttcgtgaacctggcctgcgccgtgcagaccctgctacgtacccccaactggcgtccacgcttcaagttctaccactggaccctgtcctttctgggtatgagcctgtgcctggcgctgatgttcatctgctcctggtactacgcgctgtccgccatgctcatcgctggctgcatctacaagtacatcgagtaccgcggggccgagaaggagtggggcgatggcatccgtggcctatccctgaacgccgcccgctacgccctgctgcgcgtggagcacggtcccccccacaccaagaactggaggccccaggtgctggtgatgctgaacctggacgcggagcaggccgtgaagcacccccgcctgctgtccttcacgtcgcagctgaaggccggcaagggcctgaccatcgtgggctcggtgctggaggggacgtacctggacaagcacatggaggctcagcgggccgaggagaacatacggtccctaatgagcacagagaagaccaagggcttctgccagctggtggtctcgtccagcctgcgggatggcatgtcccacctgatccagtcggccggcctgggcggcctgaagcacaacacggtgctcatggcctggcccgcatcctggaagcaggaggacaaccccttctcctggaagaactttgtggacaccgtccgcgacaccaccgccgcgcaccaggctctgctggtggccaagaacgtcgactcgtttccgcaaaaccaggagcgcttcggcgggggccacatcgacgtgtggtggatcgtgcacgacggcggcatgctcatgctgctgcccttcctgctgcgccagcacaaggtgtggaggaagtgccggatgcgtatcttcaccgtggcccaggtggacgacaacagcatccagatgaagaaggacctgcagatgttcttgtaccacttgcgcatcagcgccgaggtggaggtggtggagatggttgaaaacgacatatctgctttcacctacgagaggacactaatgatggagcagaggtcgcagatgctgaagcagatgcagctgtccaagaacgagcaggagcgagaggcccagctgatccacgacaggaacaccgcgtcccacaccgcggcggcagccaggacccaagcgccgcctacgccagacaaggtgcagatgacctggaccagggagaagctgatcgctgagaagtacaggagcagagacaccagcctatctggtttcaaagacctcttcagcatgaagccggaccagtccaacgtcaggcggatgcacacggctgtgaagctcaatggcgtcgtcctcaacaagtcccaggatgcgcagctggtcctgctcaacatgccaggtcctcccaaaaaccggcagggagacgagaactacatggagtttcttgaagtcctgaccgaggggctgaacagagtcctcctggtcaggggtggcggccgggaggtgatcaccatctactcctaatgcccaacagcatcacggcactctgggacaggcacggaggacggcgtgggcagcctgggcctgggcttggcccagggaaacagacggcagacacacctgtcccccagtgatgccgcccaagctgcccatggggcttcctacggaagtttctaggcccgtcacctagggctctcctgttcagccttaacaggctcagcaaatcagggcgtggctggacgatttccttgcatctgagggcagacgctgctaccggagtgacctggacgtggccagatcttctcgcaggtcacaagaagccagtgagcccttgccttggtttctggaagttcttttccttggctggatttacccagtggttaggttgcatttctaccccatccagaacattcttggaagagcacccggagctgaagctgtccctgatgatgaaggtgaaacgtcagccctggccatggctccgctcagggccccggtcacctccgagtcactctgttccttgactgtctttgtgtttctgtacctcaaggcactgaagctggaggactctgtccatgcccgtgtcaccctcgtgtgggagcctctgggctcggcaggtccacatttcatgagctgaggcgtgggccagggccatctggaaagggaactcggcttttccagaacgtggtggatcatctgtcgggtgtgtggtgaacacgttcagttcatcagggcctacgctccgggaaggggcccccagctgtggctctgccatgccgggctgtgtttgcagctgtccgagtctccatccacctttagaaaaccagccacttcttttcataagcactgacagggcccagcccacagccacaggtgcgatcagtgcctcacgcaggcaaatgcactgaaacccaggggcacacgcgcgcagagtgaacagtgagttcccccgacagcccacgacagccaggactgccctccccaccccaccccaccccaggagcacggcacacagttcagcctctgagctggctcacacgtgccatccccaccccggtgctccagggaaggaggacacggacccgacgtgggaggtcctcaggcagcagtggcgcctggtgtcaggtctgtctggctgagtcccgggcgtcccctgccatggcctgtgccttgcatggaggcggcggtggcactgaagagatagctttcaagggcccaacactttgcacttcggctggctgtgagtttctgctttgtaggttgtggtcacatttgcaggctgcgggcagtggcaccgacttgggcctccctttctatgtggcatatttatttatttaaacaccccagggagttacgtggtaacaaggttgtccataaagaggttgcttctatatactagaggccccagatggccaggccttgggctacgtctggcttgcatggtctcccaagggaatcagccccatcaacaaagttcaaatcggggcagaggctgcacttgtgcccccagatgtttctgaggagccagactagggctggcattgctgtagagtgacggctgctgcccagagcgtgtcccagacatcacagcggggctcagcagttcccacagcctctgcctgccttggctaagcatgagttaagcagcaaaacgctcctccatgtctggatggggccggcaggtcctgtgtcccctgcacctggaggagagcaggctagaggcacagcggccacatggtgctggctctgaacgttggttggtggctggaaaacagccctgcttctgagggccgctcagttctgcacacgaaaccacctcctgagggctcagctctgcccccgccctgggctgcagcctctgcacgcaagcaccaggcatcctttgtgttgtcaactccgtgtaaccagtaactacagccatttacaattgactccgtttccttttgtaggtttccctgtctgtctgtgttagtagaaaaataaaatcctatgaaatctgagtacgttgaagaatctcttgagt

SEQ ID NO: 4223 - protein, 1083 aa, Homo sapiens; identical to SEQ ID NO: 499

SEQ ID NO: 4224 - DNA, 2710 bp, Homo sapiens
gcgtcggcgggagcggcgcagcgcgggccgggccgggacggggactgtcggctgcaggcggccatgcccaccaacttcaccgtggtgcccgtggaggctcacgccgacggcggcggggacgagactgccgagcggacggaggctccgggcacccccgagggccccgagcccgagcgccccagcccgggagatggaaatccaagagaaaacagcccattcctcaacaatgtcgaggtggaacaagagagcttctttgaagggaagaacatggcacttttcgaggaggagatggacagtaaccccatggtgtcctcgctgctcaacaagctggccaactacaccaacctgagccagggcgtggtggagcacgaggaggacgaggagagccggcggcgggaggccaaggctccgcgcatgggcaccttcatcggcgtctacctgccgtgcctgcagaacatcctgggcgtcatcctcttcctgcgcctgacgtggatcgtgggggtggctggtgtcctggagtccttcctcatcgtggccatgtgctgcacatgtacaatgctgaccgccatttccatgagtgcgatcgctaccaacggtgtggtcccagctggcgggtcctactacatgatatcgcgctcgctgggacccgagtttggaggcgctgtcggcctctgcttctacctgggcacgacgtttgcaggggccatgtatattttggggaccatcgagatttttctggtaagcacggaggacggcgtgggcagcctgggcctgggcttggcccagggaaacagacggcagacacacctgtcccccagtgatgccgcccaagctgcccatggggcttcctacggaagtttctaggcccgtcacctagggctctcctgttcagccttaacaggctcagcaaatcagggcgtggctggacgatttccttgcatctgagggcagacgctgctaccggagtgacctggacgtggccagatcttctcgcaggtcacaagaagccagtgagcccttgccttggtttctggaagttcttttccttggctggatttacccagtggttaggttgcatttctaccccatccagaacattcttggaagagcacccggagctgaagctgtccctgatgatgaaggtgaaacgtcagccctggccatggctccgctcagggccccggtcacctccgagtcactctgttccttgactgtctttgtgtttctgtacctcaaggcactgaagctggaggactctgtccatgcccgtgtcaccctcgtgtgggagcctctgggctcggcaggtccacatttcatgagctgaggcgtgggccagggccatctggaaagggaactcggcttttccagaacgtggtggatcatctgtcgggtgtgtggtgaacacgttcagttcatcagggcctacgctccgggaaggggcccccagctgtggctctgccatgccgggctgtgtttgcagctgtccgagtctccatccacctttagaaaaccagccacttcttttcataagcactgacagggcccagcccacagccacaggtgcgatcagtgcctcacgcaggcaaatgcactgaaacccaggggcacacgcgcgcagagtgaacagtgagttcccccgacagcccacgacagccaggactgccctccccaccccaccccaccccaggagcacggcacacagttcagcctctgagctggctcacacgtgccatccccaccccggtgctccagggaaggaggacacggacccgacgtgggaggtcctcaggcagcagtggcgcctggtgtcaggtctgtctggctgagtcccgggcgtcccctgccatggcctgtgccttgcatggaggcggcggtggcactgaagagatagctttcaagggcccaacactttgcacttcggctggctgtgagtttctgctttgtaggttgtggtcacatttgcaggctgcgggcagtggcaccgacttgggcctccctttctatgtggcatatttatttatttaaacaccccagggagttacgtggtaacaaggttgtccataaagaggttgcttctatatactagaggccccagatggccaggccttgggctacgtctggcttgcatggtctcccaagggaatcagccccatcaacaaagttcaaatcggggcagaggctgcacttgtgcccccagatgtttctgaggagccagactagggctggcattgctgtagagtgacggctgctgcccagagcgtgtcccagacatcacagcggggctcagcagttcccacagcctctgcctgccttggctaagcatgagttaagcagcaaaacgctcctccatgtctggatggggccggcaggtcctgtgtcccctgcacctggaggagagcaggctagaggcacagcggccacatggtgctggctctgaacgttggttggtggctggaaaacagccctgcttctgagggccgctcagttctgcacacgaaaccacctcctgagggctcagctctgcccccgccctgggctgcagcctctgcacgcaagcaccaggcatcctttgtgttgtcaactccgtgtaaccagtaactacagccatttacaattgactccgtttccttttgtaggtttccctgtctgtctgtgttagtagaaaaataaaatcctatgaaatctgagtacgttgaagaatctcttgagt

SEQ ID NO: 4225 - protein, 266 aa, Homo sapiens
MPTNFTVVPVEAHADGGGDETAERTEAPGTPEGPEPERPSPGDGNPRENSPFLNNVEVEQESFFEGKNMALFEEEMDSNPMVSSLLNKLANYTNLSQGVVEHEEDEESRRREAKAPRMGTFIGVYLPCLQNILGVILFLRLTWIVGVAGVLESFLIVAMCCTCTMLTAISMSAIATNGVVPAGGSYYMISRSLGPEFGGAVGLCFYLGTTFAGAMYILGTIEIFLVSTEDGVGSLGLGLAQGNRRQTHLSPSDAAQAAHGASYGSF

SEQ ID NO: 4226 - DNA, 745 bp, Homo sapiens
cgacagcccacgacagccaggactgccctccccaccccaccccaccccaggagcacggcacacagttcagcctctgagctggctcacacgtgccatccccaccccggtgctccagggaaggaggacacggacccgacgtgggaggtcctcaggcagcagtggcgcctggtgtcaggtctgtctggctgagtcccgggcgtcccctgccatggcctgtgccttgcatggaggcggcggtggcactgaagagatagctttcaagggcccaacactttgcacttcggctggctgtgagtttctgctttgtaggttgtggtcacatttgcaggctgcgggcagtggcaccgacttgggcctccctttctatgtggcatatttatttatttaaacaccccagggagttacgtggtaacaaggttgtccataaagaggttgcttctatatactagaggccccagatggccaggccttgggctacgtctggcttgcatggtctcccaagggaatcagccccatcaacaaagttcaaatcggggcagaggctgcacttgtgcccccagatgtttctgaggagccagactagggctggcattgctgtagacctctgcacgcaagcaccaggcatcctttgtgttgtcaactccgtgtaaccagtaactacagccatttacaattgactccgtttccttttgtaggtttccctgtctgtctgtgttagtagaaaaataaaatcctatgaaatctg

SEQ ID NO: 4227 - protein, 63 aa, Homo sapiens [sequence omitted]

SEQ ID NO: 4228 - DNA, 694 bp, Homo sapiens
tgtgtgactgtagcccttagaagcttggcagccttagtgggctgagttctaggtccctggaggccaaagcatcccgctgctgaacgcccgccctggctgcagtcagcgcctttcgctcggagccgccacttctgcatccttcagggtcagagaatccgcctgatcctgactcacacagccctttccaacacgtgtgaatgcagctcatcagggctcagctcagcctcgtgtccggagcgtggggtgcacccgccgcccgctgaccgtgcccacctcccctgcagggaccagtccaacgtcaggcggatgcacacggctgtgaagctcaatggcgtcgtcctcaacaagtcccaggatgcgcagctggtcctgctcaacatgccaggtcctcccaaaaaccggcagggagacgagaactacatggagtttcttgaagtcctgaccgaggggctgaacagagtcctcctggtcaggggtggcggccgggaggtgatcaccatctactcctaatgcccaacaacatcacagcggggctcagcagttcccacagcctctgcacgcaagcaccaggcatcctttgtgttgtcaactccgtgtaaccagtaactacagccatttacaattgactccgtttccttttgtaggtttccctgtctgtctgtgttagtagaaaaataaaatcctatgaaatctg

SEQ ID NO: 4229 - protein, 67 aa, Homo sapiens
MHTAVKLNGVVLNKSQDAQLVLLNMPGPPKNRQGDENYMEFLEVLTEGLNRVLLVRGGGREVITIYS

SEQ ID NO: 4230 - DNA, 3936 bp, Homo sapiens
agcgctgcggagcgggaggggaggcttcgcggaacgctctcggcgccaggactcgcgtgcaaagcccaggcccgggcggccagaccaagagggaagaagcacagaattcctcaactcccagtgtgcccatgagtaagagcaaatgctccgtgggactcatgtcttccgtggtggccccggctaaggagcccaatgccgtgggcccgaaggaggtggagctcatccttgtcaaggagcagaacggagtgcagctcaccagctccaccctcaccaacccgcggcagagccccgtggaggcccaggatcgggagacctggggcaagaagatcgactttctcctgtccgtcattggctttgctgtggacctggccaacgtctggcggttcccctacctgtgctacaaaaatggtggcggtgccttcctggtcccctacctgctcttcatggtcattgctgggatgccacttttctacatggagctggccctcggccagttcaacagggaaggggccgctggtgtctggaagatctgccccatactgaaaggtgtgggcttcacggtcatcctcatctcactgtatgtcggcttcttctacaacgtcatcatcgcctgggcgctgcactatctcttctcctccttcaccacggagctcccctggatccactgcaacaactcctggaacagccccaactgctcggatgcccatcctggtgactccagtggagacagctcgggcctcaacgacacttttgggaccacacctgctgccgagtactttgaacgtggcgtgctgcacctccaccagagccatggcatcgacgacctggggcctccgcggtggcagctcacagcctgcctggtgctggtcatcgtgctgctctacttcagcctctggaagggcgtgaagacctcagggaaggtggtatggatcacagccaccatgccatacgtggtcctcactgccctgctcctgcgtggggtcaccctccctggagccatagacggcatcagagcatacctgagcgttgacttctaccggctctgcgaggcgtctgtttggattgacgcggccacccaggtgtgcttctccctgggcgtggggttcggggtgctgatcgccttctccagctacaacaagttcaccaacaactgctacagggacgcgattgtcaccacctccatcaactccctgacgagcttctcctccggcttcgtcgtcttctccttcctggggtacatggcacagaagcacagtgtgcccatcggggacgtggccaaggacgggccagggctgatcttcatcatctacccggaagccatcgccacgctccctctgtcctcagcctgggccgtggtcttcttcatcatgctgctcaccctgggtatcgacagcgccatgggtggtatggagtcagtgatcaccgggctcatcgatgagttccagctgctgcacagacaccgtgagctcttcacgctcttcatcgtcctggcgaccttcctcctgtccctgttctgcgtcaccaacggtggcatctacgtcttcacgctcctggaccattttgcagccggcacgtccatcctctttggagtgctcatcgaagccatcggagtggcctggttctatggtgttgggcagttcagcgacgacatccagcagatgaccgggcagcggcccagcctgtactggcggctgtgctggaagctggtcagcccctgctttctcctgttcgtggtcgtggtcagcattgtgaccttcagacccccccactacggagcctacatcttccccgactgggccaacgcgctgggctgggtcatcgccacatcctccatggccatggtgcccatctatgcggcctacaagttctgcagcctgcctgggtcctttcgagagaaactggcctacgccattgcacccgagaaggaccgtgagctggtggacagaggggaggtgcgccagttcacgctccgccactggctcaaggtgtagagggagcagagacgaagaccccaggaagtcatcctgcaatgggagagacacgaacaaaccaaggaaatctaagtttcgagagaaaggagggcaacttctactcttcaacctctactgaaaacacaaacaacaaagcagaagactcctctcttctgactgtttacacctttccgtgccgggagcgcacctcgccgtgtcttgtgttgctgtaataacgacgtagatctgtgcagcgaggtccaccccgttgttgtccctgcagggcagaaaaacgtctaacttcatgctgtctgtgtgaggctccctccctccctgctccctgctcccggctctgaggctgccccaggggcactgtgttctcaggcggggatcacgatccttgtagacgcacctgctgagaatccccgtgctcacagtagcttcctagaccatttactttgcccatattaaaaagccaagtgtcctgcttggtttagctgtgcagaaggtgaaatggaggaaaccacaaattcatgcaaagtcctttcccgatgcgtggctcccagcagaggccgtaaattgagcgttcagttgacacattgcacacacagtctgttcagaggcattggaggatgggggtcctggtatgtctcaccaggaaattctgtttatgttcttgcagcagagagaaataaaactccttgaaaccagctcaggctactgccactcaggcagcctgtgggtccttgcggtgtagggaacggcctgagaggagcgtgtcctatccccggacgcatgcagggcccccacaggagcgtgtcctatccccggacgcatgcagggcccccacaggagcatgtcctatccctggacgcatgcagggcccccacaggagcgtgtactaccccagaacgcatgcagggcccccacaggagcgtgtactaccccaggacgcatgcagggcccccactggagcgtgtactaccccaggacgcatgcagggcccccacaggagcgtgtcctatccccggaccggacgcatgcagggcccccacaggagcgtgtactaccccaggacgcatgcagggcccccacaggagcgtgtactaccccaggatgcatgcagggcccccacaggagcgtgtactaccccaggacgcatgcagggcccccatgcaggcagcctgcagaccacactctgcctggccttgagccgtgacctccaggaagggaccccactggaattttatttctctcaggtgcgtgccacatcaataacaacagtttttatgtttgcgaatggctttttaaaatcatatttacctgtgaatcaaaacaaattcaagaatgcagtatccgcgagcctgcttgctgatattgcagtttttgtttacaagaataattagcaatactgagtgaaggatgttggccaaaagctgctttccatggcacactgccctctgccactgacaggaaagtggatgccatagtttgaattcatgcctcaagtcggtgggcctgcctacgtgctgcccgagggcaggggccgtgcagggccagtcatggctgtcccctgcaagtggacgtgggctccagggactggagtgtaatgctcggtgggagccgtcagcctgtgaactgccaggcagctgcagttagcacagaggatggcttccccattgccttctggggagggacacagaggacggcttccccatcgccttctggccgctgcagtcagcacagagagcggcttccccattgccttctggggagggacacagaggacagcttccccatcgccttctggctgctgcagtcagcacagagagcggcttccccatcgccttctggggaggggctccgtgtagcaacccaggtgttgtccgtgtctgttgaccaatctctattcagcatcgtgtgggtccctaagcacaataaaagacatccacaatggaaaaactgc

SEQ ID NO: 4231 - protein, 620 aa, Homo sapiens; identical to SEQ ID NO: 501

SEQ ID NO: 4232 - DNA, 556 bp, Homo sapiens
agatgaggccgtgctgttccgagggttattaggatgctgtggtcatgccgtgtgtggatgagtccatgctgttctgagggctatggagcagggcacctctggttctgtggaatcgctgccttgatactccatggggaatcccagatcaatgaacacagacagccccctgcttctcaggctcttccaggccgctggcccgggagggttcacttcctgaggctgcatcttccaccagtcgtctgctgccatttacttcttgaggatggtgttgagtttagaggcctcagtgtggggctgggacaggaagggtgctcaggtcctttgcctgtggcctgcgttctcctgggacagcctctcaccgccctctggctctgcaggtttggattgacgcggccacccaggtgtgcttctccctgggcgtggggttcggggtgctgatcgccttctccagctacaacaagttcaccaacaactgctacagggacgcgattgtcaccacctccatcaactccctgacgagcttctcctccggcttcgtcgtcttctccttcctggg

SEQ ID NO: 4233 - protein, 134 aa, Homo sapiens
MLWSCRVWMSPCCSEGYGAGHLWFCGIAALILHGESQINEHRQPPASQALPGRWPGRVHFLRLHLPPVVCCHLLLEDGVEFRGLSVGLGQEGCSGPLPVACVLLGQPLTALWLCRFGLTRPPRCASPWAWGSGC

SEQ ID NO: 4234 - DNA, 575 bp, Homo sapiens
aggtcatgagggcggaaccctggtacatgaaattcgttctcttatttaagagacaaagaacgcccttgttttttccaccacgtgatggcgcagacagaagacaaccagcatctatgaaccaggaagcccccaccaggcactgaatctgcccctgcgtggatcttagacttgcagactccagaactgtccaaattttggtctggagccagagacaatataggatgaagtttgatttgttccaaaacccacagaaatctctaaaatggaagaattttcttagaaccaaaaggcatggaattgatgacatgaaactgttctctctcctgccaccatttgaagaagggtgtgtttgcttccccttccaccatgattctaagtttcctgaggcctccccagctatgcagaactagttttgctcggtcactcacggcaacctccgcctcctgggttcaagcagttctcctgcctcagtctcccgagtagctgggactctacaggcatcccccatcagggcttgaaaacagaaatcctgccaagtcccacgttttcttcggttccaagcacagagagacatt

SEQ ID NO: 4235 - protein, 62 aa, Homo sapiens
MKFDLFQNPQKSLKWKNFLRTKRHGIDDMKLFSLLPPFEEGCVCFPFHHDSKFPEASPAMQN

SEQ ID NO: 4236 - DNA, 786 bp, Homo sapiens
gtggaaggtcatgagggcggaaccctggtacatgaaattcgttctcttatttaagagacaaagaacgcccttgttttttccaccacgtgatggcgcagacagaagacaaccagcatctatgaaccaggaagcccccaccaggcactgaatctgcccctgcgtggatcttagacttgcagactccagaactgtccaaattttggtctggagccagagacaatataggatgaagtttgatttgttccaaaacccacagaaatctctaaaatggaagaattttcttagaaccaaaaggcatggaattgatgacatgaaactggtaaaagaagctcttcatgacccatgaacagatgacaggcagacctttcacagcctagaacatgcagatttggtctcttggaaacaacaccagagaaagaccacagttgaactctcttgaaaggaactatgccaagttctaccctgcagcaaaacttcagagactcaagtcttgtatccacatctcttaactcaaagagcccctctagactcttgggaccatacacacactggagacatcaaggtgaaactgaccagggaggcttctccttagaagaagaaaacatccccgaagtacacaactatcccaagatcacagaccaagggtctgtctacagtcaccatgaaatttttctcttttcctactgtttatcttctgtctatacatggaaagataatgtgaaaattaagattttatcattgatagcttccacagagaacttaactgaatgaatgttggatatgtca

SEQ ID NO: 4237 - protein, 39 aa, Homo sapiens
MKFDLFQNPQKSLKWKNFLRTKRHGIDDMKLVKEALHDP

SEQ ID NO: 4238 - DNA, 456 bp, Homo sapiens
ggaagaattttcttagaaccaaaaggcatggaattgatgacatgaaactgcctgagcttctcagctgacctgtgatggagtgttgtgcccaagtggaaagttcttctttctttcagagacatatcattcaccataaaatacaaccagagacttcaaaattactccaggctagaaggacactccaattaggggaaaagtaacctatgggcaaaccatcttccgtaagagttcaaggacaaaaaactactgatgttgtaataacattgaaacttaatgttttgggcaatccttaagtgatttatttggagtgtcccagtcattttagacctcttcaccttacaatgtattgtgtgagattatatttccatgcacctaattttaaaataaatttatttaggtagatgtagagacatattactgtgataaagcagttcataccaaataaaatttagctaa

SEQ ID NO: 4239 - protein, 41 aa, Homo sapiens
MECCAQVESSSFFQRHIIHHKIQPETSKLLQARRTLQLGEK

SEQ ID NO: 4240 - DNA, 292 bp, Homo sapiens
acaatgtctcttctccattaagaaaacctacttcaacatctccattggttctcaacatagaggaggaaaataatcatatttcatcacagtatttaagtaaggatcaaagactctaagataactgaaagcactaaattaattttcttcaccaagatcacaggaaaaacagaaactacaaggagaaatggaaaaagctggaccttccctatggacatggggaaaagtggctatctggaagtcaagggaaaagagagatttttctttataaaataaaagaaatgcctgaaccacc

SEQ ID NO: 4241 - protein, 37 aa, Homo sapiens
NVSSPLRKPTSTSPLVLNIEEENNHISSQYLSKDQRL

SEQ ID NO: 4242 - DNA, 880 bp, Homo sapiens
gaaaacggatgagtttgcttccccttttgctgtgattataagtttcctgaggcctcccaagtcatgttgaactgtgctcctctccttgaggcattccattgcttccctttacccccacagtttatggagagatgagatgagcaaacaccaaaggaaaagcgccttgggagacactgcatccttctccttgcacgacttgtctaagtcatgcatttctttcctcccgccttctgcattctgccctggtgctgacggtccttccaaaaggaagaaatcttcccaggtattggctgtgtcctaaatagctgagaactgaaactatctaagtgaaaggcttagtagacattaatcaaaccaaaaagagacagataattatgatatacaaagagaaggatttaaaaatagtgtatgaaagaagagaaatctacaaggaagaaattctaaaagaaacaattctgaaaggaattcaccaggtggattctgcaagttcttttttttttaacagagtcttgctctatgtgtaagttttaatcttcacactgagatgtctactaattgcaccatcatgtaccaacagtgaccctgactttgagtcttattctggccattcaatatagaggagtgagtgaacctctgaataaaccaggggtaggggaatgaaaaaaattataaatagataacctgcggatgggaaaaacagtgattggaacaatggaaatattgattgggaacagcagagagtcactaaagtacagtcacatacttatatctcattcattcattcattcattcattcattcaatgctgagtggatttggataaatgtttactgaagacacaccctgtgcctgtcttccctgtgcctggcagtgaaaatgct

SEQ ID NO: 4243 - protein, 54 aa, Homo sapiens
MSKHQRKSALGDTASFSLHDLSKSCISFLPPSAFCPGADGPSKRKKSSQVLAVS

SEQ ID NO: 4244 - DNA, 11705 bp, Homo sapiens
gcgggagcctcggccaagccgcgagcaggtgtgaatgagcccagggaaggacacacggccactgctggagggatcctccattcctgtgtcatttgcatgggtcctgctgtgaaatgaacctggcagggacttgttagacacttccttccttccctcattgagcactccagtgccattgttccacagttgttctaattgggtcctagcttcctcctgccaaggcaaacagcatagtctcgagtaggtgtccctaggctcatctgccagcctgaacatgaacacaggcaaagctgatgatggccagggaccccaggggacgtggggccctgtggggtctggcccccaggagcaagacctctgatgatgctggtgtctgggagtgagcaccatgcccatcacccaggacaatgccgtgctgcacctgcccctcctctaccagtggctgcagaacagcctgcaggaaggtggggatgggccggagcagcggctctgccaggcggccatccagaagctgcaggagtacatccagctgaactttgctgtggatgagagtacggtcccacctgatcacagcccccccgaaatggagatctgtactgtgtacctcaccaaggagctgggggacacagagactgtgggcctgagttttgggaacatccctgttttcggggactatggtgaaaagcgcagggggggcaagaagaggaaaacccaccagggtcctgtgctggatgtgggctgcatctgggtgacagagctgaggaagaacagcccagcagggaagagtgggaaggtccgactgcgggatgagatcctctcactgaatgggcagctgatggttggagttgatgtcagtggggccagttacctggctgagcagtgctggaatggcggctttatctacctgatcatgctgcgtcgctttaagcacaaagcccactccacttataatggcaacagtagcaacagctctgaaccaggagaaacacctaccttggagctgggtgaccgaactgcgaaaaaggggaaacgaaccagaaagtttggggtcatctccaggcctcctgccaacaaggcccctgaagaatccaagggcagcgctggctgtgaggtgtccagtgaccccagcactgagctggagaacggccctgaccctgaacttggaaacggccatgtctttcagctagaaaatggcccagattctctcaaggaggtggctggaccccatctagagaggtcagaagtggacagagggacagagcatagaattccaaagacagatgctcctctgaccacaagcaatgacaaacgccgcttctcaaaaggtgggaagacggacttccaatcgagtgactgcctggcacgggaggaagttggccgaatatggaagatggagctgctcaaagaatcggatgggctgggaattcaggttagtggaggccgaggatcaaagcgctcacctcacgctatcgttgtcactcaagtgaaggaaggaggtgccgctcacagggatggcaggctgtccttaggagatgagctgctggtaatcaatggtcatttactggtcgggctctcccacgaggaagcagtggccattcttcgctccgccacgggaatggtgcagcttgtggtggccagcaaggaaaactccgcagaggacctcctcaggttaacatctaagagcttgccagatctgaccagctcggtagaagatgtgtcctcctggactgataacgaagaccaggaggcagacggggaagaggacgaaggaaccagctcttctgtccagagagcaatgcctgggacagatgaaccccaagatgtgtgcggtgctgaggaatccaaggggaacttggaaagtcccaaacagggcagcaataaaatcaagctcaagagtcgcctttcagggggtgtacaccgccttgagtcagttgaagaatataacgagctgatggtgcggaatggggacccccggatccggatgttggaggtctcccgagatggccggaaacactccctcccgcagctgctggactcttccagtgcctcacaggaataccacattgtgaagaagtctacccgctccttaagcacgactcaggtggaatctccttggaggctcattcggccatccgtcatctcgatcattgggttgtacaaagaaaaaggcaagggccttggctttagtattgctggaggtcgagactgcattcgtggacagatggggatttttgtcaagaccatcttcccaaatggatcagctgcagaggacggaagacttaaagaaggggatgaaatcctagatgtaaatggaataccaataaagggcttgacatttcaagaagccattcatacctttaagcaaatccggagtggattatttgttttaacggtacgcacaaagttggtgagccccagcctcacaccctgctcgacacccacacacatgagcagatccgcctccccgaacttcaataccagtgggggagcctcagcgggaggttccgatgaaggcagttcttcatccctgggtcggaagacccctgggcccaaggacaggatcgtcatggaagtaacactcaacaaagagccaagagttggattaggcattggtgcctgctgcttggctctggaaaacagtcctcctggcatctacattcacagccttgctccaggatcagtggccaagatggagagcaacctgagccgcggggatcaaatcctggaagtgaactccgtcaacgtccgccatgctgctttaagcaaagtccacgccatcttgagtaaatgccctccaggacccgttcgccttgtcatcggccggcaccctaatccaaaggtttccgagcaggaaatggatgaagtcatagcacgcagcacttatcaggagagcaaagaggccaattcctctcctggcttaggtacccccttgaagagtccctctcttgcaaaaaaggactcccttatttctgaatctgaactctcccagtactttgcccacgatgtccctggccccttgtcagacttcatggtggccggttctgaggacgaggatcacccgggaagtggctgcagcacgtcggaggagggcagcctgcctcccagcacctccactcacaaggagcctggaaaacccagagccaacagcctcgtgactcttgggagccatcgggcttctgggctcttccacaagcaggtgacagttgccagacaagccagtctccccggaagcccacaggccctccgaaaccctctcctccgccagaggaaggtaggctgctacgatgccaacgatgccagtgatgaggaagagtttgacagagaaggggactgcatttcactcccaggggccctcccgggtcccatcaggcctctgtcagaggatgacccgaggcgtgtctcaatttcctcttccaagggcatggacgtccacaaccaagaggaacgaccccggaaaacactggtgagcaaggccatctcggcacctcttcttggtagctcagtggacttagaggagagtatcccagagggcatggtggatgctgcgtcctatgcagccaacctcacggactctgcagaggcccccaaggggagccctggaagctggtggaagaaggaactgtcaggatcaagtagcgcacccaaattggaatacacagtccgtacagacacccagagtccgacgaacactgggagccccagttccccccagcagaaaagtgaaggcctgggctccaggcacagaccagtggccagggtaagcccccactgcaagagatccgaggctgaggccaagcccagtggctcacagacagtgaacctgactggcagagccaatgatccatgcgatctggactcgagagtccaggccacttctgtcaaagtgactgtcgctggctttcagccaggtggagctgtggagaaggaatctctgggaaagctgaccactggagatgcttgtgtctctaccagctgtgaactagccagtgctctgtcccatctggatgccagccacctcacagagaacctgcccaaagctgcatcagagctggggcaacaacccatgactgaactggacagctcctcagacctcatctcttccccagggaagaagggggccgctcatcctgaccccagcaagacctctgtagacacagggcaagtcagtcggccagagaatcccagccagcctgcatcgcccagggtcaccaagtgcaaggccaggtctccagtcaggctcccccatgagggcagcccctccccgggggagaaagcagcggctccccctgactacagcaagactcgatcagcatcggaaaccagcacaccccacaataccaggagggtggctgccctcaggggagcgggacctggagcagagggaatgacaccagctggtgctgtcctgccaggagaccccctcacatcccaggagcagagacagggagctccaggtaaccacagtaaggctctggaaatgacaggaatccatgcacctgaaagctcccaggagccttccctgctggagggagcagattctgtgtcctcaagggcaccgcaggccagcctctccatgctgccatccactgacaacaccaaagaagcatgtggccatgtctcggggcactgctgcccaggggggagtagagagagccctgtgacggacattgacagcttcatcaaggagctggatgcttctgcagcaaggtctccgtcttcccagacgggggacagtggctctcaggagggcagtgctcagggccacccaccagccggggctggaggtgggagctcctgccgtgccgaaccagtcccggggggccagacctcctccccgaggagggcctgggctgctggtgcccccgcctacccacaatgggcctcccagccttcggttttagattcaattaatcccgacaaacattttactgtgaacaaaaactttctgagcaactactctagaaattttagcagttttcatgaagacagcacctccctatcaggcctgggtgacagcacggagccgtctctgtcatccatgtatggcgatgctgaggattcttcttctgaccctgagtcactcactgaagccccacgagcttctgccagggacggctggtcccctcctcgttcccgtgtgtctttgcacaaggaagatccttcggagtcagaagaggaacagattgagatttgttccacacgtggctgccccaatccaccctcgagtcctgctcatcttcccacccaggctgccatctgtcctgcctcagccaaagttctgtcattaaaatacagcactccgagagagtcggtggccagtccccgtgagaaggccgcctgcttgccaggctcatacacttcaggcccagactcttcccagccatcatcactcttggagatgagctctcaggagcatgaaactcatgcggacataagcacttcacagaaccacaggccctcgtgtgcagaagaaaccacagaagtcaccagcgctagctcagccatggaaaacagtccgctgtctaaagtagccaggcattttcacagtccgcccatcattctcagctcccccaacatggtaaatggcttggaacatgacctgctagatgacgaaaccctgaatcaatacgaaacaagcattaatgcagctgccagtctgtcctccttcagtgtggatgtccctaagaatggagaatctgttttggaaaacctccacatctctgaaagtcaagacctggatgacttgctacagaaaccaaaaatgatcgctaggaggcccatcatggcctggtttaaagaaataaataaacataaccaaggcacacatttgaggagcaaaaccgagaaggaacaacctctaatgcctgccagaagtcccgactccaagattcagatggtgagttcaagccaaaaaaagggcgttactgtgcctcatagccctcctcagccgaaaacaaacctggaaaataaggacctgtctaagaagagtccggcagaaatgcttctgactaatggtcagaaggcaaagtgtggtccgaagctgaagaggctcagcctcaagggcaaggccaaagtcaactctgaggcccctgctgcgaatgctgtgaaggctggggggacggaccacaggaaacccttgatctcaccccagacctcccacaaaacactttctaaggcagtgtcacagcggctccatgtagccgaccacgaggaccctgacagaaacaccacagctgcccccaggtccccccagtgtgtgctggaaagcaagccacctcttgccacctctgggccactgaaaccctcagtgtctgacacgagcatcaggacatttgtctcgcccctgacctctcccaagcctgttcctgagcaaggcatgtggagcaggttccacatggctgtcctctctgaacccgacagaggttgcccaaccacccctaaatctcctaagtgtagagcagagggcagggcgccccgtgctgactccgggccggtgagtccggcagcgtctaggaacggcatgtccgtggcagggaacagacagagtgagccgcgcctggccagccatgtggcagcagacacagcccaacccaggccgactggcgaaaaaggaggcaacataatggccagcgatcgcctcgaaagaacaaaccagctgaaaatcgtggagatttctgctgaagcagtgtcagagactgtatgtggtaacaagccagctgaaagcgacagacggggagggtgcttggcccagggcaactgtcaggagaagagtgaaatcaggctctatcgccaggtcgcagaatcatccacaagtcatccatcctcactcccatctcatgcctcccaggcagagcaggaaatgtcacgatcattcagcatggcaaaactggcgtcctcctcctcctcccttcaaacagccattagaaaggcagaatactcccagggaaaatcaagcctgatgtcagactcccgaggggtgcccagaaacagcattccagggggcccctcgggggaggaccatctctacttcaccccaaggccagcgaccaggacctactccatgccagcccagttctcaagccattttggacgggagggtcaccccccacacagcctgggtcgctctcgggacagccaggtccctgtgacaagcagtgttgtccccgaggcaaaggcatccagaggtggtcttcccagcctggctaatggacagggcatatatagtgtaaagccgctgctggacacatcgaggaatcttccagccacagatgaaggggatatcatttcagtccaggagacgagctgcctagtcacagacaaaatcaaagtcaccagacgacactactgctatgagcagaactggccccatgaatctacctcatttttctctgtgaagcagcggatcaagtcttttgagaacctggccaatgctgaccggcctgtagccaagtccggggcttccccatttttgtcggtgagctccaagcctcccattgggaggcggtcttccggcagcattgtttccgggagcctgggccacccaggtgacgcagcagcaaggttgttgagacgcagcttgagttcctgcagcgaaaaccaaagcgaagccggcaccctcctgccccagatggccaagtctccctcaatcatgacactgaccatctctcggcagaacccaccagagaccagtagcaagggctctgattcggaactaaagaaatcacttggtcctttgggaattcccaccccaacgatgaccctggcttctcctgttaagaggaacaagtcctcggtacgccacacgcagccctcgcccgtgtcccgctccaagctccaggagctgagagccttgagcatgcctgaccttgacaagctctgcagcgaggattactcagcagggccgagcgccgtgctcttcaaaactgagctggagatcacccccaggaggtcacctggccctcctgctggaggcgtttcgtgtcccgagaagggcgggaacagggcctgtccaggaggaagtggccctaaaaccagtgctgctgagacacccagttcagccagtgatacgggtgaagctgcccaggatctgccttttagaagaagctggtcagttaatttggatcaacttctagtctcagcgggggaccagcaaagattacagtctgttttatcgtcagtgggatcgaaatctaccatcctaactctcattcaggaagcgaaagcacaatcagagaatgaagaagatgtttgcttcatagtcttgaatagaaaagaaggctcaggtctgggattcagtgtggcaggagggacagatgtggagccaaaatcaatcacggtccacagggtgttttctcagggggcggcttctcaggaagggactatgaaccgaggggatttccttctgtcagtcaacggcgcctcactggctggcttagcccacgggaatgtcctgaaggttctgcaccaggcacagctgcacaaagatgccctcgtggtcatcaagaaagggatggatcagcccaggccctctgcccggcaggagcctcccacagccaatgggaagggtttgctgtccagaaagaccatccccctggagcctggcattgggagaagtgtggctgtacacgatgctctgtgtgttgaagtgctgaagacctcggctgggctgggactgagtctggatgggggaaaatcatcggtgacgggagatgggcccttggtcattaaaagagtgtacaaaggtggtgcggctgaacaagctggaataatagaagctggagatgaaattcttgctattaatgggaaacctctggttgggctcatgcactttgatgcctggaatattatgaagtctgtcccagaaggacctgtgcagttattaattagaaagcataggaattcttcatgaattttaacaagaatcattttctcagttctcttctttctttagcaaatcagagtgacttctttaaaccacaggttgttgaaatggccaacactggtacagacacggactataaaaatctccaagcttgtgcttacacatgaagcctgacttaactgtatgtgcaacagcaatgaaattaactccagaagccttccacctgcgtcacccaggccgggagggttccttcgttccagtgcctgtcccctacctttatgttatgtttactgatggggatacaagatgtgacacacccttctttatttgaaacaaacaaacatttagctagacctttgcttccttcttgccagctctcccaacatacccaatcctggtgatcagggaactaaaagtctgagggggacacaaatgtcacacctaagaggacaatcaatcattttgtatgattttgtaagtaaatgacagaatgcttttaggcacattcaatggaaggaggagatgtaggtctgtatatgttaccctgaaaagagaataagacttacttaaaaaaatgaattatgacctgttaggctgagctcaggaattgtccaaaaaggaaaaagcaaaataattaattgagagtattttttagtgagtgtaatgtataatgtacgtatgcaaagttcaactcaataggttattgatcaccatgaagtattgatcattttctatctcaaaagtgtaagccataaggctgttttacagaatagcacttctgataagctgtattaaatagccatgagcttcactgcttagagggagcagaaaggtcaacatctaaaagcaccttacaactagtttttgaacctgtcttgataagtgcttgaattcaagactggtcagtccaagagcagacaaaaatatcacaagtcagtcagtcactgggtttccatttctgaattttatgcactccaaccatgaatttaaactaaatttttagaaatcaagtatctttctaagtgtccttggatttatagacaatgtatgtacaatccaaatagaggagcttaatggaatccttttaggagactggttggtttttttccctctttcccaacatgtttaagaaatgtaacattctaagtattggatctcttttcttgacctagtataatgacaactgcagtgacttaagtttttgctgttttcgttttcccgctttgcaatttcctccttttgccaaaaatgttttcctacagaagactgtcgtgactcacgctacttgggaaactcactctggccactcctcctctggtggcatgagctgcttcccagtagctattccgattggatattccgttcgtcgtcacatagctggcttttctctcctcatgatgtaccttattttcttaggtaaataattccaaactctcatcgggtcataaagaggaggagaaacagggtgagtcaaggtaaaggagcagaaatgtagttacaagccaggtcgtcttcagtggcacaaaccaacccgttgagccctgacaacatgagtggagagtgcatttgccatacctgtgtgcatgacactaagattttatgttggagatacttctttaaataacctacagcttgggtctatggctgtgacccccagattcatggaggggctttagccatcagctttgtacatcatcatttttctgaatgaccaatcccactaaacatctttgaagtcggcctagagaggtccttcagatgagagagaaatagctggcttgtctgagtccagatttctcatcaactggcaatacaaaggaaaatatggtacaggagttagttagaaaggtcttattgattttacttctacttttcactacagttacaggtagaatactgtaggaagtcagtgcaaggtgcatgcttgattgatagatattgattgattgtttttcagtctctggggtcagttttgtggtttctgctttcttgcctaaatcaaagactatttcaagtcaacaacactgaaaactgcttttcgcctccactcttacagctgtgcctaataataattaattaataaacgcacagccctatgtgaacagacaggaatttcttgtgcaatgtggagcaaatggaatggtctccttccgcaagtctttttaatcctcatatctggagtacaagggtagacctctggcttaccacatacactatgctaaagtcatcagccactgctactacatcttgccagaaggtttccctcgccaacaaacagttgaaatttaagggaagaagcaaaagctaaactgtctttgaccctaagatagatagaaagctatttatttgtcttcagtgttcaaggcatgactagtatttctaattagcctaataaattcccacactttctgaagtgaacactaatggtattgtcctactaaaactgtcattgtttctttttttttaactggtcagtcattcacaataagctatgagggtaaataaatatgtgttataacaagtaaaccgtagttgcaagaatataccatgaagattaaagtaggctgggtttcatttccatcttcccacacatctcattgaatttgatggttgacttaattggcaccataactttgtatgatattatacattaacctttatttatgtaaagtaaaatgccttatatattaaagagtaagtgcaataatatgaaatagcctgtacattttaaaaatgttgtcaccaagttatataaatccacatctctgtaaacaaccttttttaagtaattttaaaaaaaataaacactctgcttactacttga

SEQ ID NO: 4245 - protein, 2839 aa, Homo sapiens; identical to SEQ ID NO: 503

SEQ ID NO: 4246 - DNA, 11765 bp, Homo sapiens
aatcggcgtctttcccagaccaccatgagggccggcgttcctgctcagctgtgaatgctgctgttgttatggctgctgcttggcttaggtgtgaatgagcccagggaaggacacacggccactgctggagggatcctccattcctgtgtcatttgcatgggtcctgctgtgaaatgaacctggcagggacttgttagacacttccttccttccctcattgagcactccagtgccattgttccacagttgttctaattgggtcctagcttcctcctgccaaggcaaacagcatagtctcgagtaggtgtccctaggctcatctgccagcctgaacatgaacacaggcaaagctgatgatggccagggaccccaggggacgtggggccctgtggggtctggcccccaggagcaagacctctgatgatgctggtgtctgggagtgagcaccatgcccatcacccaggacaatgccgtgctgcacctgcccctcctctaccagtggctgcagaacagcctgcaggaaggtggggatgggccggagcagcggctctgccaggcggccatccagaagctgcaggagtacatccagctgaactttgctgtggatgagagtacggtcccacctgatcacagcccccccgaaatggagatctgtactgtgtacctcaccaaggagctgggggacacagagactgtgggcctgagttttgggaacatccctgttttcggggactatggtgaaaagcgcagggggggcaagaagaggaaaacccaccagggtcctgtgctggatgtgggctgcatctgggtgacagagctgaggaagaacagcccagcagggaagagtgggaaggtccgactgcgggatgagatcctctcactgaatgggcagctgatggttggagttgatgtcagtggggccagttacctggctgagcagtgctggaatggcggctttatctacctgatcatgctgcgtcgctttaagcacaaagcccactccacttataatggcaacagtagcaacagctctgaaccaggagaaacacctaccttggagctgggtgaccgaactgcgaaaaaggggaaacgaaccagaaagtttggggtcatctccaggcctcctgccaacaaggcccctgaagaatccaagggcagcgctggctgtgaggtgtccagtgaccccagcactgagctggagaacggccctgaccctgaacttggaaacggccatgtctttcagctagaaaatggcccagattctctcaaggaggtggctggaccccatctagagaggtcagaagtggacagagggacagagcatagaattccaaagacagatgctcctctgaccacaagcaatgacaaacgccgcttctcaaaaggtgggaagacggacttccaatcgagtgactgcctggcacgggaggaagttggccgaatatggaagatggagctgctcaaagaatcggatgggctgggaattcaggttagtggaggccgaggatcaaagcgctcacctcacgctatcgttgtcactcaagtgaaggaaggaggtgccgctcacagggatggcaggctgtccttaggagatgagctgctggtaatcaatggtcatttactggtcgggctctcccacgaggaagcagtggccattcttcgctccgccacgggaatggtgcagcttgtggtggccagcaaggaaaactccgcagaggacctcctcaggttaacatctaagagcttgccagatctgaccagctcggtagaagatgtgtcctcctggactgataacgaagaccaggaggcagacggggaagaggacgaaggaaccagctcttctgtccagagagcaatgcctgggacagatgaaccccaagatgtgtgcggtgctgaggaatccaaggggaacttggaaagtcccaaacagggcagcaataaaatcaagctcaagagtcgcctttcagggggtgtacaccgccttgagtcagttgaagaatataacgagctgatggtgcggaatggggacccccggatccggatgttggaggtctcccgagatggccggaaacactccctcccgcagctgctggactcttccagtgcctcacaggaataccacattgtgaagaagtctacccgctccttaagcacgactcaggtggaatctccttggaggctcattcggccatccgtcatctcgatcattgggttgtacaaagaaaaaggcaagggccttggctttagtattgctggaggtcgagactgcattcgtggacagatggggatttttgtcaagaccatcttcccaaatggatcagctgcagaggacggaagacttaaagaaggggatgaaatcctagatgtaaatggaataccaataaagggcttgacatttcaagaagccattcatacctttaagcaaatccggagtggattatttgttttaacggtacgcacaaagttggtgagccccagcctcacaccctgctcgacacccacacacatgagcagatccgcctccccgaacttcaataccagtgggggagcctcagcgggaggttccgatgaaggcagttcttcatccctgggtcggaagacccctgggcccaaggacaggatcgtcatggaagtaacactcaacaaagagccaagagttggattaggcattggtgcctgctgcttggctctggaaaacagtcctcctggcatctacattcacagccttgctccaggatcagtggccaagatggagagcaacctgagccgcggggatcaaatcctggaagtgaactccgtcaacgtccgccatgctgctttaagcaaagtccacgccatcttgagtaaatgccctccaggacccgttcgccttgtcatcggccggcaccctaatccaaaggtttccgagcaggaaatggatgaagtcatagcacgcagcacttatcaggagagcaaagaggccaattcctctcctggcttaggtacccccttgaagagtccctctcttgcaaaaaaggactcccttatttctgaatctgaactctcccagtactttgcccacgatgtccctggccccttgtcagacttcatggtggccggttctgaggacgaggatcacccgggaagtggctgcagcacgtcggaggagggcagcctgcctcccagcacctccactcacaaggagcctggaaaacccagagccaacagcctcgtgactcttgggagccatcgggcttctgggctcttccacaagcaggtgacagttgccagacaagccagtctccccggaagcccacaggccctccgaaaccctctcctccgccagaggaaggtaggctgctacgatgccaacgatgccagtgatgaggaagagtttgacagagaaggggactgcatttcactcccaggggccctcccgggtcccatcaggcctctgtcagaggatgacccgaggcgtgtctcaatttcctcttccaagggcatggacgtccacaaccaagaggaacgaccccggaaaacactggtgagcaaggccatctcggcacctcttcttggtagctcagtggacttagaggagagtatcccagagggcatggtggatgctgcgtcctatgcagccaacctcacggactctgcagaggcccccaaggggagccctggaagctggtggaagaaggaactgtcaggatcaagtagcgcacccaaattggaatacacagtccgtacagacacccagagtccgacgaacactgggagccccagttccccccagcagaaaagtgaaggcctgggctccaggcacagaccagtggccagggtaagcccccactgcaagagatccgaggctgaggccaagcccagtggctcacagacagtgaacctgactggcagagccaatgatccatgcgatctggactcgagagtccaggccacttctgtcaaagtgactgtcgctggctttcagccaggtggagctgtggagaaggaatctctgggaaagctgaccactggagatgcttgtgtctctaccagctgtgaactagccagtgctctgtcccatctggatgccagccacctcacagagaacctgcccaaagctgcatcagagctggggcaacaacccatgactgaactggacagctcctcagacctcatctcttccccagggaagaagggggccgctcatcctgaccccagcaagacctctgtagacacagggcaagtcagtcggccagagaatcccagccagcctgcatcgcccagggtcaccaagtgcaaggccaggtctccagtcaggctcccccatgagggcagcccctccccgggggagaaagcagcggctccccctgactacagcaagactcgatcagcatcggaaaccagcacaccccacaataccaggagggtggctgccctcaggggagcgggacctggagcagagggaatgacaccagctggtgctgtcctgccaggagaccccctcacatcccaggagcagagacagggagctccaggtaaccacagtaaggctctggaaatgacaggaatccatgcacctgaaagctcccaggagccttccctgctggagggagcagattctgtgtcctcaagggcaccgcaggccagcctctccatgctgccatccactgacaacaccaaagaagcatgtggccatgtctcggggcactgctgcccaggggggagtagagagagccctgtgacggacattgacagcttcatcaaggagctggatgcttctgcagcaaggtctccgtcttcccagacgggggacagtggctctcaggagggcagtgctcagggccacccaccagccggggctggaggtgggagctcctgccgtgccgaaccagtcccggggggccagacctcctccccgaggagggcctgggctgctggtgcccccgcctacccacaatgggcctcccagccttcggttttagattcaattaatcccgacaaacattttactgtgaacaaaaactttctgagcaactactctagaaattttagcagttttcatgaagacagcacctccctatcaggcctgggtgacagcacggagccgtctctgtcatccatgtatggcgatgctgaggattcttcttctgaccctgagtcactcactgaagccccacgagcttctgccagggacggctggtcccctcctcgttcccgtgtgtctttgcacaaggaagatccttcggagtcagaagaggaacagattgagatttgttccacacgtggctgccccaatccaccctcgagtcctgctcatcttcccacccaggctgccatctgtcctgcctcagccaaagttctgtcattaaaatacagcactccgagagagtcggtggccagtccccgtgagaaggccgcctgcttgccaggctcatacacttcaggcccagactcttcccagccatcatcactcttggagatgagctctcaggagcatgaaactcatgcggacataagcacttcacagaaccacaggccctcgtgtgcagaagaaaccacagaagtcaccagcgctagctcagccatggaaaacagtccgctgtctaaagtagccaggcattttcacagtccgcccatcattctcagctcccccaacatggtaaatggcttggaacatgacctgctagatgacgaaaccctgaatcaatacgaaacaagcattaatgcagctgccagtctgtcctccttcagtgtggatgtccctaagaatggagaatctgttttggaaaacctccacatctctgaaagtcaagacctggatgacttgctacagaaaccaaaaatgatcgctaggaggcccatcatggcctggtttaaagaaataaataaacataaccaaggcacacatttgaggagcaaaaccgagaaggaacaacctctaatgcctgccagaagtcccgactccaagattcagatggtgagttcaagccaaaaaaagggcgttactgtgcctcatagccctcctcagccgaaaacaaacctggaaaataaggacctgtctaagaagagtccggcagaaatgcttctgactaatggtcagaaggcaaagtgtggtccgaagctgaagaggctcagcctcaagggcaaggccaaagtcaactctgaggcccctgctgcgaatgctgtgaaggctggggggacggaccacaggaaacccttgatctcaccccagacctcccacaaaacactttctaaggcagtgtcacagcggctccatgtagccgaccacgaggaccctgacagaaacaccacagctgcccccaggtccccccagtgtgtgctggaaagcaagccacctcttgccacctctgggccactgaaaccctcagtgtctgacacgagcatcaggacatttgtctcgcccctgacctctcccaagcctgttcctgagcaaggcatgtggagcaggttccacatggctgtcctctctgaacccgacagaggttgcccaaccacccctaaatctcctaagtgtagagcagagggcagggcgccccgtgctgactccgggccggtgagtccggcagcgtctaggaacggcatgtccgtggcagggaacagacagagtgagccgcgcctggccagccatgtggcagcagacacagcccaacccaggccgactggcgaaaaaggaggcaacataatggccagcgatcgcctcgaaagaacaaaccagctgaaaatcgtggagatttctgctgaagcagtgtcagagactgtatgtggtaacaagccagctgaaagcgacagacggggagggtgcttggcccagggcaactgtcaggagaagagtgaaatcaggctctatcgccaggtcgcagaatcatccacaagtcatccatcctcactcccatctcatgcctcccaggcagagcaggaaatgtcacgatcattcagcatggcaaaactggcgtcctcctcctcctcccttcaaacagccattagaaaggcagaatactcccagggaaaatcaagcctgatgtcagactcccgaggggtgcccagaaacagcattccagggggcccctcgggggaggaccatctctacttcaccccaaggccagcgaccaggacctactccatgccagcccagttctcaagccattttggacgggagggtcaccccccacacagcctgggtcgctctcgggacagccaggtccctgtgacaagcagtgttgtccccgaggcaaaggcatccagaggtggtcttcccagcctggctaatggacagggcatatatagtgtaaagccgctgctggacacatcgaggaatcttccagccacagatgaaggggatatcatttcagtccaggagacgagctgcctagtcacagacaaaatcaaagtcaccagacgacactactgctatgagcagaactggccccatgaatctacctcatttttctctgtgaagcagcggatcaagtcttttgagaacctggccaatgctgaccggcctgtagccaagtccggggcttccccatttttgtcggtgagctccaagcctcccattgggaggcggtcttccggcagcattgtttccgggagcctgggccacccaggtgacgcagcagcaaggttgttgagacgcagcttgagttcctgcagcgaaaaccaaagcgaagccggcaccctcctgccccagatggccaagtctccctcaatcatgacactgaccatctctcggcagaacccaccagagaccagtagcaagggctctgattcggaactaaagaaatcacttggtcctttgggaattcccaccccaacgatgaccctggcttctcctgttaagaggaacaagtcctcggtacgccacacgcagccctcgcccgtgtcccgctccaagctccaggagctgagagccttgagcatgcctgaccttgacaagctctgcagcgaggattactcagcagggccgagcgccgtgctcttcaaaactgagctggagatcacccccaggaggtcacctggccctcctgctggaggcgtttcgtgtcccgagaagggcgggaacagggcctgtccaggaggaagtggccctaaaaccagtgctgctgagacacccagttcagccagtgatacgggtgaagctgcccaggatctgccttttagaagaagctggtcagttaatttggatcaacttctagtctcagcgggggaccagcaaagattacagtctgttttatcgtcagtgggatcgaaatctaccatcctaactctcattcaggaagcgaaagcacaatcagagaatgaagaagatgtttgcttcatagtcttgaatagaaaagaaggctcaggtctgggattcagtgtggcaggagggacagatgtggagccaaaatcaatcacggtccacagggtgttttctcagggggcggcttctcaggaagggactatgaaccgaggggatttccttctgtcagtcaacggcgcctcactggctggcttagcccacgggaatgtcctgaaggttctgcaccaggcacagctgcacaaagatgccctcgtggtcatcaagaaagggatggatcagcccaggccctctgcccggcaggagcctcccacagccaatgggaagggtttgctgtccagaaagaccatccccctggagcctggcattgggagaagtgtggctgtacacgatgctctgtgtgttgaagtgctgaagacctcggctgggctgggactgagtctggatgggggaaaatcatcggtgacgggagatgggcccttggtcattaaaagagtgtacaaaggtggtgcggctgaacaagctggaataatagaagctggagatgaaattcttgctattaatgggaaacctctggttgggctcatgcactttgatgcctggaatattatgaagtctgtcccagaaggacctgtgcagttattaattagaaagcataggaattcttcatgaattttaacaagaatcattttctcagttctcttctttctttagcaaatcagagtgacttctttaaaccacaggttgttgaaatggccaacactggtacagacacggactataaaaatctccaagcttgtgcttacacatgaagcctgacttaactgtatgtgcaacagcaatgaaattaactccagaagccttccacctgcgtcacccaggccgggagggttccttcgttccagtgcctgtcccctacctttatgttatgtttactgatggggatacaagatgtgacacacccttctttatttgaaacaaacaaacatttagctagacctttgcttccttcttgccagctctcccaacatacccaatcctggtgatcagggaactaaaagtctgagggggacacaaatgtcacacctaagaggacaatcaatcattttgtatgattttgtaagtaaatgacagaatgcttttaggcacattcaatggaaggaggagatgtaggtctgtatatgttaccctgaaaagagaataagacttacttaaaaaaatgaattatgacctgttaggctgagctcaggaattgtccaaaaaggaaaaagcaaaataattaattgagagtattttttagtgagtgtaatgtataatgtacgtatgcaaagttcaactcaataggttattgatcaccatgaagtattgatcattttctatctcaaaagtgtaagccataaggctgttttacagaatagcacttctgataagctgtattaaatagccatgagcttcactgcttagagggagcagaaaggtcaacatctaaaagcaccttacaactagtttttgaacctgtcttgataagtgcttgaattcaagactggtcagtccaagagcagacaaaaatatcacaagtcagtcagtcactgggtttccatttctgaattttatgcactccaaccatgaatttaaactaaatttttagaaatcaagtatctttctaagtgtccttggatttatagacaatgtatgtacaatccaaatagaggagcttaatggaatccttttaggagactggttggtttttttccctctttcccaacatgtttaagaaatgtaacattctaagtattggatctcttttcttgacctagtataatgacaactgcagtgacttaagtttttgctgttttcgttttcccgctttgcaatttcctccttttgccaaaaatgttttcctacagaagactgtcgtgactcacgctacttgggaaactcactctggccactcctcctctggtggcatgagctgcttcccagtagctattccgattggatattccgttcgtcgtcacatagctggcttttctctcctcatgatgtaccttattttcttaggtaaataattccaaactctcatcgggtcataaagaggaggagaaacagggtgagtcaaggtaaaggagcagaaatgtagttacaagccaggtcgtcttcagtggcacaaaccaacccgttgagccctgacaacatgagtggagagtgcatttgccatacctgtgtgcatgacactaagattttatgttggagatacttctttaaataacctacagcttgggtctatggctgtgacccccagattcatggaggggctttagccatcagctttgtacatcatcatttttctgaatgaccaatcccactaaacatctttgaagtcggcctagagaggtccttcagatgagagagaaatagctggcttgtctgagtccagatttctcatcaactggcaatacaaaggaaaatatggtacaggagttagttagaaaggtcttattgattttacttctacttttcactacagttacaggtagaatactgtaggaagtcagtgcaaggtgcatgcttgattgatagatattgattgattgtttttcagtctctggggtcagttttgtggtttctgctttcttgcctaaatcaaagactatttcaagtcaacaacactgaaaactgcttttcgcctccactcttacagctgtgcctaataataattaattaataaacgcacagccctatgtgaacagacaggaatttcttgtgcaatgtggagcaaatggaatggtctccttccgcaagtctttttaatcctcatatctggagtacaagggtagacctctggcttaccacatacactatgctaaagtcatcagccactgctactacatcttgccagaaggtttccctcgccaacaaacagttgaaatttaagggaagaagcaaaagctaaactgtctttgaccctaagatagatagaaagctatttatttgtcttcagtgttcaaggcatgactagtatttctaattagcctaataaattcccacactttctgaagtgaacactaatggtattgtcctactaaaactgtcattgtttctttttttttaactggtcagtcattcacaataagctatgagggtaaataaatatgtgttataacaagtaaaccgtagttgcaagaatataccatgaagattaaagtaggctgggtttcatttccatcttcccacacatctcattgaatttgatggttgacttaattggcaccataactttgtatgatattatacattaacctttatttatgtaaagtaaaatgccttatatattaaagagtaagtgcaataatatgaaatagcctgtacattttaaaaatgttgtcaccaagttatataaatccacatctctgtaaacaaccttttttaagtaattttaaaaaaaataaacactctgcttactacttga

SEQ ID NO: 4247 - protein, 2839 aa, Homo sapiens; identical to SEQ ID NO: 503

SEQ ID NO: 4248 - DNA, 11812 bp, Homo sapiens
agaagtgtggcgtcttggtccaggatgcaggtccctgattcgggttggacgtggtcatcaaacccagaaattgaaggatcttgggcctgccttgatgttcatttctctcatctataaaattgaaggctggaggaggtgtgaatgagcccagggaaggacacacggccactgctggagggatcctccattcctgtgtcatttgcatgggtcctgctgtgaaatgaacctggcagggacttgttagacacttccttccttccctcattgagcactccagtgccattgttccacagttgttctaattgggtcctagcttcctcctgccaaggcaaacagcatagtctcgagtaggtgtccctaggctcatctgccagcctgaacatgaacacaggcaaagctgatgatggccagggaccccaggggacgtggggccctgtggggtctggcccccaggagcaagacctctgatgatgctggtgtctgggagtgagcaccatgcccatcacccaggacaatgccgtgctgcacctgcccctcctctaccagtggctgcagaacagcctgcaggaaggtggggatgggccggagcagcggctctgccaggcggccatccagaagctgcaggagtacatccagctgaactttgctgtggatgagagtacggtcccacctgatcacagcccccccgaaatggagatctgtactgtgtacctcaccaaggagctgggggacacagagactgtgggcctgagttttgggaacatccctgttttcggggactatggtgaaaagcgcagggggggcaagaagaggaaaacccaccagggtcctgtgctggatgtgggctgcatctgggtgacagagctgaggaagaacagcccagcagggaagagtgggaaggtccgactgcgggatgagatcctctcactgaatgggcagctgatggttggagttgatgtcagtggggccagttacctggctgagcagtgctggaatggcggctttatctacctgatcatgctgcgtcgctttaagcacaaagcccactccacttataatggcaacagtagcaacagctctgaaccaggagaaacacctaccttggagctgggtgaccgaactgcgaaaaaggggaaacgaaccagaaagtttggggtcatctccaggcctcctgccaacaaggcccctgaagaatccaagggcagcgctggctgtgaggtgtccagtgaccccagcactgagctggagaacggccctgaccctgaacttggaaacggccatgtctttcagctagaaaatggcccagattctctcaaggaggtggctggaccccatctagagaggtcagaagtggacagagggacagagcatagaattccaaagacagatgctcctctgaccacaagcaatgacaaacgccgcttctcaaaaggtgggaagacggacttccaatcgagtgactgcctggcacgggaggaagttggccgaatatggaagatggagctgctcaaagaatcggatgggctgggaattcaggttagtggaggccgaggatcaaagcgctcacctcacgctatcgttgtcactcaagtgaaggaaggaggtgccgctcacagggatggcaggctgtccttaggagatgagctgctggtaatcaatggtcatttactggtcgggctctcccacgaggaagcagtggccattcttcgctccgccacgggaatggtgcagcttgtggtggccagcaaggaaaactccgcagaggacctcctcaggttaacatctaagagcttgccagatctgaccagctcggtagaagatgtgtcctcctggactgataacgaagaccaggaggcagacggggaagaggacgaaggaaccagctcttctgtccagagagcaatgcctgggacagatgaaccccaagatgtgtgcggtgctgaggaatccaaggggaacttggaaagtcccaaacagggcagcaataaaatcaagctcaagagtcgcctttcagggggtgtacaccgccttgagtcagttgaagaatataacgagctgatggtgcggaatggggacccccggatccggatgttggaggtctcccgagatggccggaaacactccctcccgcagctgctggactcttccagtgcctcacaggaataccacattgtgaagaagtctacccgctccttaagcacgactcaggtggaatctccttggaggctcattcggccatccgtcatctcgatcattgggttgtacaaagaaaaaggcaagggccttggctttagtattgctggaggtcgagactgcattcgtggacagatggggatttttgtcaagaccatcttcccaaatggatcagctgcagaggacggaagacttaaagaaggggatgaaatcctagatgtaaatggaataccaataaagggcttgacatttcaagaagccattcatacctttaagcaaatccggagtggattatttgttttaacggtacgcacaaagttggtgagccccagcctcacaccctgctcgacacccacacacatgagcagatccgcctccccgaacttcaataccagtgggggagcctcagcgggaggttccgatgaaggcagttcttcatccctgggtcggaagacccctgggcccaaggacaggatcgtcatggaagtaacactcaacaaagagccaagagttggattaggcattggtgcctgctgcttggctctggaaaacagtcctcctggcatctacattcacagccttgctccaggatcagtggccaagatggagagcaacctgagccgcggggatcaaatcctggaagtgaactccgtcaacgtccgccatgctgctttaagcaaagtccacgccatcttgagtaaatgccctccaggacccgttcgccttgtcatcggccggcaccctaatccaaaggtttccgagcaggaaatggatgaagtcatagcacgcagcacttatcaggagagcaaagaggccaattcctctcctggcttaggtacccccttgaagagtccctctcttgcaaaaaaggactcccttatttctgaatctgaactctcccagtactttgcccacgatgtccctggccccttgtcagacttcatggtggccggttctgaggacgaggatcacccgggaagtggctgcagcacgtcggaggagggcagcctgcctcccagcacctccactcacaaggagcctggaaaacccagagccaacagcctcgtgactcttgggagccatcgggcttctgggctcttccacaagcaggtgacagttgccagacaagccagtctccccggaagcccacaggccctccgaaaccctctcctccgccagaggaaggtaggctgctacgatgccaacgatgccagtgatgaggaagagtttgacagagaaggggactgcatttcactcccaggggccctcccgggtcccatcaggcctctgtcagaggatgacccgaggcgtgtctcaatttcctcttccaagggcatggacgtccacaaccaagaggaacgaccccggaaaacactggtgagcaaggccatctcggcacctcttcttggtagctcagtggacttagaggagagtatcccagagggcatggtggatgctgcgtcctatgcagccaacctcacggactctgcagaggcccccaaggggagccctggaagctggtggaagaaggaactgtcaggatcaagtagcgcacccaaattggaatacacagtccgtacagacacccagagtccgacgaacactgggagccccagttccccccagcagaaaagtgaaggcctgggctccaggcacagaccagtggccagggtaagcccccactgcaagagatccgaggctgaggccaagcccagtggctcacagacagtgaacctgactggcagagccaatgatccatgcgatctggactcgagagtccaggccacttctgtcaaagtgactgtcgctggctttcagccaggtggagctgtggagaaggaatctctgggaaagctgaccactggagatgcttgtgtctctaccagctgtgaactagccagtgctctgtcccatctggatgccagccacctcacagagaacctgcccaaagctgcatcagagctggggcaacaacccatgactgaactggacagctcctcagacctcatctcttccccagggaagaagggggccgctcatcctgaccccagcaagacctctgtagacacagggcaagtcagtcggccagagaatcccagccagcctgcatcgcccagggtcaccaagtgcaaggccaggtctccagtcaggctcccccatgagggcagcccctccccgggggagaaagcagcggctccccctgactacagcaagactcgatcagcatcggaaaccagcacaccccacaataccaggagggtggctgccctcaggggagcgggacctggagcagagggaatgacaccagctggtgctgtcctgccaggagaccccctcacatcccaggagcagagacagggagctccaggtaaccacagtaaggctctggaaatgacaggaatccatgcacctgaaagctcccaggagccttccctgctggagggagcagattctgtgtcctcaagggcaccgcaggccagcctctccatgctgccatccactgacaacaccaaagaagcatgtggccatgtctcggggcactgctgcccaggggggagtagagagagccctgtgacggacattgacagcttcatcaaggagctggatgcttctgcagcaaggtctccgtcttcccagacgggggacagtggctctcaggagggcagtgctcagggccacccaccagccggggctggaggtgggagctcctgccgtgccgaaccagtcccggggggccagacctcctccccgaggagggcctgggctgctggtgcccccgcctacccacaatgggcctcccagccttcggttttagattcaattaatcccgacaaacattttactgtgaacaaaaactttctgagcaactactctagaaattttagcagttttcatgaagacagcacctccctatcaggcctgggtgacagcacggagccgtctctgtcatccatgtatggcgatgctgaggattcttcttctgaccctgagtcactcactgaagccccacgagcttctgccagggacggctggtcccctcctcgttcccgtgtgtctttgcacaaggaagatccttcggagtcagaagaggaacagattgagatttgttccacacgtggctgccccaatccaccctcgagtcctgctcatcttcccacccaggctgccatctgtcctgcctcagccaaagttctgtcattaaaatacagcactccgagagagtcggtggccagtccccgtgagaaggccgcctgcttgccaggctcatacacttcaggcccagactcttcccagccatcatcactcttggagatgagctctcaggagcatgaaactcatgcggacataagcacttcacagaaccacaggccctcgtgtgcagaagaaaccacagaagtcaccagcgctagctcagccatggaaaacagtccgctgtctaaagtagccaggcattttcacagtccgcccatcattctcagctcccccaacatggtaaatggcttggaacatgacctgctagatgacgaaaccctgaatcaatacgaaacaagcattaatgcagctgccagtctgtcctccttcagtgtggatgtccctaagaatggagaatctgttttggaaaacctccacatctctgaaagtcaagacctggatgacttgctacagaaaccaaaaatgatcgctaggaggcccatcatggcctggtttaaagaaataaataaacataaccaaggcacacatttgaggagcaaaaccgagaaggaacaacctctaatgcctgccagaagtcccgactccaagattcagatggtgagttcaagccaaaaaaagggcgttactgtgcctcatagccctcctcagccgaaaacaaacctggaaaataaggacctgtctaagaagagtccggcagaaatgcttctgactaatggtcagaaggcaaagtgtggtccgaagctgaagaggctcagcctcaagggcaaggccaaagtcaactctgaggcccctgctgcgaatgctgtgaaggctggggggacggaccacaggaaacccttgatctcaccccagacctcccacaaaacactttctaaggcagtgtcacagcggctccatgtagccgaccacgaggaccctgacagaaacaccacagctgcccccaggtccccccagtgtgtgctggaaagcaagccacctcttgccacctctgggccactgaaaccctcagtgtctgacacgagcatcaggacatttgtctcgcccctgacctctcccaagcctgttcctgagcaaggcatgtggagcaggttccacatggctgtcctctctgaacccgacagaggttgcccaaccacccctaaatctcctaagtgtagagcagagggcagggcgccccgtgctgactccgggccggtgagtccggcagcgtctaggaacggcatgtccgtggcagggaacagacagagtgagccgcgcctggccagccatgtggcagcagacacagcccaacccaggccgactggcgaaaaaggaggcaacataatggccagcgatcgcctcgaaagaacaaaccagctgaaaatcgtggagatttctgctgaagcagtgtcagagactgtatgtggtaacaagccagctgaaagcgacagacggggagggtgcttggcccagggcaactgtcaggagaagagtgaaatcaggctctatcgccaggtcgcagaatcatccacaagtcatccatcctcactcccatctcatgcctcccaggcagagcaggaaatgtcacgatcattcagcatggcaaaactggcgtcctcctcctcctcccttcaaacagccattagaaaggcagaatactcccagggaaaatcaagcctgatgtcagactcccgaggggtgcccagaaacagcattccagggggcccctcgggggaggaccatctctacttcaccccaaggccagcgaccaggacctactccatgccagcccagttctcaagccattttggacgggagggtcaccccccacacagcctgggtcgctctcgggacagccaggtccctgtgacaagcagtgttgtccccgaggcaaaggcatccagaggtggtcttcccagcctggctaatggacagggcatatatagtgtaaagccgctgctggacacatcgaggaatcttccagccacagatgaaggggatatcatttcagtccaggagacgagctgcctagtcacagacaaaatcaaagtcaccagacgacactactgctatgagcagaactggccccatgaatctacctcatttttctctgtgaagcagcggatcaagtcttttgagaacctggccaatgctgaccggcctgtagccaagtccggggcttccccatttttgtcggtgagctccaagcctcccattgggaggcggtcttccggcagcattgtttccgggagcctgggccacccaggtgacgcagcagcaaggttgttgagacgcagcttgagttcctgcagcgaaaaccaaagcgaagccggcaccctcctgccccagatggccaagtctccctcaatcatgacactgaccatctctcggcagaacccaccagagaccagtagcaagggctctgattcggaactaaagaaatcacttggtcctttgggaattcccaccccaacgatgaccctggcttctcctgttaagaggaacaagtcctcggtacgccacacgcagccctcgcccgtgtcccgctccaagctccaggagctgagagccttgagcatgcctgaccttgacaagctctgcagcgaggattactcagcagggccgagcgccgtgctcttcaaaactgagctggagatcacccccaggaggtcacctggccctcctgctggaggcgtttcgtgtcccgagaagggcgggaacagggcctgtccaggaggaagtggccctaaaaccagtgctgctgagacacccagttcagccagtgatacgggtgaagctgcccaggatctgccttttagaagaagctggtcagttaatttggatcaacttctagtctcagcgggggaccagcaaagattacagtctgttttatcgtcagtgggatcgaaatctaccatcctaactctcattcaggaagcgaaagcacaatcagagaatgaagaagatgtttgcttcatagtcttgaatagaaaagaaggctcaggtctgggattcagtgtggcaggagggacagatgtggagccaaaatcaatcacggtccacagggtgttttctcagggggcggcttctcaggaagggactatgaaccgaggggatttccttctgtcagtcaacggcgcctcactggctggcttagcccacgggaatgtcctgaaggttctgcaccaggcacagctgcacaaagatgccctcgtggtcatcaagaaagggatggatcagcccaggccctctgcccggcaggagcctcccacagccaatgggaagggtttgctgtccagaaagaccatccccctggagcctggcattgggagaagtgtggctgtacacgatgctctgtgtgttgaagtgctgaagacctcggctgggctgggactgagtctggatgggggaaaatcatcggtgacgggagatgggcccttggtcattaaaagagtgtacaaaggtggtgcggctgaacaagctggaataatagaagctggagatgaaattcttgctattaatgggaaacctctggttgggctcatgcactttgatgcctggaatattatgaagtctgtcccagaaggacctgtgcagttattaattagaaagcataggaattcttcatgaattttaacaagaatcattttctcagttctcttctttctttagcaaatcagagtgacttctttaaaccacaggttgttgaaatggccaacactggtacagacacggactataaaaatctccaagcttgtgcttacacatgaagcctgacttaactgtatgtgcaacagcaatgaaattaactccagaagccttccacctgcgtcacccaggccgggagggttccttcgttccagtgcctgtcccctacctttatgttatgtttactgatggggatacaagatgtgacacacccttctttatttgaaacaaacaaacatttagctagacctttgcttccttcttgccagctctcccaacatacccaatcctggtgatcagggaactaaaagtctgagggggacacaaatgtcacacctaagaggacaatcaatcattttgtatgattttgtaagtaaatgacagaatgcttttaggcacattcaatggaaggaggagatgtaggtctgtatatgttaccctgaaaagagaataagacttacttaaaaaaatgaattatgacctgttaggctgagctcaggaattgtccaaaaaggaaaaagcaaaataattaattgagagtattttttagtgagtgtaatgtataatgtacgtatgcaaagttcaactcaataggttattgatcaccatgaagtattgatcattttctatctcaaaagtgtaagccataaggctgttttacagaatagcacttctgataagctgtattaaatagccatgagcttcactgcttagagggagcagaaaggtcaacatctaaaagcaccttacaactagtttttgaacctgtcttgataagtgcttgaattcaagactggtcagtccaagagcagacaaaaatatcacaagtcagtcagtcactgggtttccatttctgaattttatgcactccaaccatgaatttaaactaaatttttagaaatcaagtatctttctaagtgtccttggatttatagacaatgtatgtacaatccaaatagaggagcttaatggaatccttttaggagactggttggtttttttccctctttcccaacatgtttaagaaatgtaacattctaagtattggatctcttttcttgacctagtataatgacaactgcagtgacttaagtttttgctgttttcgttttcccgctttgcaatttcctccttttgccaaaaatgttttcctacagaagactgtcgtgactcacgctacttgggaaactcactctggccactcctcctctggtggcatgagctgcttcccagtagctattccgattggatattccgttcgtcgtcacatagctggcttttctctcctcatgatgtaccttattttcttaggtaaataattccaaactctcatcgggtcataaagaggaggagaaacagggtgagtcaaggtaaaggagcagaaatgtagttacaagccaggtcgtcttcagtggcacaaaccaacccgttgagccctgacaacatgagtggagagtgcatttgccatacctgtgtgcatgacactaagattttatgttggagatacttctttaaataacctacagcttgggtctatggctgtgacccccagattcatggaggggctttagccatcagctttgtacatcatcatttttctgaatgaccaatcccactaaacatctttgaagtcggcctagagaggtccttcagatgagagagaaatagctggcttgtctgagtccagatttctcatcaactggcaatacaaaggaaaatatggtacaggagttagttagaaaggtcttattgattttacttctacttttcactacagttacaggtagaatactgtaggaagtcagtgcaaggtgcatgcttgattgatagatattgattgattgtttttcagtctctggggtcagttttgtggtttctgctttcttgcctaaatcaaagactatttcaagtcaacaacactgaaaactgcttttcgcctccactcttacagctgtgcctaataataattaattaataaacgcacagccctatgtgaacagacaggaatttcttgtgcaatgtggagcaaatggaatggtctccttccgcaagtctttttaatcctcatatctggagtacaagggtagacctctggcttaccacatacactatgctaaagtcatcagccactgctactacatcttgccagaaggtttccctcgccaacaaacagttgaaatttaagggaagaagcaaaagctaaactgtctttgaccctaagatagatagaaagctatttatttgtcttcagtgttcaaggcatgactagtatttctaattagcctaataaattcccacactttctgaagtgaacactaatggtattgtcctactaaaactgtcattgtttctttttttttaactggtcagtcattcacaataagctatgagggtaaataaatatgtgttataacaagtaaaccgtagttgcaagaatataccatgaagattaaagtaggctgggtttcatttccatcttcccacacatctcattgaatttgatggttgacttaattggcaccataactttgtatgatattatacattaacctttatttatgtaaagtaaaatgccttatatattaaagagtaagtgcaataatatgaaatagcctgtacattttaaaaatgttgtcaccaagttatataaatccacatctctgtaaacaaccttttttaagtaattttaaaaaaaataaacactctgcttactacttga

SEQ ID NO: 4249 - protein, 2839 aa, Homo sapiens; identical to SEQ ID NO: 503

SEQ ID NO: 4250 - DNA, 2642 bp, Homo sapiens
aggtgaattgcaagggcctcatctcgtccccagctgctaatctggccattgaatgctaacctgtaggcctccgtggctccttttgctgagatgttaatggagttgagaggatacgggacccacccacagttaatccaggatcttcagtcaaacccaaggcccctgggtgcagctgcaggactcacagacaggatggcctctggggaaagaggcctgtgtcaggtcttaaggaagaaaaagagttctcagagcgggccacaaacaaaagaaacaagaaagggaaagtgatggggttcggaatcgaagtgaatttaaggcttatctgggccctcaccctctctgagcctgcattgctgggtgtaattgccagcctccctcttatctagagtgaaggaaagatggtctaagagcagcaaagtcaccaaactgcctttctgcctcctcacgtccctaaatttcccagcggcgcacctggcacgtagtagcgcttcccttgagcctctgttcctgctaatctctgtcacacttagggatggtgtcgttgaagagaatggtgagtccattgcactgtttcctgggacatcaaggtcgcttacctgctctccccttttgccttcttcatcgtcttctgtttcccagaggtttggccaagtgcttgttgctctgccctccagagggtgggtgcttcctgattttactggattttcattccggaatcagacttatagcgtgagcttccctccttatcaaaacagttagcaagtacatactgcccactgggtcccttgttggtttcgtgtgtgtgtaagtttcctagagtttaaaaacaaaaaaaacatagatgaaatatacccaagaatagttccttcttactaagaaggaggcatagaacaatgtgacatacactcttgcctgtaggattagctcattggtggtttcattggaggattcacacctgatagtggaaagtctttgttctctggagaaactgggtgaagagattgccgagacacagcagagcacacagattgcagaatttcagccttcacttggtacctagggccaaggtgatttagggtcccttccgcctcagtgcatgttgcccccaattccagaggcgctctagggcataaatcccaaactagaggctagcaatcctccctttaccctcactcatgtcagaccattgtgtttactggcaaatgagtctccctgcctgatgtcccaactttgccccagaaccctcctctcagtttctccttctgttgcaggtgcccactcggggccacatttcaggtaggctacatcgaactttcatctcagcagtagtcattaaaaaccagccgctgaagaatggtggctgttggtcattcctgttggcatggtagcgtcttcttcattggatcattatgctgctgcttctgtacggagtattgggcagaaggcatttctgaacatatttgatgctatgacttatcagggttctgtctgtgtggataactgtacagcacattaactttgaaatatgtccatttccttctttggccctcagtagcagcccattgcgtggtggtgtggtcaggtggacatggaagcattgttctctgagatgattagcccattcaggtcacatatctccattccatgccccagagacaagcataggaaagagctcgctatcaaaggctaagcaataaagagtaaaggaaagtctgtcgtggagtttctagggaaggtatgcccactaccaagaaaaagacgcaaaatagatggcccttttgctttctccctgtgttgctgtgtaaactggcataggcatcttgtctccagccttaggatgcagccactgtgcaggagagagtaagtagcaggtcccagagaagcacagctcagagccgtgatacaggtggagatttatttatgcatcgcttatctccaaaaagagttgaggcagaccgtgggctcactcagatttgagctgcccgattcctcttctgattctcattctgattccaagtagaattcctctctactctattttctaggcagatgaaagtaattttattctttcttccaacttcaaaggaaggaataactattgagacatttggggaaaagggggagttccttgctttggagattgccggctgaacccagggagcaaacatcctgggctgtcactgaagtgaggactgcttttaaatgacacagcactgaagacacttcatgcttctgcttgtgaaaagccaagcactagttttcactccctcctaggactgtggaggctgaaaggtctgcctgcagacttggtatggtttcttccgtcttccaccctttgtgcctcccagactttgggaagttttgaagatgaaacaagctccggaagtgcttggtggtgtcaggaagaccagaatacaggagaaagtaccctgtttgttcctgtattttccggtctgactcaagtagcaatgatgtactctatttttatgaatggaaggccttcaaagcctgttctatactatataaatgtatgccttatactatatagttcatcattatatcctgaacaccctacaccatctgtgatatacaattggtattcaaacattattgtgaatgaacaacacaaggattgctcatgt

SEQ ID NO: 4251 - protein, 66 aa, Homo sapiens
MVSLKRMVSPLHCFLGHQGRLPALPFCLLHRLLFPRGLAKCLLLCPPEGGCFLILLDFHSGIRLIA

SEQ ID NO: 4252 - DNA, 3443 bp, Homo sapiens
acacaagcccggcctcggcgcgccatgtgtggtaacacgctcagccgctgccacgctatttaaacgcgggctatggatccaggaaccggcgcgaatcaatgagatcaaatgcgagggagatgcaccgtcaattacaaacacttggacaagtctaactttttttttcttctacaaaaacgctttcaaaagcaaccttagcaacgcccaaataagaagccacctctaagcaaaatagtatatgtataaacggagggcgaatatatacaagtatatatatatgtatattacagacgcacaggtttacacccggtgaactttttctttttctttttcttttttttttaagaaaaactagtgacattgcagagaaggacgcttcctctctatcttttggcgcattagtgaagggggtattctattttgttaaagcgcccaagggggcgcagggaccttggagagaagagtggggaggaaagaggaagggtgggtggggggcagagggcgagtcggcggcggcgagggcaagctctttcttgcggcacgatgccgtctctgctggtgctcactttctccccgtgcgtactactcggctgggcgttgctggccggcggcaccggtggcggtggcgttggcggcggcggcggtggcgcgggcataggcggcggacgccaggagagagaggcgctgccgccacagaagatcgaggtgctggtgttactgccccaggatgactcgtacttgttttcactcacccgggtgcggccggccatcgagtatgctctgcgcagcgtggagggcaacgggactgggaggcggcttctgccgccgggcactcgcttccaggtggcttacgaggattcagactgtgggaaccgtgcgctcttcagcttggtggaccgcgtggcggcggcgcggggcgccaagccagaccttatcctggggccagtgtgcgagtatgcagcagcgccagtggcccggcttgcatcgcactgggacctgcccatgctgtcggctggggcgctggccgctggcttccagcacaaggactctgagtactcgcacctcacgcgcgtggcgcccgcctacgccaagatgggcgagatgatgctcgccctgttccgccaccaccactggagccgcgctgcactggtctacagcgacgacaagctggagcggaactgctacttcaccctcgagggggtccacgaggtcttccaggaggagggtttgcacacgtccatctacagtttcgacgagaccaaagacttggatctggaagacatcgtgcgcaatatccaggccagtgagagagtggtgatcatgtgtgcgagcagtgacaccatccggagcatcatgctggtggcgcacaggcatggcatgaccagtggagactacgccttcttcaacattgagctcttcaacagctcttcctatggagatggctcatggaagagaggagacaaacacgactttgaagctaagcaagcatactcgtccctccagacagtcactctactgaggacagtgaaacctgagtttgagaagttttccatggaggtgaaaagttcagttgagaaacaagggctcaatatggaggattacgttaacatgtttgttgaaggattccacgatgccatcctcctctacgtcttggctctacatgaagtactcagagctggttacagcaaaaaggatggagggaaaattatacagcagacttggaacagaacatttgaaggtatcgccgggcaggtgtccatagatgccaacggagaccgatatggggatttctctgtgattgccatgactgatgtggaggcgggcacccaggaggttattggtgattattttggaaaagaaggtcgttttgaaatgcggccgaatgtcaaatatccttggggccctttaaaactgagaatagatgaaaaccgaattgtagagcatacaaacagctctccctgcaaatcatgtggcctagaagaatcggcagtgacaggaattgtcgtgggggctttactaggagctggcttgctaatggccttctactttttcaggaagaaatacagaataaccattgagaggcgaacccagcaagaagaaagtaaccttggaaaacatcgggaattacgggaagattccatcagatcccatttttcagtagcttaaaggaagccccccactttttttttttctgcctgagattctttaaggagatagacgggttgaaagacatcaatgaaacagaaggggcgttcttgaagaattcataattttaagcagttagtaatttcattttaaaatttctgtagaagctcaggaattatgattaatcaccatctgcctccaggcctttcatctcatgacaaacaaatataataatgatatcgtgtcactctgttaaatgttcatactgtttcaagcccatatgattagatttatgtttttaaaatctgttgtctccatatcttgatggcttttgggagcatttcacacaaggatataaaatgcggttttcttaaatgaaatgttttgtagctagaataaaatcatttttacaagtacagcattcttggaaagaatttaacacccaaaaaggggaaaatgtaatgaaaaatctcaaggttggaaatacagccttactctctctagagctggaggacaggtttgtggttgaggacttctctgtccgatgtctacattcaggttctgacttcatatcttgaaaaaggatttcctccctgtctttttcagtgtctcataaacgctactctggattgttgtaaatattagtgagatgggaggatttacagaagaaaagcaagtcaaaaatatttcctttttgatgtaaaaaaaaaaagccctatttcgcactaacattttattttacaagtattttaatcttatattttggtattagaaaaatttgtctattttttcattttgaagattaaatgttgcttacattttaaaagcatgggtgaagtgtacaacaaaccaataatgataaaaaatacttctctttttctccctgtttccctttttcccttggccacagccaaatgctaattgctgctttaattacagagatgtgtaaatgtattcagattacaaactctacaggaatacatcaacattttaactcttttgcgtttttactgtttaactgttttaaatgcaagttattttagggtgacactccttccagttctggccagatcatgagtttcaagatcaagagtaaaaagttattagaattaaacagttttataaagggaggcagcccttttccctcaagaacaactttgttgagagttactacttgacagcaagcacagaaatgacaaatttaaaacttttacacatggcatttaccaaaattcccagtgattattttgtttaaaagagggaacctaaatatctactctattccctttcagttaact

SEQ ID NO: 4253 - protein, 540 aa, Homo sapiens; identical to SEQ ID NO: 505

SEQ ID NO: 4254 - DNA, 4014 bp, Homo sapiens
actgggtatctgctttgcacccagtagtctgcaacatgagtttaaactcaggttactactttcacttatactttatggagaagatagacagtgagggaggaatgggaagctgtcatgagagtgcaccgtcttggaattacataactggggtctttcctcaataacattttgagcatctgaaaaatagtttaaaaaattgtcttaatatctattaaaaggcatgtctagtgaggaaacaggagagtctgagcaatcccttggtggcgatgaaggtggtagttcacacaagtaacagtggaggcaaaggtaagcgcaagctgcctgtcccagatgctggcccatgtgtgagtgcttccctggagaagtccgcttctgttgctcccacctgagtcacagttaacagattatttctgtgtgaggcacatttcccttctgttgtttaagaaatgggagctgggaggcagctgagagggcgtgataaaagaattaagtgtgatcaactgaaacaactatgttgtagttctccatgctggatgcaaaggaaaaagtgtcgaattccaaaaaggatggaagaagaaggcaagaagggcaaactccagaagttctagtgcaggaagagagtttgagaagtaaaatccaggcaagcaaagcgttgtaccacttgggactccccaaagtgaaacagcaaggaaggattgtgtccatcttacttacttgaattggagagcttgtttctctctcatttttatttttcaatgatgttttctttatattttagagatattcattttctcttatcttgtgcttgtaaaaagcatttacatttcaagtctatgtgcttattacaggggaaaaataatctacctggttgcagtctttgagtataaacatttctaacctttttaaaacttctatagcagcccattaacactaacatttttagagcaaatatattctattttaacttcaggtagaggaatagtcctaaacttaatatgatagctctagataagatcttagagataagtgagcatttagtattctaaaagtggcagaacaaatcatgaggtttctggatgctataccaatttaaaatcaattcttatgttaatattgattgcttatttacatgtcagtcatctactttttttctttgaaatctgcatatgggttacaaaaactctgttaggttttgaaaattccattaagttggaaaccttggttaaaaatgtaggtgcctggcccatggttaccctggattcaggtctctcatgattatatttggggatttacgttcctaactgctaagcaacatctttgacaactagtaattcatactctactagtagtcacatgtcatatagtaaaataaatagggctttagttcttaagtaattctataggattttaccctgaaatccagggtgttcagatttcaaaaaggataatttatcagtattttctcatccagtcaaacttcagctgacattgatacaggtcaaaatgcgtagatgctttttggtgttggaaataagtgtctgtcttatggtcatcattgtcttcttagatttttgggtaggggggccaggtagggggagactcagaaataaaagcgttccccagataacttcaatctggaaagaattttttgtatagagtccatctctccctcaagactgaccacaggtttcatgagaaggtccctgaaaacatcacatttctctgaagaaccatcaacttgtcttttcttgaaccacaggaatggttctacagaccctactataattcttcacatttcagaacccatgtttaatggagggaagagagaaatgcatgggaaaagaacacctccttttctcctttctcttaaattcaaagacgtttgctttggaatgccctcacttctccctattcacaggcttctaaaatcattaatttactcaaggcacatgtgccttctttgccccaaatgcatcactttccttttagttatggctgattttgggtgtgtgtgtgtaagacatgcagtcaacaatgagatgaaggccattgcatagatctcatgcagatagtgatggattcagaaagtaggttccagtggcgtcactaccttcttgtaagccagtatacactggctatttgtggaaatctctttgggagatcaaatagagtattatgccactgtgagtgtttataaactggaaggaacaagtacctgtgtttcttgggacacaaagcactcagatcctgagtggatgcagacatgagagtaaatgtcagcccaaattaggcccctcgacctacagacatttcatgggttttatttaatcacaccccatggtttggggctacatgaggaagttggtaatgagctgaatttcttattcagtggaaaaaactgaaactgtctaaaaacacgggatatattttagaggcaattgtggaagcggagagaatgagatgatggtgttcagagggaccagcttctttttcagttgtctttagaactcaagaataatcaataatttagtgccccttcaacagccatactcagcaagaagaatcagaagcttgatcctctaacagaaatagaagagggtagctttgcccattgccactgtctttactgccccttctgcccctccacccacatccacattcagcatcactccaaggatgtgtcagcatcttgcccatgcaggtagaaatttgtgagtaggcctccatacttcctcgggggaagaaagagaaactagtgctggttttaagaatgtagctggcttttcatcagaacccttatgctaacctgaccacacttgctctcggggaagttcaagcctgtgatgtgcataaactccaacaagcctggctttggtgttcagcatgcacattccataaatatctcttgcaggcataccccacagctagactgcaggattaaaataacttccaaaaggtgctggattggagtttgttcaaatttctcattaaccactaatgttaattcataccaaatgcaaagtattctaaaccagctgatgctgtcagtgttcaagttttaagtgacttcaaacacaatggaagtgtttcaatgggagccagatctcatgagtaaaaatccattttataatagctctgtgatatatcagtgggagatgattcataggggagagatttgaacaagcagaattaagtgttagcaaaaatgctgcattgctttgattcatgtttaaagacctaaatttctatgcacaaggaataaagggcctacttaccaagtgtaaatcacaacataggctaccaaaatatttcttatttgctaggagaacaaagctgtcacggtgcatgatagttggacagagatggctaaaaaagaggcaaattcagatttggaaacagggtggcctcttcattatttattgccaagatctgaaaatcttcaacatcttataagacaacaatgaagtagcccctgaacagcatggagttgctgtgagtttgttcgttgcagacctttgtgttgggtcctgggaatctgagctttgttccctgtgcatggtggataattgaaaccaagaggacatgggatagaccttgtgacagaccaattctgtgacccctgtcttctgggtcacattattcattgttgatttaaatacaggactaccaaacagtacaaatctatcatgagtctggtagaaaagtaaaagtaaaagctgcacacgttacatactgtttattgttctaatgtacaactaactatttgcatataatgtgatttaatttattgctgttttgtgtagaaaaggagaactaatgactgtggatataacccatgttttgtataatatattttatttcttgtgcgaactggtcatttaaaatatctacttcatttgatgtttggatataaatgtgtatgtgtccttgtaaatgtttctatcaagcaagaatgccacgtactcagagtataacaatgtgttctcattaaaaaatacatcccacggaaacctc

SEQ ID NO: 4255 - protein, 121 aa, Homo sapiens; identical to SEQ ID NO: 507

SEQ ID NO: 4256 - DNA, 8441 bp, Homo sapiens
ggtcattgctgtattccttaggtgctgcaaagtctcattttgagtgtggaatggtgggcggtgttcatcctgaggcagcagtgagagtcgtccagtccatggctcgtttcatggctgcctatttcaccaatcagcagctttgcattttgccccctcatcatgtgaatgttcttcccccacttcatattaaaacagagcagtcctttcgacttattcctctgcaacactctaaggtggccagtgttgttagagatcagaatctctctaatgtgtggacagttgaatatgcacttgaattactatttattggtggcctggttccagaggctgtgtggttggcatataaacttggagactggaagacgtctgtttcaattggtgtggctttccagctgttctgtaaacgtgatagcaatttcatgaggtccaagaaaaagagtctgaatctaccactccgtatgactccagcacagatttttcaggaaaaactgcagtgtgttttaggtcaaccagcctctttggaagcaaaaaatgaaatgggctcaaaatataaacagtttacagccaaaatttggaaacacctcaaatgtccgtcaactggtgaatggataagcaaattcaaatatatctttaaaatggaataacaaatagtgaagaggaacaaattgctgataacttgtgacaacatagatgaatcacagaaccgtcatgatcccattgaagaggaagatgcaaatctgctatttggttcagtacaagaagtactgaaagcatcagttatggccgatgcagatattctttcggagacatttcaacttctgatagactctgccaaggacttcagtaaaagactgtggggcttagtgccattcggcttgtatcttccagctcctccattgtactgtccccagccagctattcttagtgaagaagatggtgatgatcttcttttaaaagctgaaaaaaataatcgccagaaggtatctggaatccttcagcgtgttctcctgcttttccgggcggctcagtgttcttttcctgtagcacagtggtatatattgcagttgaggtgggcaagaaaagtcatgcagaagattcgaatgaaaggatcccttccttcactgagtccttttcctcagtcattacttaattactgtaaaggaggtatcgcattttttagacctggagcagctggagaccacaagcttgatgaagtttccattagagcaataggttgcttcagagaactttgtgctctgtgttggatgctgcatgtccgtgataagttatcctatagttgcaggcaatatcagaaagcaagagaaaatgtaaaaggagaaaaggaccttgaagtggagtttgattcttgtatgattgagcactgtcttagtgcagtggaatgggcttatagaatgctgcctttctctcggttttttaatatggaagaacttattcaggatataattttgagccttattggagaactgccaccaatcagaaaggtagcagaaattttcgtgaaagcatttccctatcctgaggacgtgagggttcctttaagagacaaatatcactctcttcaccagagactcagacactgtgttgtgaaaggaccccagactgaggaaatgatgtctgttgtcatgcattctatccagaaagtgagggtgaaagctctaaaacgtgtgcagagaaatataggctcttttgaagtgaatatatgggaaccaattgaagaagagaaaccagatgaggctccaggtgttgacagatattccctggggactagtttgagcagaagtacactcacagaactaggagattctgtggttcacagtgatgcagatacgttctctgaagctttgtcggttgaagaaaaaagtaggataaatatctatcaaagaaatgccccaaatcacatggaattaacatcaattcataagccaactgataaaaggaaaatgtgtaatcagaaagaaaatcctacaaagaaagaagatcatgaaaagttatcacaaaatacacttcctgtaataggtgtttgggaatttgaacgtgatgatgatgaatatattaaattccttgatctgtttttgagttacattcttgaaagagacctaccttattccagggatgctgacattccatttctaactagtttttctggaaagcttagagaacatgaacttaattctttactttttgatgtacatacaacattaaaacgacatcagagcaaaactaaaagccagaatgtgtttagagctggttcttgctttgttgttgctcctgagtcctatgaatcagaaaaatcatcctctttaaatgatgaatatggcatgcatttagaaaaccagaaactttcatcatcagtactggttaatcaagggatcaaaccttttttacaatatccttcgaatgaagtcaataagaatgaaggaatgagtggattatttggtttaaaacaaaggtcaatttacaaaatacaagatgacactagagagaaatgtctaatccagagatcatcaaaccacattttttggactcccaagtccattaaaactagaagatgtattttcaaagctattcagtgcaatgatattaaccctcaagaagatcttcctttagcactaaacacttttggcagtataggaagactgctggaatggatgataaggtggtctaatagaaggctactctgtgattctggtataactgagtcatcctctgagtacagtccagtaattcgtgtaaagacctctacagctgccattcttacatcattatggcttttggaacaaccctattttgctacatataaggcaaaaaatgccattattaagatggtagagaatcgtgacactgggtgtcagattggacccaatattgagagggagagcaaatcagatgctggcggttcagttgcagtagcaactccaggtggaactgaggaaagaaatggtcagaataaatcttgtcaaaatatcttgaaaatgccaactgaagcaaaaaatcctgatataaaagaaatcaatgatgatattatttccatcactcataatactaaaaaagaatttatagatattgatgagaatcttttagaagtagaagcatttacagaagaggaaatggatatgcacatatcagactatgaagaagacattgaagaatctgttggaggtttcagaagtcccagtcttgccatttgcatgatgactttaccacagcagttagaagaagagttcacagaagaggttcagtgtcaaagggaagaaccactggagacaattatggaggaaaaatcgactgaacaaaaaggtatgatcgaagccttttcacatcctgggcataccactcctcaatcaatgcaagtagatacgagttcagaaatttctagtgcacagatttctacatataaagaaaaatcttcctcagttccacttctgatatcaaatggagtcaatgttgcttcacaaccacctgctccaacacctcagaagacccagagaaatgaattcacggctcagttaccagattgttcggagtccgttaggcagatgctgcaagatgaaatgtttaaattagttcagctgcaacagatcaacttcatgagcctaatgcaaatagtaggatcatcctttgctaatctcccagatacacaacaacttgtacagcagtctcagtctgtgcatttaggggaaagccaagaatcaaacctaagaggatgtggtgatgttgaagacagcaacaaaaatcttaaggagagattttttattaaaccacagtcaatgggagagaacgccagagagcctcgcaagaacagcccacactgccatgaaggaactatcccatctggtcaaaatagtactggaaacgtacagaatgttccacatgggagtattcctttatgtcaattaaatggccagccccggaaaaaaggaccaattccatcatctcaaaacttaccatccacttcgttttatccagctcctgctggaaatactcacctctaccttttgtccacaccttctgttgttcagaaggcacctagacttatcccacatgcaaaaacatttagtcctggtgatggctttcctttgcttcaatttaagtctaaacaagaattccagccccttttcttacatacaggaagtattccacaagttcccttcaggcctttgccacaaccaagagaggcttggggattatctgactccttccaacctgctctgccacagagagcagcacaaactactccagcatcccatttgaatgtaagccagtataacactgaagccagaaaaaaagaagttgagcagaagacgtgggcagaaactgtaattacagaaattcctaatcatgtgaacttggatcaatatgttggacaagaaaatttgacacctcaacaggactcttcagtgtttataaaaccagaaaaactatttgatgttaagccagggacccttgagatatctcctcaccattcctttggacttccgttactatacctgccacttaaacctcctaatatgtttccatcaacctcaagagcatctattacagttccctcaacacctatccaacctatagcagaagaaagaaaatacccaagattgtcattacttcattcacatttgtccccagaaaataggtgcaaaaaaacacaacttatcccacttgaaaacctcattgcgtttaaacaaagccaacagaaactaacacataatttatttgaacaaggtgatgctggacaccttcaacttctaaaggtcaaaatagaaccacctgaagtaagacaaggaaaggacagtaaaaaaaggcaagaagaagagctgagaaagagctgcaagaaaaaagatgtgagaaactgaggagaaaaccaaatgtgacttttcgaccagagaattccataattaataatgatgattcagaaatcattaagaaacccaaggaacaacaagaacattgtggttcccatcctttggatgacttcgacgttccttttgaaatgctacaagatgataatacttcagctggattgcatttcatggcctctgtaaaaaagaaagctataggaagtcaagatgcaagtacaaatacagacccagaacatgagcctttgactgctcctcagctcttggtcccagatgtctatctaaatctgaagctttccagtgaaatgtcagagaaaccttggtcaccctcaatacctcatacagtaacaaacttggttggacatacttatataaatgtgattgacattgaagctaatgatcttctacaggaattacctgtgagagaagagccttcaaatgataatgttatcaaacagcaaagcgatcatctagcagttccatcgtctgcagagttacattatatggcagcttcagttactaatgctgttcccccacataattttaagagtcaaggtctgccaaaaccagagttccgattcaaaggacagagcacaaagtcagactctgcagaagattatctattgtggaaacggctgcaaggtgtctctgcagcttgccctgcaccaagctctgcagctcaccaactagagcatctcagtgctaagcttcagaaaattgacgagcagttgctagcaatacagaacattgctgaaaacatagaacaggatttccccaagcctgaaatgctagatctacattgtgataagattggaccagtggatcacattgaattctcttctggccctgaattcaaaaaaacattagcttcaaaaaccattagcatttctgaagaagtgcgttttttgacccatatggatgaagaagatcaaagtgacaaaaaggagacttcagaacctgaattttcaataacagaaaattattctggtcagaaaacctgtgtgtttcctactgccgattcagctgtcagcctttccagttccagtgatcagaatactacttctcctggtatgaatagcagtgatgaattgtgtgagagtgtttcagtacatccgctccagatgactggattgactgatattgcagacattattgatgaccttataattaaagacggagtttccagtgaagaacttggcttaacagaacaagctatgggcacctccagaattcagcattattctggcagacattcacaaagaactgacaaggaaagaagagagattcaagcctggatgaaaagaaaacgaaaagaaagaatggcaaagtacttaaatgagctggcagaaaagagagggcaagaacatgatcctttctgtcccagaagcaatccactttacatgacttcaagggaaataaggctgagacaaaagatgaagcatgaaaaagacagattgctgctctctgaacactatagtcgtcgaatctcacaagcgtacggtctgatgaatgaactgttatctgagtcagtacagctaccaactctaccacagaaaccattgcctaacaaacccagccctactcagtcttccagttgtcaacactgcccttctccaagaggagagaatcaacatggtcacagttttctaataaatcgacctggaaaagtcaaatatatgtccaaaccgagttatatccataagaggaagtcttttgggcaacctcaaggctcaccttggccacatggaactgccactttcaccatacagaaaaaagctggtggagccaaagcagcagtaagaaaggctacgcagtctccagttaccttccaaaaaggctctaatgctccgtgtcatagtctgcagcatacaaaaaaacatggaagtgctgggcttgcacctcaaaccaagcaggtgtgtgtagagtatgaaagagaggagactgtggtgagtccctggacgataccttcagaaatccataagattcttcatgagagtcacaattcccttctacaagacttgtctccaactgaagaggaagagccagagcatccttttggggtgggcggtgtggacagcgtgtctgagagcactggcagcatcctcagcaagctggactggaatgccatcgaagacatggtggccagcgtggaggaccagggcctgtctgtccactgggccctggacctgtaagacctggatatcattgggtttccatgcacaggccagcacctcagtaatgtggttctgaaagattaacaggtttaagggacagaagcaatgaaagaagcaatgtgaattttccatttgctttcatattattacctggattagccattaccagaggaaaaataaacatttctcagtaactttgcctttatggggaaagggttgactattgatgtattatatgtttttgtatttgatgcatcattaggcataatttttaaaatgataagtacctttcaagccaagtttgcataacctactttcaataaaaaccctctatcttgcctcctcctttattaccctctgagttttgagaaacaaccatatacagatgaatctaataggaaaaaaaaaaatcttttcattgagaagaaaatcagtctcacctgagaactcaattatgaaccctattttaaaacacctatgcagggtttagcctaggagtgaaaagaaaaaccaactaccttttaccaaccctgaatctctaaataagcaaagtttcatggaggccaggagatcttctgtcttctgccctgtagcctgaagccttggaggaagaaacaggaatggatgctttgggcaggaaagtaagggaatatgactccggcctctagaaggctcatcttaaatttgtaagaaccatggtacagagacctgattagtttttggtattgtgctccaataatgtcatagttttaagagataatttttatgagaattgactaagaaccagtatccttcaactacttcatcaatgtttggtataatataaaagcacactatcatctgaaaaagctattaaatacccctctttttccaaatatctacctgtgtgaagccaggttttacaacatgtattgcagcaagttgaatgcagaagcaggtatggtaattcagctgccttctatcaagctaaacattaaagagatttgtagaactataaaacaatgctactctccttaccaaattgttttagaaaatagctttataggctaacattattgttaattgtcatttaattgttttgtcatttaaaatattttaaattgttttctgttagtttcttttttgtatattctatgggtattttattgatacatgatagttgtacatttttatggggtgcatgtgatattttgatatgtgcatacaatgtgtagcaatcaaatcagggtaattgggatattcatcacctcaaacatttatcatttatttgtgttggaaacattcaaaccttttcttctagctatttatccattgttggatacttatatcaattctatatcttagctgttgtgaatagagctgcaataaatgtaggagtgcagatatctctttg

SEQ ID NO: 4257 - protein, 1363 aa, Homo sapiens
MADADILSETFQLLIDSAKDFSKRLWGLVPFGLYLPAPPLYCPQPAILSEEDGDDLLLKAEKNNRQKVSGILQRVLLLFRAAQCSFPVAQWYILQLRWARKVMQKIRMKGSLPSLSPFPQSLLNYCKGGIAFFRPGAAGDHKLDEVSIRAIGCFRELCALCWMLHVRDKLSYSCRQYQKARENVKGEKDLEVEFDSCMIEHCLSAVEWAYRMLPFSRFFNMEELIQDIILSLIGELPPIRKVAEIFVKAFPYPEDVRVPLRDKYHSLHQRLRHCVVKGPQTEEMMSVVMHSIQKVRVKALKRVQRNIGSFEVNIWEPIEEEKPDEAPGVDRYSLGTSLSRSTLTELGDSVVHSDADTFSEALSVEEKSRINIYQRNAPNHMELTSIHKPTDKRKMCNQKENPTKKEDHEKLSQNTLPVIGVWEFERDDDEYIKFLDLFLSYILERDLPYSRDADIPFLTSFSGKLREHELNSLLFDVHTTLKRHQSKTKSQNVFRAGSCFVVAPESYESEKSSSLNDEYGMHLENQKLSSSVLVNQGIKPFLQYPSNEVNKNEGMSGLFGLKQRSIYKIQDDTREKCLIQRSSNHIFWTPKSIKTRRCIFKAIQCNDINPQEDLPLALNTFGSIGRLLEWMIRWSNRRLLCDSGITESSSEYSPVIRVKTSTAAILTSLWLLEQPYFATYKAKNAIIKMVENRDTGCQIGPNIERESKSDAGGSVAVATPGGTEERNGQNKSCQNILKMPTEAKNPDIKEINDDIISITHNTKKEFIDIDENLLEVEAFTEEEMDMHISDYEEDIEESVGGFRSPSLAICMMTLPQQLEEEFTEEVQCQREEPLETIMEEKSTEQKGMIEAFSHPGHTTPQSMQVDTSSEISSAQISTYKEKSSSVPLLISNGVNVASQPPAPTPQKTQRNEFTAQLPDCSESVRQMLQDEMFKLVQLQQINFMSLMQIVGSSFANLPDTQQLVQQSQSVHLGESQESNLRGCGDVEDSNKNLKERFFIKPQSMGENAREPRKNSPHCHEGTIPSGQNSTGNVQNVPHGSIPLCQLNGQPRKKGPIPSSQNLPSTSFYPAPAGNTHLYLLSTPSVVQKAPRLIPHAKTFSPGDGFPLLQFKSKQEFQPLFLHTGSIPQVPFRPLPQPREAWGLSDSFQPALPQRAAQTTPASHLNVSQYNTEARKKEVEQKTWAETVITEIPNHVNLDQYVGQENLTPQQDSSVFIKPEKLFDVKPGTLEISPHHSFGLPLLYLPLKPPNMFPSTSRASITVPSTPIQPIAEERKYPRLSLLHSHLSPENRCKKTQLIPLENLIAFKQSQQKLTHNLFEQGDAGHLQLLKVKIEPPEVRQGKDSKKRQEEELRKSCKKKDVRN

SEQ ID NO: 4258 - DNA, 559 bp, Homo sapiens
gagtgagacatggtctcaaaaaatatgtagacagtattcactatcagatagcatattcaggaagaggataaatatgctgtaaatatatatctataaaccaatttggaagtttaaaagtattttaatttaatttctggttatataatttctaaattagattaacaattgaaagcaaaaaaaaacccaaaatttttattaataatgattttttttttaggtatgaatagcagtgatgaattgtgtgagagtgtttcagtacatccgctccagatgactggattgactgatattgcagacattattgatgaccttataattaaagacggagtttccagtgaagaacttggcttaacagaacaagctatgggcacctccaggtaatcattgaataattcatttttaacctgtttaaaatgcttctcattcaagaatgttcaaaatttgtcatattttaatgtgatttttatgaaacaaatctgaagcttagaatagatttttttttcatgttttgttatgtatatgtgtcattcttcccttttctctaacaatatatagtata

SEQ ID NO: 4259 - protein, 59 aa, Homo sapiens
MIFFLGMNSSDELCESVSVHPLQMTGLTDIADIIDDLIIKDGVSSEELGLTEQAMGTSR

SEQ ID NO: 4260 - DNA, 444 bp, Homo sapiens
cagtgttgttagagatcagaatctctctaatgtgtggacagttgaatatgcacttgaattactatttattggtggcctggttccagaggctgtgtggttggcatataaacttggagactggaagacgtctgtttcaattggtgtggctttccagctgttctgtaaacgtgatagcaatttcatgaggtccaagaaaaagagtctgaatctaccactccgtatgactccagcacagatttttcaggaaaaactgcagtgtgttttaggtcaaccagcctctttggaagcaaaaaatgaaatgggctcaaaatataaacagtttacaggtgtgttatgtatgtatagtctgattcgtgtcagattaatataaaccttataataccttaaaaagtttatacatgtctacaaatgtattaacactttgaaataaacttatcaaaaatg

SEQ ID NO: 4261 - protein, 62 aa, Homo sapiens
MRSKKKSLNLPLRMTPAQIFQEKLQCVLGQPASLEAKNEMGSKYKQFTGVLCMYSLIRVRLI

SEQ ID NO: 4262 - DNA, 948 bp, Homo sapiens
ctgaattattttctgaaataggttgtatgtagataaatacaaaatagaataaatgctaccatttaggaaaattttaaaacacatgaacctatatattattttgtctttatcctgtgttatgttttcctgaaagatataaacacatttaatatttttgtgtgtttcacttgcttgctttttcattgttctgtaactttttcttcttttttgaaaaacattattgttttccgtaagatctttctcttactgattcttgtattttgatgtttgtttactagaccacagcagtttacgtttcaagattcaaataattctgttgattcatcagcttctgatagtgaccctatgagacagagattttctataaaagcacactcacggttaccctacctcgttatatctgatggatatatggtcacaacccttcgatttcttgatagcctatctccatcagtacacatgagatcacttctacttgattcaacccagaggcttgagaaaatatatcaaagtgtgatattgtctaagccaaaaggcaaaggactgaacttgcgatcactgaattccctaaggtctagcctgttagaacaccaaggaaatgaaagttcagccgatttcactgtccccaaattcttgcaggcagaagaaacaataaatgaaaatgcagcagattttcaggattttgaagcagaagaaactaacgaaggcagacactttccagacaacttatgtcctttttggaacaaaagagatgatgtgctgtgtagtagtatgaaggaaggaagattggaatttgcatctatgtttgatacgatacatgcaaaggatgatagggaagaatgttttttattaggatcatatgaaaagtctgttcagctgtggaaaaaagctctacaagaaatcgaagagaaagaacacttccaggatctctggtggcacttcctgtag

SEQ ID NO: 4263 - protein, 200 aa, Homo sapiens
MRQRFSIKAHSRLPYLVISDGYMVTTLRFLDSLSPSVHMRSLLLDSTQRLEKIYQSVILSKPKGKGLNLRSLNSLRSSLLEHQGNESSADFTVPKFLQAEETINENAADFQDFEAEETNEGRHFPDNLCPFWNKRDDVLCSSMKEGRLEFASMFDTIHAKDDREECFLLGSYEKSVQLWKKALQEIEEKEHFQDLWWHFL

SEQ ID NO: 4264 - DNA, 632 bp, Homo sapiens
gacatacagtgaacaagatagaaatccatacacatataaaatgtaatttcccatgaatatgtgtcagatcacttctggaaaagaaagatacctttctattgttggagccatacacttcataccaactaatgttatcctagtatttatctatacagtatttagtagttttaagctaatttattttcaaatttgtgaatgccagcttatattattattgagattctcaagtgggaatgacgcatgtcctctaatcctgctagtgcactttggagttatgccagaaattttgatgtgattcttctgtccacctgctatctagccatctcccttcactccacacatttgtgtgcgtgtgtttgagatagggcctcactctgtcacctaggctggagtgcagtggcgtgatcacagctcactgcagcttcaacctcccaggtcaggagactgaggcgggaagatggcctaaaccttggaggcagaggttgcagtgagctgagaatgtgccactgcactctagcttgggtgacagagcaggattctttctcaaaaaacaaaaaagaaaaaaagaaaaaaatcttatatcagtgctttttagattatttttgtagtaagccctgccccgtttatcttca

SEQ ID NO: 4265 - protein, 80 aa, Homo sapiens [sequence omitted]

SEQ ID NO: 4266 - DNA, 538 bp, Homo sapiens
gaagataaacggggcagggcttactacaaaaataatctaaaaagcactgatataagatttttttctttttttcttttttgttttttgagaaagaatcctgctctgtcacccaagctagagtgacagagtgaggccctatctcaaacacacgcacacaaatgtgtggagtgaagggagatggctagatagcaggtggacagaagaatcacatcaaaatttctggcataactccaaagtgcactagcaggattagaggacatgcgtcattcccacttgagaatctcaataataatataagctggcattcacaaatttgaaaataaattagcttaaaactactaaatactgtatagataaatactaggataacattagttggtatgaagtgtatggctccaacaatagaaaggtatctttcttttccagaagtgatctgacacatattcatgggaaattacattttatatgtgtatggatttctatcttgttcactgtatgtcccagcacctagcacttctcctctcatatagtaggccct

SEQ ID NO: 4267 - protein, 41 aa, Homo sapiens [sequence omitted]

SEQ ID NO: 4268 - DNA, 426 bp, Homo sapiens
cagattgcttattctctggagaatactgtacaaaaaaactttatggtatcaagcacaattaaatcgaagagttcctgaagctgatagtcagttaactgaaaagatgacacatgaagcatctactgtcaagtccctgttatgtcatttgcaggctaacctacagagtactggagattgcttgaatcaaaccttagaacttaaatctatcaatggggaagaatgttttttattaggatcatatgaaaagtctgttcagctgtggaaaaaagctctacaagaaatcgaagagaaaggaggaagaaggacgtattttcttcagatacgctattatctttctctcttatactgccacctctatagctataatttaaatgatgctcaaggattgtgtgatcagctagcaagagaaatcctgagatggtccca

SEQ ID NO: 4269 - protein, 106 aa, Homo sapiens
MTHEASTVKSLLCHLQANLQSTGDCLNQTLELKSINGEECFLLGSYEKSVQLWKKALQEIEEKGGRRTYFLQIRYYLSLLYCHLYSYNLNDAQGLCDQLAREILRW

SEQ ID NO: 4270 - DNA, 763 bp, Homo sapiens
tgttagaacaccaaggaaatgaaagttcagccgatttcactgtccccaaattcttgcaggcagaagaaacaataaatgaaaatgcagcagattttcaggattttgaagcagaagaaactaacgaaggcagacactttccagacaacttatgtcctttttggaacaaaagagatgatgtgctgtgtagtagtatgaaggaaggaagattggaatttgcatctatgtttgatacgatacatgcaaaggatgatagtgaggagacagatagaaccattacagaactgcattctatccagaaaagtctacttgcagcgtggactataggaatttcaaaaactgtgacagaaaaaaatttaatgttaaattacatagtagtttgtatcactcattttttttacattcttcaatttataaaatgtccttttcctaaacttgatcttgttttaagcaaaagctcaagacataatgcatggatactttgtatctttcaactttttcatcagtgtttatcaatccattattgggatataagatacaaacaagatgtggggcatttgataaagctgacctcaaatactgtaaaacttttgctgactcagcaacaaaagggtcagttattctcagagaaacttttagcttgtttttatttactcaaaatggtagctgacaatttaaatggtgtatacattcttcaacctgaagttatttcagcatcagctgatggaagtaaaataacagctcaagactcattggtggtacctat

SEQ ID NO: 4271 - protein, 39 aa, Homo sapiens
MKMQQIFRILKQKKLTKADTFQTTYVLFGTKEMMCCVVV

SEQ ID NO: 4272 - DNA, 475 bp, Homo sapiens
cgttttaacatacaagccagaaaaagactatcatgcgtccagctgatatcacctacccagtaggacctaataagtgtagctggaaccacgggactcttgttactacatcctttaaggctaccacagagagtaacaaaattcagtgtgtttataaataatacctgagttgccttggggtctttctgattaagagttactgccagggtaaggccatctcttgaaaaggcagaaattagagctcctcttgactttactgattcacatttaggaattaaactacagagatgacagtcttgttgagcccaatgaacatggtatggcaatgatcttacagatgtaaatacattctcatgccaccgaattgctagaaatgttaacttcaggcattccccagaataaaaagtaaatgaacacaggcagcagtctccaaataactcattttttataaaaacagcattcactacagcttctttat

SEQ ID NO: 4273 - protein, 41 aa, Homo sapiens
MRPADITYPVGPNKCSWNHGTLVTTSFKATTESNKIQCVYK

SEQ ID NO: 4274 - DNA, 482 bp, Homo sapiens
tttatcttcggtggaaggcaagagaactgcttcttcaggtatgacctgggaccaccgacccgccaatgaaaggcttttagaagataagatattctttaattccaaatattcccaaagaaatatgcatccagaaggtgttatgagcacaattcttttcccatttccagatacatacaagtacagtctcaaagagcttgcgactgtagctttgatcatttccttaggcttttcagttattggtatagttttcaaacaatcttgatctttgttccaaaggaaaagctctcctgtagttagtaccccagccagccaggcatcattactggatgttgttaggacaataacatccttcaagaaaggctgcagactaggaattttcttctttatctttcctgatagcaaattaatttcatttatgaatttatcatccaaaagaaaaacggcttctttttcctttcccaaccaggagacacgtggccatg

SEQ ID NO: 4275 - protein, 73 aa, Homo sapiens
MTWDHRPANERLLEDKIFFNSKYSQRNMHPEGVMSTILFPFPDTYKYSLKELATVALIISLGFSVIGIVFKQS

SEQ ID NO: 4276 - DNA, 424 bp, Homo sapiens
ggtaggcccagagcgaggacgggcccggactgggtagtggggatgtaccagggccgggtgcggcgggagacggcccgggaggcggaaggtcgcggacctgcccgacagaagagtagatgaggggagaccgaggacgcccgggtccggggagcttacgaggaggccaggatcgcggggtcttaagatatgaagacaatgggataactgaggctgattttgctgtgtggccattagacctagaaatattggtgtgattctggagttgattgctccacacgtttatttatttattttcctttttttccctcctcttcctcctcctctattctttaaaaacgtatggaaatgtatccggcaatgtttactgtaaaaaataatgtatggaaatgactacaatttgctaaaataaaaatcattgagcact

SEQ ID NO: 4277 - protein, 45 aa, Homo sapiens
MRGDRGRPGPGSLRGGQDRGVLRYEDNGITEADFAVWPLDLEILV

SEQ ID NO: 4278 - DNA, 590 bp, Homo sapiens
ttgctcttgttgcccaggctggagtgcaatggcacgatcttggctcaccacaacctcagtctcccaaagtgctgggattataggcatgagccaccatgcctgtccattatttctttatagtgactattatatgtaggcaatgtataattggtagaacatagtctatgaaacagtgcgttaattgtgggcagtgaagaatcattgaagttgtgaaatttgtattttaactagatcattgtagtatggcaaaacggttaggaaagagaaagctatcttgactaactgtttatgctatgagatactgactgatgtacatgtacatttagtgtttctttaggtatacctgacttattcattgaacacctatccactgatctcaaaagtattcctcagggtagtctccattcctgtcatttttcctcctattcatgagacggaaaaattatgaccatggtacagagttgtatcaaggaaatgaagaactagaacattgaattgaaaggttttgaaagggttcacaatttcttttcattttctattaatgtcttcttttaaattctcttaagaataaaacttttttctaatatttt

SEQ ID NO: 4279 - protein, 35 aa, Homo sapiens
MARSWLTTTSVSQSAGIIGMSHHACPLFLYSDYYM

SEQ ID NO: 4280 - DNA, 762 bp, Homo sapiens
ataaaaactcagctgggtccagatatcaggtgttctaaatctaagaatgtaagaacaatcttaatagaaatatgtttttaataagtggctaatatctacaaatagtacctttgctaaatgaattcttttttatgactattttgttttttagtaattgggtgaaaaaacaactgaaatgagattatttattattttaacataaggattaaaaaaatttagaaactcttattttgaattgtactgcaggcagaaatttcgaatttatattattcattttcaagttagtccaaggatattggcattaaaactccactaggctggtcttgaactcctgacctcaagtgatctgcccgcctccacctcccaaagtgttgagattacagacgtgagccaatgtgcctggcctattcccttctctctttatgctaccacaaataattaccttctgtttattgtaagtgatgcatgtctaacaatttgtacaatacattttgaatatatttttccttccattattgtcttttcccaagaccatagggttgccttctctacatttgttctcttagaattcagctcccttttccctataatcttctaatgtagaatatttaatagaatgccagaacgtcactcagtgggtactactacctcttatttttcaacttttcagtttcttaagtttagcgttttttgaatatgtaaagtgaatgtatgcgatacattaattcgttttataaatttaaaattctgtcatgtctactt

SEQ ID NO: 4281 - protein, 93 aa, Homo sapiens
AGLELLTSSDLPASTSQSVEITDVSQCAWPIPFSLYATTNNYLLFIVSDACLTICTIHFEYIFPSIIVFSQDHRVAFSTFVLLEFSSLFPIIF

SEQ ID NO: 4282 - DNA, 907 bp, Homo sapiens
taataagtttttaatgttgtttgaaatattaactataatcagatatataatttagtagccatgtgatattaaatgctttttaatagcgataagttttgcatggatcctgatgtctactttagtataaatgatttaaataatcaattgacacaatttgcctcacatttcattatgtatatttcttcataggatccattctggaacagaatgaagaagccactgcaccttttggattgtatacatgtattattgataagatatgttgagaatcccagccaagttttaaattgtgaaaggagaagatttacaaatctctgcctggatgctgtttgtggttaccttgttgagctccagtctatgagctcgtcagtagcagtacaagccatcactgggaattttaaatctcttcaagctaaattagaacggcttcattaattactgtgatatactttcatccgttttatgatctgtaaaataaaaactcagctgggtccagatatcaggtgttctaaatctaagaatgtaagaacaatcttaatagaaatatgtttttaataagtggctaatatctacaaatagtacctttgctaaatgaattcttttttatgactattttgttttttagtaattgggtgaaaaaacaactgaaatgagattatttattattttaacataaggattaaaaaaatttagaaactcttattttgaattgtactgcaggcagaaatttcgaatttatattattcattttcaagttagtccaaggatattggcattaaaactccactaggcggccaggcacagtgacttacacctgtaatcccagcactttgggaggccaaggtgggcgaatcacgaggccaagagtttgagaccaacctggccaacatggtgaaaccccatctct

SEQ ID NO: 4283 - protein, 75 aa, Homo sapiens [sequence omitted]

SEQ ID NO: 4284 - DNA, 5126 bp, Homo sapiens
acgcgcttaaaccaacggaacctgaccaacctcctaggccagacacacgacctagctcccacctaccgtatccctcctccctccttcctcctcaccctatccaaccccatcccgcccctctccttccctgttccctcccctttatccttcccttcctttccctccctcccttccctaaataacctaccctaattttaccctgccacaccccaaaaccctcaaccccctcgaaagcatcagcagcctcctagctccacccacaacctctagccccctcccaacagcttcctcttcccaggccagaacggcgtcttccagttccccaccggatgaagcggaagtgcgtcatgtcgaggcgccaaggcgctcgtttggcgcgcgcgccctaggcggcggatctaagctaacttcttggatcttttcttgtttctccttggtttttgactttttctggaccctggtgtctacgatttccgagatgccgtcttctttgttgggcgcggcgatgccggcctctacatctgccgcagccctgcaggaagctctggaaaatgctggacggctcatcgaccgtcagttgcaagaggaccgcatgtacccggacctttccgagctgcttatggtgtctgccccaaataatcccaccgtttctggcatgtcagatatggattatcctttgcaaggacctggtttgctgtccgtacccaaccttccagagatcagttccatccgaagagttcctctcccacctgaacttgttgagcagtttggacatatgcagtgtaattgcatgatgggtgtgttccctcctatcagcagagcttggctcacaattgacagtgatatattcatgtggaactatgaggatggaggagaccttgcctattttgatggacttagtgagactattcttgctgtggggcttgtgaagccaaaagcaggcatctttcaacctcatgtgcgacacctcctggttttggcgacccctgtagacatagtaattcttggactcagctatgctaatttgcaaacaggttctggagttcttaatgatagtttgtctggtggaatgcagttgcttccagatcctttatattctcttcctactgataatacttaccttttaacaataacttccactgataatggcagaattttcttggctggaaaggatggctgtttatatgaagtagcctaccaggctgaagcagggtggtttagccaaagatgtaggaaaataaaccactcaaagagctcactttctttccttgttccttccttgctacaattcacgttctcagaagatgatcctattcttcaaattgcaattgataattctagaaatattttatatacacgatctgagaaaggagtaatacaggtgtatgatttgggacaagatggacaaggaatgagcagagttgcctctgtgtcacagaatgccattgtctctgctgctggtaacattgctaggaccatcgatcgttctgtttttaaaccaattgtccaaatagcagtgattgaaaattctgaatcactggactgtcagttattggctgtcacacatgcaggtgttaggttatattttagcacttgtccattcagacagccattagcacggcctaatacactgacgctggttcatgtccgcttacctcctggattctcagcatcttcaaccgtggaaaagccttcaaaagtacatagagctctttatagtaaaggtattctattgatggcagcctcagaaaatgaggataatgatattttatggtgtgtcaaccatgatacttttcctttccaaaagccaatgatggaaacccagatgacagctggtgttgatggtcattcctgggctctttctgcgatagatgaattgaaagtagataaaataattacacctttaaacaaggatcatattccaataactgattcaccagttgttgtacagcagcacatgttacctccgaagaaatttgttctcctctcagcacaggggagccttatgtttcataaacttagacctgtagatcaactgaggcatctacttgtgagtaatgtgggaggagatggagaagagattgaaagattctttaaattacatcaggaagaccaggcttgtgcaacttgccttattcttgcttgctccactgctgcctgtgatagagaagtatctgcctgggctactcgggctttctttaggtatggtggtgaagcacagatgagatttccaaccactcttccgcctccaagtaatgttggtcccatcttggggtctcctgtctattctagttctcctgttcctagtggtagtccctatccaaatccatcctttttgggaacaccgtctcatggtatacagcctcctgccatgtcaactccagtgtgtgctctgggaaacccagcaactcaggccacaaatatgagttgtgtgactggaccagagattgtgtactctggaaaacacaatggtatttgcatttacttttctcggatcatgggaaacatttgggatgcaagcttagttgtggagagaatattcaagagtggcaacagagagatcactgcaattgaaagtagtgttccctgccaactgctagagtcagtgctacaagaactaaagggtttgcaggaatttctagacagaaactcccagtttgcaggaggaccattaggaaatccaaatactactgctaaagtgcagcagaggctgataggattcatgcgtcctgaaaacggaaatccccagcaaatgcaacaggaactgcagaggaagtttcatgaggctcaactaagtgaaaagatttcacttcaggcaattcagcagttggttcgaaaatcatatcaggctctggctttatggaaacttctttgtgaacatcaattcactatcattgtggcagaacttcagaaggaacttcaagagcagctgaagatcaccacctttaaagatcttgtaatcagggacaaagaactcacaggggcattaattgcttctcttatcaactgctacatcagagataatgccgctgttgatggcattagtttacatttacaggatatctgcccacttctatatagcactgatgatgcaatttgttctaaggcaaatgagcttctccagcgttcccgacaagttcaaaataagactgaaaaagaaagaatgttaagggaatcattaaaggaatatcaaaaaattagcaatcaagtggacctttccaatgtttgtgctcagtatagacaagtgagattttatgagggtgtggtggaactttctcttacggctgcagagaaaaaagatcctcaaggtcttgggcttcatttctataaacatggagaaccagaagaagacatagttggacttcaggccttccaagaaagattaaacagttacaaatgcattacagacacacttcaagaactggtaaatcaaagtaaggccgctcctcagtctcccagtgtacccaaaaaacctggtcctccagtgttgtcatctgatccaaatatgctgagtaatgaagaagcaggacatcattttgaacaaatgcttaaattgtcacagcgatccaaggatgagctctttagtattgccctttataattggctaatacaagtcgaccttgcagataagctgctacaggttgcttctccatttctggagccacatctagtccgaatggccaaagttgatcaaaacagagttcgttatatggatttactctggcggtattacgagaagaacagaagtttcagtaatgctgctcgtgtactgtccagactggctgacatgcatagcacagaaatttcacttcagcagcgactagagtacattgctcgagccattcttagtgccaaaagttccactgccatttcatcaatagctgccgatggtgaatttcttcatgaattagaagaaaaaatggaggttgctaggatccaacttcagatacaggagacactacaaaggcagtattcccatcattcttctgtacaggatgcagtttctcagctggattctgagctgatggacataactaagctttatggggaatttgctgacccatttaaacttgcagagtgcaaacttgcaataattcattgtgccggttattcagaccctatattggtgcagacactttggcaagatatcatagagaaagaattgagtgacagtgtgacattgagctcctcggatagaatgcatgctcttagtctcaagattgttctccttggcaaaatttatgctggcacaccacgcttctttcctttagattttattgtacagtttttagaacagcaggtttgtactttgaactgggatgtgggcttcgtaatacagacaatgaatgaaattggagtaccattacctagactactagaagtttatgatcagttgttcaaatcacgggatccattctggaacagaatgaagaagccactgcaccttttggattgtatacatgtattattgataagatatgttgagaatcccagccaagttttaaattgtgaaaggagaagatttacaaatctctgcctggatgctgtttgtggttaccttgttgagctccagtctatgagctcgtcagtagcagtacaagccatcactgggaattttaaatctcttcaagctaaattagaacggcttcattaattactgtgatatactttcatccgttttatgatctgtaaaataaaaactcagctgggtccagatatcaggtgttctaaatctaagaatgtaagaacaatcttaatagaaatatgtttttaataagtggctaatatctacaaatagtacctttgctaaatgaattcttttttatgactattttgttttttagtaattgggtgaaaaaacaactgaaatgagattatttattattttaacataaggattaaaaaaatttagaaactcttattttgaattgtactgcaggcagaaatttcgaatttatattattcattttcaagttagtccaaggatattggcattaaaactccactaggcggccaggcacagtgacttacacctgtaatcccagcactttgggaggccaaggtgggcgaatcacgaggccaagagtttgagaccaacctggccaacatggtgaaaccccatctct

SEQ ID NO: 4285 - protein, 1391 aa, Homo sapiens; identical to SEQ ID NO: 514

SEQ ID NO: 4286 - DNA, 5281 bp, Homo sapiens
acgcgcttaaaccaacggaacctgaccaacctcctaggccagacacacgacctagctcccacctaccgtatccctcctccctccttcctcctcaccctatccaaccccatcccgcccctctccttccctgttccctcccctttatccttcccttcctttccctccctcccttccctaaataacctaccctaattttaccctgccacaccccaaaaccctcaaccccctcgaaagcatcagcagcctcctagctccacccacaacctctagccccctcccaacagcttcctcttcccaggccagaacggcgtcttccagttccccaccggatgaagcggaagtgcgtcatgtcgaggcgccaaggcgctcgtttggcgcgcgcgccctaggcggcggatctaagctaacttcttggatcttttcttgtttctccttggtttttgactttttctggaccctggtgtctacgatttccgagatgccgtcttctttgttgggcgcggcgatgccggcctctacatctgccgcagccctgcaggaagctctggaaaatgctggacggctcatcgaccgtcagttgcaagaggaccgcatgtacccggacctttccgagctgcttatggtgtctgccccaagtgagtgatagtgaccctgctttctcaacctaaaggactctcgcctgacttcctaatttgctacttatccccagcgttggtcccggcgaggatatgctgagatttatggcactgttggctgcatttttggagaacagcaagcagcttcttttcagataatcccaccgtttctggcatgtcagatatggattatcctttgcaaggacctggtttgctgtccgtacccaaccttccagagatcagttccatccgaagagttcctctcccacctgaacttgttgagcagtttggacatatgcagtgtaattgcatgatgggtgtgttccctcctatcagcagagcttggctcacaattgacagtgatatattcatgtggaactatgaggatggaggagaccttgcctattttgatggacttagtgagactattcttgctgtggggcttgtgaagccaaaagcaggcatctttcaacctcatgtgcgacacctcctggttttggcgacccctgtagacatagtaattcttggactcagctatgctaatttgcaaacaggttctggagttcttaatgatagtttgtctggtggaatgcagttgcttccagatcctttatattctcttcctactgataatacttaccttttaacaataacttccactgataatggcagaattttcttggctggaaaggatggctgtttatatgaagtagcctaccaggctgaagcagggtggtttagccaaagatgtaggaaaataaaccactcaaagagctcactttctttccttgttccttccttgctacaattcacgttctcagaagatgatcctattcttcaaattgcaattgataattctagaaatattttatatacacgatctgagaaaggagtaatacaggtgtatgatttgggacaagatggacaaggaatgagcagagttgcctctgtgtcacagaatgccattgtctctgctgctggtaacattgctaggaccatcgatcgttctgtttttaaaccaattgtccaaatagcagtgattgaaaattctgaatcactggactgtcagttattggctgtcacacatgcaggtgttaggttatattttagcacttgtccattcagacagccattagcacggcctaatacactgacgctggttcatgtccgcttacctcctggattctcagcatcttcaaccgtggaaaagccttcaaaagtacatagagctctttatagtaaaggtattctattgatggcagcctcagaaaatgaggataatgatattttatggtgtgtcaaccatgatacttttcctttccaaaagccaatgatggaaacccagatgacagctggtgttgatggtcattcctgggctctttctgcgatagatgaattgaaagtagataaaataattacacctttaaacaaggatcatattccaataactgattcaccagttgttgtacagcagcacatgttacctccgaagaaatttgttctcctctcagcacaggggagccttatgtttcataaacttagacctgtagatcaactgaggcatctacttgtgagtaatgtgggaggagatggagaagagattgaaagattctttaaattacatcaggaagaccaggcttgtgcaacttgccttattcttgcttgctccactgctgcctgtgatagagaagtatctgcctgggctactcgggctttctttaggtatggtggtgaagcacagatgagatttccaaccactcttccgcctccaagtaatgttggtcccatcttggggtctcctgtctattctagttctcctgttcctagtggtagtccctatccaaatccatcctttttgggaacaccgtctcatggtatacagcctcctgccatgtcaactccagtgtgtgctctgggaaacccagcaactcaggccacaaatatgagttgtgtgactggaccagagattgtgtactctggaaaacacaatggtatttgcatttacttttctcggatcatgggaaacatttgggatgcaagcttagttgtggagagaatattcaagagtggcaacagagagatcactgcaattgaaagtagtgttccctgccaactgctagagtcagtgctacaagaactaaagggtttgcaggaatttctagacagaaactcccagtttgcaggaggaccattaggaaatccaaatactactgctaaagtgcagcagaggctgataggattcatgcgtcctgaaaacggaaatccccagcaaatgcaacaggaactgcagaggaagtttcatgaggctcaactaagtgaaaagatttcacttcaggcaattcagcagttggttcgaaaatcatatcaggctctggctttatggaaacttctttgtgaacatcaattcactatcattgtggcagaacttcagaaggaacttcaagagcagctgaagatcaccacctttaaagatcttgtaatcagggacaaagaactcacaggggcattaattgcttctcttatcaactgctacatcagagataatgccgctgttgatggcattagtttacatttacaggatatctgcccacttctatatagcactgatgatgcaatttgttctaaggcaaatgagcttctccagcgttcccgacaagttcaaaataagactgaaaaagaaagaatgttaagggaatcattaaaggaatatcaaaaaattagcaatcaagtggacctttccaatgtttgtgctcagtatagacaagtgagattttatgagggtgtggtggaactttctcttacggctgcagagaaaaaagatcctcaaggtcttgggcttcatttctataaacatggagaaccagaagaagacatagttggacttcaggccttccaagaaagattaaacagttacaaatgcattacagacacacttcaagaactggtaaatcaaagtaaggccgctcctcagtctcccagtgtacccaaaaaacctggtcctccagtgttgtcatctgatccaaatatgctgagtaatgaagaagcaggacatcattttgaacaaatgcttaaattgtcacagcgatccaaggatgagctctttagtattgccctttataattggctaatacaagtcgaccttgcagataagctgctacaggttgcttctccatttctggagccacatctagtccgaatggccaaagttgatcaaaacagagttcgttatatggatttactctggcggtattacgagaagaacagaagtttcagtaatgctgctcgtgtactgtccagactggctgacatgcatagcacagaaatttcacttcagcagcgactagagtacattgctcgagccattcttagtgccaaaagttccactgccatttcatcaatagctgccgatggtgaatttcttcatgaattagaagaaaaaatggaggttgctaggatccaacttcagatacaggagacactacaaaggcagtattcccatcattcttctgtacaggatgcagtttctcagctggattctgagctgatggacataactaagctttatggggaatttgctgacccatttaaacttgcagagtgcaaacttgcaataattcattgtgccggttattcagaccctatattggtgcagacactttggcaagatatcatagagaaagaattgagtgacagtgtgacattgagctcctcggatagaatgcatgctcttagtctcaagattgttctccttggcaaaatttatgctggcacaccacgcttctttcctttagattttattgtacagtttttagaacagcaggtttgtactttgaactgggatgtgggcttcgtaatacagacaatgaatgaaattggagtaccattacctagactactagaagtttatgatcagttgttcaaatcacgggatccattctggaacagaatgaagaagccactgcaccttttggattgtatacatgtattattgataagatatgttgagaatcccagccaagttttaaattgtgaaaggagaagatttacaaatctctgcctggatgctgtttgtggttaccttgttgagctccagtctatgagctcgtcagtagcagtacaagccatcactgggaattttaaatctcttcaagctaaattagaacggcttcattaattactgtgatatactttcatccgttttatgatctgtaaaataaaaactcagctgggtccagatatcaggtgttctaaatctaagaatgtaagaacaatcttaatagaaatatgtttttaataagtggctaatatctacaaatagtacctttgctaaatgaattcttttttatgactattttgttttttagtaattgggtgaaaaaacaactgaaatgagattatttattattttaacataaggattaaaaaaatttagaaactcttattttgaattgtactgcaggcagaaatttcgaatttatattattcattttcaagttagtccaaggatattggcattaaaactccactaggcggccaggcacagtgacttacacctgtaatcccagcactttgggaggccaaggtgggcgaatcacgaggccaagagtttgagaccaacctggccaacatggtgaaaccccatctct

SEQ ID NO: 4287 - protein, 1332 aa, Homo sapiens; identical to SEQ ID NO: 512

SEQ ID NO: 4288 - DNA, 4870 bp, Homo sapiens
acgcgcttaaaccaacggaacctgaccaacctcctaggccagacacacgacctagctcccacctaccgtatccctcctccctccttcctcctcaccctatccaaccccatcccgcccctctccttccctgttccctcccctttatccttcccttcctttccctccctcccttccctaaataacctaccctaattttaccctgccacaccccaaaaccctcaaccccctcgaaagcatcagcagcctcctagctccacccacaacctctagccccctcccaacagcttcctcttcccaggccagaacggcgtcttccagttccccaccggatgaagcggaagtgcgtcatgtcgaggcgccaaggcgctcgtttggcgcgcgcgccctaggcggcggatctaagctaacttcttggatcttttcttgtttctccttggtttttgactttttctggaccctggtgtctacgatttccgagatgccgtcttctttgttgggcgcggcgatgccggcctctacatctgccgcagccctgcaggaagctctggaaaatgctggacggctcatcgaccgtcagttgcaagaggaccgcatgtacccggacctttccgagctgcttatggtgtctgccccaagtgagtgatagtgaccctgctttctcaacctaaaggactctcgcctgacttcctaatttgctacttatccccagcgttggtcccggcgaggatatgctgagatttatggcactgttggctgcatttttggagaacagcaagcagcttcttttcagataatcccaccgtttctggcatgtcagatatggattatcctttgcaaggacctggtttgctgtccgtacccaaccttccagagatcagttccatccgaagagttcctctcccacctgaacttgttgagcagtttggacatatgcagtgtaattgcatgatgggtgtgttccctcctatcagcagagcttggctcacaattgacagtgatatattcatgtggaactatgaggatggaggagaccttgcctattttgatggacttagtgagactattcttgctgtggggcttgtgaagccaaaagcaggcatctttcaacctcatgtgcgacacctcctggttttggcgacccctgtagacatagtaattcttggactcagctatgctaatttgcaaacaggttctggagttcttaatgatagtttgtctggtggaatgcagttgcttccagatcctttatattctcttcctactgataatacttaccttttaacaataacttccactgataatggcagaattttcttggctggaaaggatggctgtttatatgaagtagcctaccaggctgaagcagggtggtttagccaaagatgtaggaaaataaaccactcaaagagctcactttctttccttgttccttccttgctacaattcacgttctcagaagatgatcctattcttcaaattgcaattgataattctagaaatattttatatacacgatctgagaaaggagtaatacaggtgtatgatttgggacaagatggacaaggaatgagcagagttgcctctgtgtcacagaatgccattgtctctgctgctggtaacattgctaggaccatcgatcgttctgtttttaaaccaattgtccaaatagcagtgattgaaaattctgaatcactggactgtcagttattggctgtcacacatgcaggtgttaggttatattttagcacttgtccattcagacagccattagcacggcctaatacactgacgctggttcatgtccgcttacctcctggattctcagcatcttcaaccgtggaaaagccttcaaaagtacatagagctctttatagtaaaggtattctattgatggcagcctcagaaaatgaggataatgatattttatggtgtgtcaaccatgatacttttcctttccaaaagccaatgatggaaacccagatgacagctggtgttgatggtcattcctgggctctttctgcgatagatgaattgaaagtagataaaataattacacctttaaacaaggatcatattccaataactgattcaccagttgttgtacagcagcacatgttacctccgaagaaatttgttctcctctcagcacaggggagccttatgtttcataaacttagacctgtagatcaactgaggcatctacttgtgagtaatgtgggaggagatggagaagagattgaaagattctttaaattacatcaggaagaccaggcttgtgcaacttgccttattcttgcttgctccactgctgcctgtgatagagaagtatctgcctgggctactcgggctttctttaggtatggtggtgaagcacagatgagatttccaaccactcttccgcctccaagtaatgttggtcccatcttggggtctcctgtctattctagttctcctgttcctagtggtagtccctatccaaatccatcctttttgggaacaccgtctcatggtatacagcctcctgccatgtcaactccagtgtgtgctctgggaaacccagcaactcaggccacaaatatgagttgtgtgactggaccagagattgtgtactctggaaaacacaatggtatttgcatttacttttctcggatcatgggaaacatttgggatgcaagcttagttgtggagagaatattcaagagtggcaacagagagatcactgcaattgaaagtagtgttccctgccaactgctagagtcagtgctacaagaactaaagggtttgcaggaatttctagacagaaactcccagtttgcaggaggaccattaggaaatccaaatactactgctaaagtgcagcagaggctgataggattcatgcgtcctgaaaacggaaatccccagcaaatgcaacaggaactgcagaggaagtttcatgaggctcaactaagtgaaaagatttcacttcaggcaattcagcagttggttcgaaaatcatatcaggctctggctttatggaaacttctttgtgaacatcaattcactatcattgtggcagaacttcagaaggaacttcaagagcagctgaagatcaccacctttaaagatcttgtaatcagggacaaagaactcacaggggcattaattgcttctcttatcaactgctacatcagagataatgccgctgttgatggcattagtttacatttacaggatatctgcccacttctatatagcactgatgatgcaatttgttctaaggcaaatgagcttctccagcgttcccgacaagttcaaaataagactgaaaaagaaagaatgttaagggaatcattaaaggaatatcaaaaaattagcaatcaagtggacctttccaatgtttgtgctcagtatagacaagtgagattttatgagggtgtggtggaactttctcttacggctgcagagaaaaaagatcctcaaggtcttgggcttcatttctataaacatggagaaccagaagaagacatagttggacttcaggccttccaagaaagattaaacagttacaaatgcattacagacacacttcaagaactggtaaatcaaagtaaggccgctcctcagtctcccagtgtacccaaaaaacctggtcctccagtgttgtcatctgatccaaatatgctgagtaatgaagaagcaggacatcattttgaacaaatgcttaaattgtcacagcgatccaaggatgagctctttagtattgccctttataattggctaatacaagtcgaccttgcagataagctgctacaggttgcttctccatttctggagccacatctagtccgaatggccaaagttgatcaaaacagagttcgttatatggatttactctggcggtattacgagaagaacagaagtttcagtaatgctgctcgtgtactgtccagactggctgacatgcatagcacagaaatttcacttcagcagcgactagagtacattgctcgagccattcttagtgccaaaagttccactgccatttcatcaatagctgccgatggtgaatttcttcatgaattagaagaaaaaatggaggttgctaggatccaacttcagatacaggagacactacaaaggcagtattcccatcattcttctgtacaggatgcagtttctcagctggattctgagctgatggacataactaagctttatggggaatttgctgacccatttaaacttgcagagtgcaaacttgcaataattcattgtgccggttattcagaccctatattggtgcagacactttggcaagatatcatagagaaagaattgagtgacagtgtgacattgagctcctcggatagaatgcatgctcttagtctcaagattgttctccttggcaaaatttatgctggcacaccacgcttctttcctttagattttattgtacagtttttagaacagcaggtttgtactttgaactgggatgtgggcttcgtaatacagacaatgaatgaaattggagtaccattacctagactactagaagtttatgatcagttgttcaaatcacgggatccattctggaacagaatgaagaagccactgcaccttttggattgtatacatgtattattgataagatatgttgagaatcccagccaagttttaaattgtgaaaggagaagatttacaaatctctgcctggatgctgtttgtggttaccttgttgagctccagtctatgagctcgtcagtagcagtacaagccatcactgggaattttaaatctcttcaagctaaattagaacggcttcattaattactgtgatatactttcatccgttttatgatctgtaaaataaaaactcagctgggtccag

SEQ ID NO: 4289 - protein, 1332 aa, Homo sapiens; identical to SEQ ID NO: 512

SEQ ID NO: 4290 - DNA, 4715 bp, Homo sapiens
acgcgcttaaaccaacggaacctgaccaacctcctaggccagacacacgacctagctcccacctaccgtatccctcctccctccttcctcctcaccctatccaaccccatcccgcccctctccttccctgttccctcccctttatccttcccttcctttccctccctcccttccctaaataacctaccctaattttaccctgccacaccccaaaaccctcaaccccctcgaaagcatcagcagcctcctagctccacccacaacctctagccccctcccaacagcttcctcttcccaggccagaacggcgtcttccagttccccaccggatgaagcggaagtgcgtcatgtcgaggcgccaaggcgctcgtttggcgcgcgcgccctaggcggcggatctaagctaacttcttggatcttttcttgtttctccttggtttttgactttttctggaccctggtgtctacgatttccgagatgccgtcttctttgttgggcgcggcgatgccggcctctacatctgccgcagccctgcaggaagctctggaaaatgctggacggctcatcgaccgtcagttgcaagaggaccgcatgtacccggacctttccgagctgcttatggtgtctgccccaaataatcccaccgtttctggcatgtcagatatggattatcctttgcaaggacctggtttgctgtccgtacccaaccttccagagatcagttccatccgaagagttcctctcccacctgaacttgttgagcagtttggacatatgcagtgtaattgcatgatgggtgtgttccctcctatcagcagagcttggctcacaattgacagtgatatattcatgtggaactatgaggatggaggagaccttgcctattttgatggacttagtgagactattcttgctgtggggcttgtgaagccaaaagcaggcatctttcaacctcatgtgcgacacctcctggttttggcgacccctgtagacatagtaattcttggactcagctatgctaatttgcaaacaggttctggagttcttaatgatagtttgtctggtggaatgcagttgcttccagatcctttatattctcttcctactgataatacttaccttttaacaataacttccactgataatggcagaattttcttggctggaaaggatggctgtttatatgaagtagcctaccaggctgaagcagggtggtttagccaaagatgtaggaaaataaaccactcaaagagctcactttctttccttgttccttccttgctacaattcacgttctcagaagatgatcctattcttcaaattgcaattgataattctagaaatattttatatacacgatctgagaaaggagtaatacaggtgtatgatttgggacaagatggacaaggaatgagcagagttgcctctgtgtcacagaatgccattgtctctgctgctggtaacattgctaggaccatcgatcgttctgtttttaaaccaattgtccaaatagcagtgattgaaaattctgaatcactggactgtcagttattggctgtcacacatgcaggtgttaggttatattttagcacttgtccattcagacagccattagcacggcctaatacactgacgctggttcatgtccgcttacctcctggattctcagcatcttcaaccgtggaaaagccttcaaaagtacatagagctctttatagtaaaggtattctattgatggcagcctcagaaaatgaggataatgatattttatggtgtgtcaaccatgatacttttcctttccaaaagccaatgatggaaacccagatgacagctggtgttgatggtcattcctgggctctttctgcgatagatgaattgaaagtagataaaataattacacctttaaacaaggatcatattccaataactgattcaccagttgttgtacagcagcacatgttacctccgaagaaatttgttctcctctcagcacaggggagccttatgtttcataaacttagacctgtagatcaactgaggcatctacttgtgagtaatgtgggaggagatggagaagagattgaaagattctttaaattacatcaggaagaccaggcttgtgcaacttgccttattcttgcttgctccactgctgcctgtgatagagaagtatctgcctgggctactcgggctttctttaggtatggtggtgaagcacagatgagatttccaaccactcttccgcctccaagtaatgttggtcccatcttggggtctcctgtctattctagttctcctgttcctagtggtagtccctatccaaatccatcctttttgggaacaccgtctcatggtatacagcctcctgccatgtcaactccagtgtgtgctctgggaaacccagcaactcaggccacaaatatgagttgtgtgactggaccagagattgtgtactctggaaaacacaatggtatttgcatttacttttctcggatcatgggaaacatttgggatgcaagcttagttgtggagagaatattcaagagtggcaacagagagatcactgcaattgaaagtagtgttccctgccaactgctagagtcagtgctacaagaactaaagggtttgcaggaatttctagacagaaactcccagtttgcaggaggaccattaggaaatccaaatactactgctaaagtgcagcagaggctgataggattcatgcgtcctgaaaacggaaatccccagcaaatgcaacaggaactgcagaggaagtttcatgaggctcaactaagtgaaaagatttcacttcaggcaattcagcagttggttcgaaaatcatatcaggctctggctttatggaaacttctttgtgaacatcaattcactatcattgtggcagaacttcagaaggaacttcaagagcagctgaagatcaccacctttaaagatcttgtaatcagggacaaagaactcacaggggcattaattgcttctcttatcaactgctacatcagagataatgccgctgttgatggcattagtttacatttacaggatatctgcccacttctatatagcactgatgatgcaatttgttctaaggcaaatgagcttctccagcgttcccgacaagttcaaaataagactgaaaaagaaagaatgttaagggaatcattaaaggaatatcaaaaaattagcaatcaagtggacctttccaatgtttgtgctcagtatagacaagtgagattttatgagggtgtggtggaactttctcttacggctgcagagaaaaaagatcctcaaggtcttgggcttcatttctataaacatggagaaccagaagaagacatagttggacttcaggccttccaagaaagattaaacagttacaaatgcattacagacacacttcaagaactggtaaatcaaagtaaggccgctcctcagtctcccagtgtacccaaaaaacctggtcctccagtgttgtcatctgatccaaatatgctgagtaatgaagaagcaggacatcattttgaacaaatgcttaaattgtcacagcgatccaaggatgagctctttagtattgccctttataattggctaatacaagtcgaccttgcagataagctgctacaggttgcttctccatttctggagccacatctagtccgaatggccaaagttgatcaaaacagagttcgttatatggatttactctggcggtattacgagaagaacagaagtttcagtaatgctgctcgtgtactgtccagactggctgacatgcatagcacagaaatttcacttcagcagcgactagagtacattgctcgagccattcttagtgccaaaagttccactgccatttcatcaatagctgccgatggtgaatttcttcatgaattagaagaaaaaatggaggttgctaggatccaacttcagatacaggagacactacaaaggcagtattcccatcattcttctgtacaggatgcagtttctcagctggattctgagctgatggacataactaagctttatggggaatttgctgacccatttaaacttgcagagtgcaaacttgcaataattcattgtgccggttattcagaccctatattggtgcagacactttggcaagatatcatagagaaagaattgagtgacagtgtgacattgagctcctcggatagaatgcatgctcttagtctcaagattgttctccttggcaaaatttatgctggcacaccacgcttctttcctttagattttattgtacagtttttagaacagcaggtttgtactttgaactgggatgtgggcttcgtaatacagacaatgaatgaaattggagtaccattacctagactactagaagtttatgatcagttgttcaaatcacgggatccattctggaacagaatgaagaagccactgcaccttttggattgtatacatgtattattgataagatatgttgagaatcccagccaagttttaaattgtgaaaggagaagatttacaaatctctgcctggatgctgtttgtggttaccttgttgagctccagtctatgagctcgtcagtagcagtacaagccatcactgggaattttaaatctcttcaagctaaattagaacggcttcattaattactgtgatatactttcatccgttttatgatctgtaaaataaaaactcagctgggtccag

SEQ ID NO: 4291 - protein, 1391 aa, Homo sapiens; identical to SEQ ID NO: 514

SEQ ID NO: 4292 - DNA, 849 bp, Homo sapiens
acgcgcttaaaccaacggaacctgaccaacctcctaggccagacacacgacctagctcccacctaccgtatccctcctccctccttcctcctcaccctatccaaccccatcccgcccctctccttccctgttccctcccctttatccttcccttcctttccctccctcccttccctaaataacctaccctaattttaccctgccacaccccaaaaccctcaaccccctcgaaagcatcagcagcctcctagctccacccacaacctctagccccctcccaacagcttcctcttcccaggccagaacggcgtcttccagttccccaccggatgaagcggaagtgcgtcatgtcgaggcgccaaggcgctcgtttggcgcgcgcgccctaggcggcggatctaagctaacttcttggatcttttcttgtttctccttggtttttgactttttctggaccctggtgtctacgatttccgagatgccgtcttctttgttgggcgcggcgatgccggcctctacatctgccgcagccctgcaggaagctctggaaaatgctggacggctcatcgaccgtcagttgcaagaggaccgcatgtacccggacctttccgagctgcttatggtgtctgccccaaataatcccaccgtttctggcatgtcagatatggattatcctttgcaaggacctggtttgctgtccgtacccaaccttccagagatcagttccatccgaagagttcctctcccacctgaacttgttgagcagtttggacatatgcagtgtaattgcatgatgggtgtgttccctcctatcagcagagcttggctcacaattgacagtgatatatt

SEQ ID NO: 4293 - protein, 122 aa, Homo sapiens
MPSSLLGAAMPASTSAAALQEALENAGRLIDRQLQEDRMYPDLSELLMVSAPNNPTVSGMSDMDYPLQGPGLLSVPNLPEISSIRRVPLPPELVEQFGHMQCNCMMGVFPPISRAWLTIDSD

SEQ ID NO: 4294 - DNA, 1003 bp, Homo sapiens
acgcgcttaaaccaacggaacctgaccaacctcctaggccagacacacgacctagctcccacctaccgtatccctcctccctccttcctcctcaccctatccaaccccatcccgcccctctccttccctgttccctcccctttatccttcccttcctttccctccctcccttccctaaataacctaccctaattttaccctgccacaccccaaaaccctcaaccccctcgaaagcatcagcagcctcctagctccacccacaacctctagccccctcccaacagcttcctcttcccaggccagaacggcgtcttccagttccccaccggatgaagcggaagtgcgtcatgtcgaggcgccaaggcgctcgtttggcgcgcgcgccctaggcggcggatctaagctaacttcttggatcttttcttgtttctccttggtttttgactttttctggaccctggtgtctacgatttccgagatgccgtcttctttgttgggcgcggcgatgccggcctctacatctgccgcagccctgcaggaagctctggaaaatgctggacggctcatcgaccgtcagttgcaagaggaccgcatgtacccggacctttccgagctgcttatggtgtctgccccaagtgagtgatagtgaccctgctttctcaacctaaaggactctcgcctgacttcctaatttgctacttatccccagcgttggtcccggcgaggatatgctgagatttatggcactgttggctgcatttttggagaacagcaagcagcttcttttcagataatcccaccgtttctggcatgtcagatatggattatcctttgcaaggacctggtttgctgtccgtacccaaccttccagagatcagttccatccgaagagttcctctcccacctgaacttgttgagcagtttggacatatgcagtgtaattgcatgatgggtgtgttccctcctatcagcagagcttggctcacaattgacagtgatatat

SEQ ID NO: 4295 - protein, 63 aa, Homo sapiens
MSDMDYPLQGPGLLSVPNLPEISSIRRVPLPPELVEQFGHMQCNCMMGVFPPISRAWLTIDSD

SEQ ID NO: 4296 - DNA, 2222 bp, Homo sapiens
cgcggtccctctgcggaaggcgccgctcttggcttcggcggcgccgctgtagcttgaaggcggtacttcctccagcatttgccgcaagttattggcaagttcccctgcagttgtttgggctgtccctgtggctggttctggggtgtgcggccagccatggagcgctctgggcccagcgaagtgacaggctcagacgcgtcgggaccggacccgcagcttgcggtcaccatgggcttcacggggttcggtaaaaaagctcgcacatttgacttggaagcaatgtttgaacaaactcgaaggacagctgtggaaagaagtcgcaaaacactggaagcaagagaaaaagaggaagaaatgaacagagagaaagaattaagaagacaaaatgaagatattgagccaacatcctcaagatcaaatgtggtcagagattgctccaaatcatcttccagggatacgagcagcagtgaaagtgaacagagttctgactcttctgatgatgagttaattggccctcctttaccccctaaaatggtaggaaaaccagttaattttatggaggaagatatcctcggtcctttacctccacctcttaatgaagaagaagaagaagcagaggaagaagaagaggaagaggaggaagaggaaaatcctgttcacaagattcctgactcgcatgagataacgctgaagcatggcactaaaacagtgtctgctttgggtctggatccctcaggtgcccgtttggtgacaggaggatatgactatgatgttaagttttgggattttgctggaatggatgcttcttttaaggcatttcgatcccttcagccctgtgagtgccatcagatcaagtcattacagtatagtaacacaggagacatgattcttgttgtatctggaagctctcaggccaaggtgattgacagagatggttttgaagtaatggaatgtataaaaggagaccagtatattgtggacatggccaacaccaagggtcatacagcaatgcttcatactggctcatggcatcccaaaataaagggagaatttatgacttgctcaaatgatgcgactgtgaggacgtgggaagttgaaaatccaaagaagcaaaaaagtgtgtttaaaccacggacgatgcaaggcaaaaaagtcattcccactacgtgcacatatagtagagatggaaacctcatagcagctgcctgccagaatggaagcatacagatctgggaccgaaatttgactgttcatcctaagttccactataaacaggctcatgactcgggcacagacacttcttgcgtgactttttcctatgatggtaatgtccttgcctctcgtggaggtgacgattcattaaaattatgggacatccgacaatttaataaaccacttttttcagcctcgggtcttcccaccatgttcccaatgactgactgctgtttcagtccagatgataagctcatagtcactggtacatctattcaaagaggatgtggcagcggcaaacttgttttctttgagcgtaggactttccaaagggtgtatgaaatagacatcacagatgcgagtgttgttcgctgcctgtggcatccaaagctgaaccagatcatggttggaactggaaatggattggctaaagtctattacgaccccaacaagagtcagaggggagcaaaattatgtgtggttaaaacccagcggaaggcaaaacaagctgagactctaactcaggactacatcatcacccctcatgccttgcctatgttccgtgagccccgccaacggagtacaaggaaacagctggagaaggacagactggatcccctgaagtcgcataaacctgaacctcctgtagcaggcccaggtcgtggtggccgagttggaacccacgggggcactctctcttcctatattgtgaagaacattgctttggacaagaccgatgacagtaatcctcgggaagccattttgcgtcatgccaaagcagcagaagacagcccatattgggtttctccagcatattccaagactcagcccaaaaccatgtttgcccaagttgaatctgatgatgaggaagcaaagaatgagccagaatggaaaaaacgtaaaatttgaagaatctcatttgagagctgtttgcatgagtgggaggggtatgggacaggtttgggttttttttttatgctcatgaaattaaaaattcatttttatgaaca

SEQ ID NO: 4297 - protein, 654 aa, Homo sapiens; identical to SEQ ID NO: 516

SEQ ID NO: 4298 - DNA, 2123 bp, Homo sapiens
gtagcttgaaggcggtacttcctccagcatttgccgcaagttattggcaagttcccctgcagttgtttgggctgtccctgtggctggttctggggtgtgcggccagccatggagcgctctgggcccagcgaagtgacaggctcagacgcgtcgggaccggacccgcagcttgcggtcaccatgggcttcacggggttcggtaaaaaagctcgcacatttgacttggaagcaatgtttgaacaaactcgaaggacagctgtggaaagaagtcgcaaaacactggaagcaagagaaaaagaggaagaaatgaacagagagaaagaattaagaagacaaaatgaagatattgagccaacatcctcaagatcaaatgtggtcagagattgctccaaatcatcttccagggatacgagcagcagtgaaagtgaacagagttctgactcttctgatgatgagttaattggccctcctttaccccctaaaatggtaggaaaaccagttaattttatggaggaagatatcctcggtcctttacctccacctcttaataatcctgttcacaagattcctgactcgcatgagataacgctgaagcatggcactaaaacagtgtctgctttgggtctggatccctcaggtgcccgtttggtgacaggaggatatgactatgatgttaagttttgggattttgctggaatggatgcttcttttaaggcatttcgatcccttcagccctgtgagtgccatcagatcaagtcattacagtatagtaacacaggagacatgattcttgttgtatctggaagctctcaggccaaggtgattgacagagatggttttgaagtaatggaatgtataaaaggagaccagtatattgtggacatggccaacaccaagggtcatacagcaatgcttcatactggctcatggcatcccaaaataaagggagaatttatgacttgctcaaatgatgcgactgtgaggacgtgggaagttgaaaatccaaagaagcaaaaaagtgtgtttaaaccacggacgatgcaaggcaaaaaagtcattcccactacgtgcacatatagtagagatggaaacctcatagcagctgcctgccagaatggaagcatacagatctgggaccgaaatttgactgttcatcctaagttccactataaacaggctcatgactcgggcacagacacttcttgcgtgactttttcctatgatggtaatgtccttgcctctcgtggaggtgacgattcattaaaattatgggacatccgacaatttaataaaccacttttttcagcctcgggtcttcccaccatgttcccaatgactgactgctgtttcagtccagatgataagctcatagtcactggtacatctattcaaagaggatgtggcagcggcaaacttgttttctttgagcgtaggactttccaaagggtgtatgaaatagacatcacagatgcgagtgttgttcgctgcctgtggcatccaaagctgaaccagatcatggttggaactggaaatggattggctaaagtctattacgaccccaacaagagtcagaggggagcaaaattatgtgtggttaaaacccagcggaaggcaaaacaagctgagactctaactcaggactacatcatcacccctcatgccttgcctatgttccgtgagccccgccaacggagtacaaggaaacagctggagaaggacagactggatcccctgaagtcgcataaacctgaacctcctgtagcaggcccaggtcgtggtggccgagttggaacccacgggggcactctctcttcctatattgtgaagaacattgctttggacaagaccgatgacagtaatcctcgggaagccattttgcgtcatgccaaagcagcagaagacagcccatattgggtttctccagcatattccaagactcagcccaaaaccatgtttgcccaagttgaatctgatgatgaggaagcaaagaatgagccagaatggaaaaaacgtaaaatttgaagaatctcatttgagagctgtttgcatgagtgggaggggtatgggacaggtttgggttttttttttatgctcatgaaattaaaaattcatttttatgaaca

SEQ ID NO: 4299 - protein, 637 aa, Homo sapiens
MERSGPSEVTGSDASGPDPQLAVTMGFTGFGKKARTFDLEAMFEQTRRTAVERSRKTLEAREKEEEMNREKELRRQNEDIEPTSSRSNVVRDCSKSSSRDTSSSESEQSSDSSDDELIGPPLPPKMVGKPVNFMEEDILGPLPPPLNNPVHKIPDSHEITLKHGTKTVSALGLDPSGARLVTGGYDYDVKFWDFAGMDASFKAFRSLQPCECHQIKSLQYSNTGDMILVVSGSSQAKVIDRDGFEVMECIKGDQYIVDMANTKGHTAMLHTGSWHPKIKGEFMTCSNDATVRTWEVENPKKQKSVFKPRTMQGKKVIPTTCTYSRDGNLIAAACQNGSIQIWDRNLTVHPKFHYKQAHDSGTDTSCVTFSYDGNVLASRGGDDSLKLWDIRQFNKPLFSASGLPTMFPMTDCCFSPDDKLIVTGTSIQRGCGSGKLVFFERRTFQRVYEIDITDASVVRCLWHPKLNQIMVGTGNGLAKVYYDPNKSQRGAKLCVVKTQRKAKQAETLTQDYIITPHALPMFREPRQRSTRKQLEKDRLDPLKSHKPEPPVAGPGRGGRVGTHGGTLSSYIVKNIALDKTDDSNPREAILRHAKAAEDSPYWVSPAYSKTQPKTMFAQVESDDEEAKNEPEWKKRKI

SEQ ID NO: 4300 - DNA, 5718 bp, Homo sapiens
atttgccgcaagttattggcaagttcccctgcagttgtttgggctgtccctgtggctggttctggggtgtgcggccagccatggagcgctctgggcccagcgaaggtaaaaaagctcgcacatttgacttggaagcaatgtttgaacaaactcgaaggacagctgtggaaagaagtcgcaaaacactggaagcaagagaaaaagaggaagaaatgaacagagagaaagaattaagaagacaaaatgaagatattgagccaacatcctcaagatcaaatgtggtcagagattgctccaaatcatcttccagggatacgagcagcagtgaaagtgaacagagttctgactcttctgatgatgagttaattggccctcctttaccccctaaaatggtaggaaaaccagttaattttatggaggaagatatcctcggtcctttacctccacctcttaatgaagaagaagaagaagcagaggaagaagaagaggaagaggaggaagaggaaaatcctgttcacaagattcctgactcgcatgagataacgctgaagcatggcactaaaacagtgtctgctttgggtctggatccctcaggtgcccgtttggtgacaggaggatatgactatgatgttaagttttgggattttgctggaatggatgcttcttttaaggcatttcgatcccttcagccctgtgagtgccatcagatcaagtcattacagtatagtaacacaggagacatgattcttgttgtatctggaagctctcaggccaaggtgattgacagagatggttttgaagtaatggaatgtataaaaggagaccagtatattgtggacatggccaacaccaagggtcatacagcaatgcttcatactggctcatggcatcccaaaataaagggagaatttatgacttgctcaaatgatgcgactgtgaggacgtgggaagttgaaaatccaaagaagcaaaaaagtgtgtttaaaccacggacgatgcaaggcaaaaaagtcattcccactacgtgcacatatagtagagatggaaacctcatagcagctgcctgccagaatggaagcatacagatctgggaccgaaatttgactgttcatcctaagttccactataaacaggctcatgactcgggcacagacacttcttgcgtgactttttcctatgatggtaatgtccttgcctctcgtggaggtgacgattcattaaaattatgggacatccgacaatttaataaaccacttttttcagcctcgggtcttcccaccatgttcccaatgactgactgctgtttcagtccagatgataagctcatagtcactggtacatctattcaaagaggatgtggcagcggcaaacttgttttctttgagcgtaggactttccaaagggtgtatgaaatagacatcacagatgcgagtgttgttcgctgcctgtggcatccaaagctgaaccagatcatggttggaactggaaatggattggctaaagtctattacgaccccaacaagagtcagaggtatttcataagtattgcctgttttagatggatgacaacaactggggggagggatttccctcccacccccgcttttatttatttcccactttgatggagatccacccatttagaaaatgcagctggaacaaagtaaagcctcaaactcctggtattgtgctttaaaaaggatttgaatattgcccttgatccacactgaattcaaagcgaaagtttcctgggaatttgcagttgtttagctgaaatgttgagtgcaagggggaaaaacgttctgcccactttgcataccaccctggacagaggcattagcagtgatacatgtaagagatttaacaaagcagggaactaaccacttacaggaaatggaatcagcttgtccattttgcttctttcttttttggcttctagcagtttggatgtttggcaagattattctctgtccgcagaaagggacagcacagatacgtttcccctccacccccatgcccacccaagtttcaaacttaagcataccactgtatttcaaaagtctgaaaacgtaactagaggttcagtcatttcctcagttatttccgttttgcttaggcacaaagatggatatgtgtcatcacccagaaaagatggttttgtttctctctcttaaagtacagtgactgataagctttctttagagtaagacttggttaactagcattaaaattcacatgtgaaatttactggggtcccatataaacctgttttaaggtcccacatcctttgaggaaaggaaagccagcctctattaatgaatattcattggccataattttgctctgaatagaagcagacagccccatcttccttcagagcttcctggactagagttggaatcctggccttatacaataaagtatatttatggtatttgaaaacaaataggattttatttgttttttaaaaaagaaattaaaaatgctaatgtacttaggatgggagtctgtttcacttgagaaaatgatgagcctcatttgatagcacccatttagaaggcactttctgtggaagctttgctttaagaaatttacttatttgtatttgcttctcttgaaaaggataactctgtactactaaggagaagtgcaatgttctaagcacatttttggttaatcccacacattcttgggccatagcccctcggcaacactgccaagccaactcagttccagacacttgtactcttgtatttgaaaagtggacatatgccatttggggtgtagaccacccaggttgctttagtctgagacataaactaaaattttaaccctgtgacctttagagtgaaaaggttgggtaattttattatttaagatcttaaaatttcacattattcctataggttttgtaaacttgtgtcctgttgccctgttacctctccaaccctcttgcttgttaataaccactgactgacagacttgcttttccataagtttaagcttttatcactgagagcccatctgttgccatccctcagaaagtcaagtacttgtgtagatggagtgcatgcacagagtatgttcctgaaagtatctcatgttttcaacatgaaattttctgtttctaagaccaagtaaagaaaataatttgcttttacacccgttaggggagcaaaattatgtgtggttaaaacccagcggaaggcaaaacaagctgagactctaactcaggactacatcatcacccgtaagtcgttaacatgcctctcaatcatgcatctctcttctactctcatgtggttttgattgcatagctttagagacagagaaagccctcagaattcaggcatatattacaaaattgcccattcatgtggataggactacgagtcatgtaacagctaacctctgtggcttctgtgactcatcacagggacagggttatttcatgcagctttcaacccaaaagggaaaagcctgttcgagtccaatacattactttatagcagttttttcaagagtaacagtctattccaagtgtgaacaagaaagagtgctggtcttggaatcaggaggcctgggtttgtccagttccaccactgagtggcaatgtgatgttgaacaacttaacttttaatcagggaagtgtggcgaccagaggaagggtctcttccagctttctctgaaattctatgaccatgtgctagactgatccacaggaatttgtatataaaattaactacctggggtatgagtagaaagcttactagggcagagtggtttctctcacgtatgtcacacaacctcattaatctggcagatgtgtgttcccagagccacaatctcaaacctgcaacaggtgacagctaggaaagaaataatggatgctacagcgattatcattagtggatggccctgtggactttatcagtgactcagtctggagcccagggggcgctgtactgctgggttttctcactggtggtgggtctcatatgagaccaagtcccttggagcttatgaccagtaaagagatcccatgacactttttgcaagagtagaagtgttaaagtcagtgtcataactagtctagctcatgtaattacatgcggcctacttaaattcctccagtcgtttgaagtgaaaagctattttccccctcctaaaaatactgttgtgttgtgttgcccaactgagtgacgggtggctatgtttctcagctcccctgactcaaggcaggcatgttttactggtgagtgatatggtctggcctcagttggcagtataggtagaaggtaggaggggatactggaagaggttttgaggtgttatagacattttattgatattataaattccctttaacctttcccttccttcccctggtcccccgggaaaagtttcttttaaagggggtttaatctgcacgtaagagtcaaaagaaactgctagtacttttctggggcaaaaaaagggagttatttaatacttcccctaataactctttccttttcccctagaatattatactgttttcctttttaaattcttataatcttttatattctgaaatttaattttgacattgagtaaacagtaacagcaattgaacgcatattactttggtttttattttcttattttgctaccatatagcaggagggataaggccccattaagtccccatgccaagagatttaggcacctcttgcattcatggcaacctttatcccagtttcagtgggataagtgttcctcccttccggttactcagtgttgtcaactcctcctgagaggtggtcacatttcagaaacgtgtgaagtgattccagtgtttatgagacatctgaggaaacttcagggctgacagcaagctgttggcattattcacatttgggtcctgtaagaaaaaataagaggcagtcccaatatgtgtttcttttcaaaaccacggtaattaagttttaactgctacccatggtttgggagatggggagcctcaccgatgtttccatgacaatatttgacagtatttcctgagtgctgttagctgccaggagaggtgaccagtgagtctggtctcaagcaaaattggctaattggttacagtaagactgtcttttattatcagatcaagactgtcattatgacttccatttcatctttcagttagtcatgctttaactatgtttttggatgggaaggttattgttataatgaaatttttcaaatgtgacttcttgtagctcatgccttgcctatgttccgtgagccccgccaacggagtacaaggaaacagctggagaaggacagactggatcccctgaagtcgcataaacctgaacctcctgtagcaggcccaggtcgtggtggccgagttggaacccacgggggcactctctcttcctatattgtgaagaacattgctttggacaagaccgatgacagtaatcctcgggaagccattttgcgtcatgccaaagcagcagaagacagcccatattgggtttctccagcatattccaagactcagcccaaaaccatgtttgcccaagttgaatctgatgatgaggaagcaaagaatgagccagaatggaaaaaacgtaaaatttgaagaatctcatttgagagctgtttgcatgagtgggaggggtatgggacaggtttgggttttttttttatgctcatgaaattaaaaattcatttttatgaaca

SEQ ID NO: 4301 - protein, 514 aa, Homo sapiens
MERSGPSEGKKARTFDLEAMFEQTRRTAVERSRKTLEAREKEEEMNREKELRRQNEDIEPTSSRSNVVRDCSKSSSRDTSSSESEQSSDSSDDELIGPPLPPKMVGKPVNFMEEDILGPLPPPLNEEEEEAEEEEEEEEEEENPVHKIPDSHEITLKHGTKTVSALGLDPSGARLVTGGYDYDVKFWDFAGMDASFKAFRSLQPCECHQIKSLQYSNTGDMILVVSGSSQAKVIDRDGFEVMECIKGDQYIVDMANTKGHTAMLHTGSWHPKIKGEFMTCSNDATVRTWEVENPKKQKSVFKPRTMQGKKVIPTTCTYSRDGNLIAAACQNGSIQIWDRNLTVHPKFHYKQAHDSGTDTSCVTFSYDGNVLASRGGDDSLKLWDIRQFNKPLFSASGLPTMFPMTDCCFSPDDKLIVTGTSIQRGCGSGKLVFFERRTFQRVYEIDITDASVVRCLWHPKLNQIMVGTGNGLAKVYYDPNKSQRYFISIACFRWMTTTGGRDFPPTPAFIYFPL

SEQ ID NO: 4302 - DNA, 1292 bp, Homo sapiens
acccaccgggggcagcgcaatgaggcgggtgaccctgttcctgaacagcagcccccaagaacggaaaggtggttgctgtatatggaactttatctgatttgctttctgtggccagcagtaaactcagcataaaagccaccagtgtgtataatgagaaaggtggactgactgatgatattgctttgatcagggatgatgatgttttatttgtgtgtgagggagagccatttattgatcttcagacagattctaagcctcctgaaggattgttaggattccacacagagtggctaacattaaatgttggagggaggtactttacaactacacggagcactttagcgaataaagaacctgacagtatgctggcccacatgcttaagaacagaggtgtctggggaaataagcaagatcatagaggagccttcttaattgaccaaagtcctgagtactttgaacccactttgaactacttgtgtcatggacagctcattgtaaatgatggcattaatttattgggtgtgttagaagaagcaagattttttggtattgactcactgattgaacacctagaagtggcaataaagaattctcaatcaccagaggatcattcaccaatatctcgaaaggaatttgtccgatttttgatagcaactccaaccaagtcagaactgtgataccagagtttgaacttcagtggtgctgatgtttctcgttaggaccttcgatacattaacttcaaaatggccaatttaagccgctgcaatcttgcacatgcaaatctttactgtgcaaatcttgaatgaggtgatctctctggatcagtgcttgactgtgcaaatctccagggagtcaagatgctctgttctaatgcagaaggagcatccctgaaactgtgtaattttgaggatctttctggtcttaaagccaatttagaaggtgctaatctgaaaggtgtggatatggaaggaagtcagatgacaggaattaacttgagagtggctaccttaaaaaatgcaaagttgaagaattgtaacctcagaggagcaactctggcaggaaccaatttagagaactgtgatctgtctgggtgtgatcttcaagaagccaacttgagagggtccaacgtgtagggagctatatttgaagagatgctgacaccactatacatgtcgcaaaatgtcagatgagaattttaggggctagaggaagatgtacaagatgaaaacattttccttatcacttttctttctccacccactcagttgtctagaagaagtaacactgtaagg

SEQ ID NO: 4303 - protein, 104 aa, Homo sapiens
MLAHMLKNRGVWGNKQDHRGAFLIDQSPEYFEPTLNYLCHGQLIVNDGINLLGVLEEARFFGIDSLIEHLEVAIKNSQSPEDHSPISRKEFVRFLIATPTKSEL

SEQ ID NO: 4304 - DNA, 499 bp, Homo sapiens
gagaatacttgaaattatttctggaagatatgggaacttttgcgtgaaaaagggctacagaattttgcctgtaaagttatgctaatctctgtacagaaatgtctgacaattcagaagctgaaactcagcaaaatctctactttaagtgtcagataaagcctaacgtcaaaggaaagggcaagagtctcaggaaagagtatgctgacttccagggccagttcttcagaatctgctttttctcctgaaatcaggccatgcgaaaagaagatgttgcctcctggcacagatcattcatcctgcctggtcctcagtcaagtctccagcagcttgggatgtctgaagaatgaaaagcctaagagacaaggcccggggatgcccaacatacattctataagtggggaaagtggataaaatgttttctgtgtggaaaggacaaataacagttaatttctactggaaaagtaaacaaaaaccgtaattaaaattgctcaaaagtaaa

SEQ ID NO: 4305 - protein, 48 aa, Homo sapiens
MSDNSEAETQQNLYFKCQIKPNVKGKGKSLRKEYADFQGQFFRICFFS

SEQ ID NO: 4306 - DNA, 309 bp, Homo sapiens
tcggactggtttccctgctcctcggcttgcagatggcctattgtggaacttcaacttgtgattgtgccatgcgaaaagaagatgttgcctcctggcacagatcattcatcctgcctggtcctcagtcaagtctccagcagcttgggatgtctgaagaatgaaaagcctaagagacaaggcccggggatgcccaacatacattctataagtggggaaagtggataaaatgttttctgtgtggaaaggacaaataacagttaatttctactggaaaagtaaacaaaaaccgtaattaaaattgctcaaaag

SEQ ID NO: 4307 - protein, 42 aa, Homo sapiens
MAYCGTSTCDCAMRKEDVASWHRSFILPGPQSSLQQLGMSEE

SEQ ID NO: 4308 - DNA, 1050 bp, Homo sapiens
acaaacagctgaagatctgcctggaccccctacccctctcttttttccttgtggaaactgtgtataatttggaaagagcaaggacatcctggctcgcagctggccagctccacctgcgacctggacagcctcgcccctccctgcggagccaggcgagttcacagggctgcctccgcttcttgcagcatgtctgctctcctggcctggcctctccagacctttccctccacgggcagcgatttccaaggctctcaagactccaaaccacgtcgttttgggagtgaaaaagtgaaagcacacatcgtgtcattagagcagcagggaccagctgctgggtcaacacttccgaaaacagcgcttcctggggagcgaccggagcatctcagaatctacgaacgtgcttcagagttgcacttagcctagaacatggcctgacctctatggtatgaataaatgagctccatgaagacaataagatctcctgaaattatacagacagcaaagtatgtcgctgtgcttccttgtcttcctgtgatgacccatgtgccatcttacacaaatggacaatcaatggaggacctgtgagtgttgttttcctgagcttctcctctgtctcctcttgtggctgcacttgactgagcatttcatgaaagaatacagaatgcacttctcagactactcttggtcagtcctaagcagcacaaccttagccactgtggagctagtgccagctgtgtgaatctgtacagtggtgcagtgttaagggcaaagagcactttggagccaaggcagacaaaactgcgcagagctcccaggcctgggtgatgatccctcttcccagacatctgaggagttgccatattgatgttctctcattgtttcggctgagctggaatgatcgaaataattctgggactatgacaagtctcaccagacctcgttatggatcagggagaggtgaactttaaaaataatcaagttcaaaggagagccctgtcacctgtgatcagtttcgttagcagaatcccaccagccttgctccccatatcc

SEQ ID NO: 4309 - protein, 78 aa, Homo sapiens
MSALLAWPLQTFPSTGSDFQGSQDSKPRRFGSEKVKAHIVSLEQQGPAAGSTLPKTALPGERPEHLRIYERASELHLA

SEQ ID NO: 4310 - DNA, 2807 bp, Homo sapiens
aaagagaggctttctgtgtcctgggaatgttctgctaagaagacagtgatgataatagttaccactgaataagtactgacatgtgaggaactaccaggatccctgctttacaggaagaagccgaggctcagaagtacacttgtctaaggtcccagaacaagtcattccagttggcttttgagtggatacgtgcagtgagatcattgacactggaaacactagttcccattttaattacttaaaacaccacgatgaaaagaaatacctgtgatttgctttctcggagcaaaagtgacaaaaagtaagagatgtggagaggaagacaggaatactagggaaaagtttctctttctccaatcactcactctggaggcagctagctgtcaactcacaaagacactcaagcagcctatggaagaaggccacatggtaaaatatggaggcctccagccaacagtcagcaaggaactgagacaagtcaacaaccatgcctctgaggaaacactacattccagtaatgaagaggaagaccctttccgcggaatggaaccctatcttgtccggagactttcatgtcgcaatattcagcttccccctctcgccttcagacagttggaacaagctgacttgaaaagtgaatcagagaacattcaacgaccaaccagcctccccctgaagattctgccgctgattgctatcacttctgcagaatccagtgggtgagtgccctcagatgtcatttccccattttatattttagatggtgattgttgtctgtggtcttttgagtttttgtggctcattgcttgatttgagtgggagaacaatggggtttctagagtcaaaaaaaaaaggatgaatttctcaggtgacatttctatatctgcaggagaagacattttagtgaaattgttttacatggaagagctgaaaatgtattggtgaatgctaataaacatttgccaaagggcagttgtacttggaaaattaatattggccatatgtgacttgatagaagacattttaacaaatgagaactaatggacaaattaccatgtagtgatacatgtctagaaacaataggaaatgttcactgatgcaaaatgaatttggaatcaagaataaattgtattgtaattagaatcaaaagaaatatgcaatggtattcatgagtctaaaaattttgcctttgacattttgaggtattgcttaccagaatactatttcagctcccagtataaggtgattttatttagcattagtacttatagaggagtcagccacagccacgtctccatcatgtaacatttttatttcctactttgcagggtataatttttgtttttattctttttcgtgttgtttaccaatggagttttacactttaaagcaatgtcaccagtttaaaaattgtgaaagaaagtaaggatattgggcacatcaattatttgttcttgtgaccagctgcatttttaagaagcctggatagaaaggaaagaggatgaagccagtgggccatacatagatagactcttgaacatttgctaaaactacaagaacaaaacaattactatgctacaaatgtgatggtcccacattctctgccaagttaaaggcatctctggggaaaatgtcttttggatcttgttaaagttaggaaggttgtgctcagaggaaatttggctagtaactcaactcaaagatactgaatttagctgttttacttgttattgaccagtctaagggacctgtgttagaaaaaggtatgaggaaaatactactagataaataataagaaaacaaatattcaccttgaagcaatgaaaagaggaaatatattttgtttctgttgttgtaattgaactatgtgtttaaagaagaatgcacacacattgatcagactcatactaaagcagatgggaattttatatgacagcttgacctgaacattttttgaaaaatgctgttcccctgaaactatttctcctttctttggaaataacattgctgccgttcattctgtgtagaagagattcacagatatcaggtgtatccagggatcccaagatcaccctcgggttcaatgatttgctagcagagctctcataattcagcaaatagtcatattcatggctctgatgtgttatagcaaaaggattcaatgcaaaataagcaaagggaaaggtagatggaacaaaatctggaggaaaccaaacataagcttccaagagtccccaagtgaagtaagacaagatacacttaattcctccagtaatgagttgagacaacacttgtgaaatgtgttcaccagggatgcctttaccagggaagcctattaaagactcagtacctagagtttttactggaggccagtcacttaggtaccctctgcctaggatatacaaacttccagatttccagaaggaaagtggatatgcagcataaaccacattatttgcacagacagtttaggcaaattgagccagtcttaccatttagagaatggtggatcactcctgaaagtcaggtctgctaaaggccaatgtttcaaacaggtcttcctatatttaattgacacagtcctgattaactgtttactacacaccaggttatcttagaatagttatcttactttcttcacacttgtggaagaagagattataattaaaattaaaatgcactaatttaaagccctgatatattcaattagctttggtatctcaaaaattttggttgctaaccatgatttctcattttgagttggtgttatatcatgtgcccttaaaataaaatgatgcaatatacct

SEQ ID NO: 4311 - protein, 103 aa, Homo sapiens
MEEGHMVKYGGLQPTVSKELRQVNNHASEETLHSSNEEEDPFRGMEPYLVRRLSCRNIQLPPLAFRQLEQADLKSESENIQRPTSLPLKILPLIAITSAESSG

SEQ ID NO: 4312 - DNA, 1482 bp, Homo sapiens
ccttcatcccattctgatgctggcttccctgaagcaacactcctgttccagatttgtatgcttgagcattccagttggcttttgagtggatacgtgcagtgagatcattgacactggaaacactagttcccattttaattacttaaaacaccacgatgaaaagaaatacctgtgatttgctttctcggagcaaaagtgcctctgaggaaacactacattccagtaatgaagaggaagaccctttccgcggaatggaaccctatcttgtccggagactttcatgtcgcaatattcagcttccccctctcgccttcagacagttggaacaagctgacttgaaaagtgaatcagagaacattcaacgaccaaccagcctccccctgaagattctgccgctgattgctatcacttctgcagaatccagtgggtgagtgccctcagatgtcatttccccattttatattttagatggtgattgttgtctgtggtcttttgagtttttgtggctcattgcttgatttgagtgggagaacaatggggtttctagagtcaaaaaaaaaaggatgaatttctcaggtgacatttctatatctgcaggagaagacattttagtgaaattgttttacatggaagagctgaaaatgtattggtgaatgctaataaacatttgccaaagggcagttgtacttggaaaattaatattggccatatgtgacttgatagaagacattttaacaaatgagaactaatggacaaattaccatgtagtgatacatgtctagaaacaataggaaatgttcactgatgcaaaatgaatttggaatcaagaataaattgtattgtaattagaatcaaaagaaatatgcaatggtattcatgagtctaaaaattttgcctttgacattttgaggtattgcttaccagaatactatttcagctcccagtataaggtgattttatttagcattagtacttatagaggagtcagccacagccacgtctccatcatgtaacatttttatttcctactttgcagggtataatttttgtttttattctttttcgtgttgtttaccaatggagttttacactttaaagcaatgtcaccagtttaaaaattgtgaaagaaagtaaggatattgggcacatcaattatttgttcttgtgaccagctgcatttttaagaagcctggatagaaaggaaagaggatgaagccagtgggccatacatagatagactcttgaacatttgctaaaactacaagaacaaaacaattactatgctacaaatgtgatggtcccacattctctgccaagttaaaggcatctctggggaaaatgtcttttggatcttgttaaagttaggaaggttgtgctcagaggaaatttggctagtaactcaactcaaagatactgaatttagctgttttacttgttattgaccagtctaagggacctgtgttagaaaaaggtatgaggaaa

SEQ ID NO: 4313 - protein, 91 aa, Homo sapiens [sequence omitted]

SEQ ID NO: 4314 - DNA, 1589 bp, Homo sapiens
ctatagttggcgtaccctgaggcctgccagttcctgccttaatgcatatgtagtcgtaattgagttctgacacggccttggatgtttctgtcctaaatagctgacattgcatcttcaagactgttgtgaagaatttggaaattgcaaggagcatgggaaggagatgatttgggcattccagttggcttttgagtggatacgtgcagtgagatcattgacactggaaacactagttcccattttaattacttaaaacaccacgatgaaaagaaatacctgtgatttgctttctcggagcaaaagtgcctctgaggaaacactacattccagtaatgaagaggaagaccctttccgcggaatggaaccctatcttgtccggagactttcatgtcgcaatattcagcttccccctctcgccttcagacagttggaacaagctgacttgaaaagtgaatcagagaacattcaacgaccaaccagcctccccctgaagattctgccgctgattgctatcacttctgcagaatccagtgggtgagtgccctcagatgtcatttccccattttatattttagatggtgattgttgtctgtggtcttttgagtttttgtggctcattgcttgatttgagtgggagaacaatggggtttctagagtcaaaaaaaaaaggatgaatttctcaggtgacatttctatatctgcaggagaagacattttagtgaaattgttttacatggaagagctgaaaatgtattggtgaatgctaataaacatttgccaaagggcagttgtacttggaaaattaatattggccatatgtgacttgatagaagacattttaacaaatgagaactaatggacaaattaccatgtagtgatacatgtctagaaacaataggaaatgttcactgatgcaaaatgaatttggaatcaagaataaattgtattgtaattagaatcaaaagaaatatgcaatggtattcatgagtctaaaaattttgcctttgacattttgaggtattgcttaccagaatactatttcagctcccagtataaggtgattttatttagcattagtacttatagaggagtcagccacagccacgtctccatcatgtaacatttttatttcctactttgcagggtataatttttgtttttattctttttcgtgttgtttaccaatggagttttacactttaaagcaatgtcaccagtttaaaaattgtgaaagaaagtaaggatattgggcacatcaattatttgttcttgtgaccagctgcatttttaagaagcctggatagaaaggaaagaggatgaagccagtgggccatacatagatagactcttgaacatttgctaaaactacaagaacaaaacaattactatgctacaaatgtgatggtcccacattctctgccaagttaaaggcatctctggggaaaatgtcttttggatcttgttaaagttaggaaggttgtgctcagaggaaatttggctagtaactcaactcaaagatactgaatttagctgttttacttgttattgaccagtctaagggacctgtgttagaaaaaggtatgaggaaa

SEQ ID NO: 4315 - protein, 91 aa, Homo sapiens [sequence omitted]

SEQ ID NO: 4316 - DNA, 1573 bp, Homo sapiens
agattatagcccagcgtacgagaagcacgagtcctatagttggcgtaccctgaggcctgccagttcctgccttaatgcatatgtagtcgtaattgagttctgacacggccttggatgtttctgtcctaaatagctgacattgcatcttcaagactgtcattccagttggcttttgagtggatacgtgcagtgagatcattgacactggaaacactagttcccattttaattacttaaaacaccacgatgaaaagaaatacctgtgatttgctttctcggagcaaaagtgcctctgaggaaacactacattccagtaatgaagaggaagaccctttccgcggaatggaaccctatcttgtccggagactttcatgtcgcaatattcagcttccccctctcgccttcagacagttggaacaagctgacttgaaaagtgaatcagagaacattcaacgaccaaccagcctccccctgaagattctgccgctgattgctatcacttctgcagaatccagtgggtgagtgccctcagatgtcatttccccattttatattttagatggtgattgttgtctgtggtcttttgagtttttgtggctcattgcttgatttgagtgggagaacaatggggtttctagagtcaaaaaaaaaaggatgaatttctcaggtgacatttctatatctgcaggagaagacattttagtgaaattgttttacatggaagagctgaaaatgtattggtgaatgctaataaacatttgccaaagggcagttgtacttggaaaattaatattggccatatgtgacttgatagaagacattttaacaaatgagaactaatggacaaattaccatgtagtgatacatgtctagaaacaataggaaatgttcactgatgcaaaatgaatttggaatcaagaataaattgtattgtaattagaatcaaaagaaatatgcaatggtattcatgagtctaaaaattttgcctttgacattttgaggtattgcttaccagaatactatttcagctcccagtataaggtgattttatttagcattagtacttatagaggagtcagccacagccacgtctccatcatgtaacatttttatttcctactttgcagggtataatttttgtttttattctttttcgtgttgtttaccaatggagttttacactttaaagcaatgtcaccagtttaaaaattgtgaaagaaagtaaggatattgggcacatcaattatttgttcttgtgaccagctgcatttttaagaagcctggatagaaaggaaagaggatgaagccagtgggccatacatagatagactcttgaacatttgctaaaactacaagaacaaaacaattactatgctacaaatgtgatggtcccacattctctgccaagttaaaggcatctctggggaaaatgtcttttggatcttgttaaagttaggaaggttgtgctcagaggaaatttggctagtaactcaactcaaagatactgaatttagctgttttacttgttattgaccagtctaagggacctgtgttagaaaaaggtatgaggaaa

SEQ ID NO: 4317 - protein, 91 aa, Homo sapiens [sequence omitted]

SEQ ID NO: 4318 - DNA, 1483 bp, Homo sapiens
gagtgggaccaagaagagcatacaaagctgaaatgttctccagaagttgatttccaatggggataaacattccagttggcttttgagtggatacgtgcagtgagatcattgacactggaaacactagttcccattttaattacttaaaacaccacgatgaaaagaaatacctgtgatttgctttctcggagcaaaagtgcctctgaggaaacactacattccagtaatgaagaggaagaccctttccgcggaatggaaccctatcttgtccggagactttcatgtcgcaatattcagcttccccctctcgccttcagacagttggaacaagctgacttgaaaagtgaatcagagaacattcaacgaccaaccagcctccccctgaagattctgccgctgattgctatcacttctgcagaatccagtgggtgagtgccctcagatgtcatttccccattttatattttagatggtgattgttgtctgtggtcttttgagtttttgtggctcattgcttgatttgagtgggagaacaatggggtttctagagtcaaaaaaaaaaggatgaatttctcaggtgacatttctatatctgcaggagaagacattttagtgaaattgttttacatggaagagctgaaaatgtattggtgaatgctaataaacatttgccaaagggcagttgtacttggaaaattaatattggccatatgtgacttgatagaagacattttaacaaatgagaactaatggacaaattaccatgtagtgatacatgtctagaaacaataggaaatgttcactgatgcaaaatgaatttggaatcaagaataaattgtattgtaattagaatcaaaagaaatatgcaatggtattcatgagtctaaaaattttgcctttgacattttgaggtattgcttaccagaatactatttcagctcccagtataaggtgattttatttagcattagtacttatagaggagtcagccacagccacgtctccatcatgtaacatttttatttcctactttgcagggtataatttttgtttttattctttttcgtgttgtttaccaatggagttttacactttaaagcaatgtcaccagtttaaaaattgtgaaagaaagtaaggatattgggcacatcaattatttgttcttgtgaccagctgcatttttaagaagcctggatagaaaggaaagaggatgaagccagtgggccatacatagatagactcttgaacatttgctaaaactacaagaacaaaacaattactatgctacaaatgtgatggtcccacattctctgccaagttaaaggcatctctggggaaaatgtcttttggatcttgttaaagttaggaaggttgtgctcagaggaaatttggctagtaactcaactcaaagatactgaatttagctgttttacttgttattgaccagtctaagggacctgtgttagaaaaaggtatgaggaaa

SEQ ID NO: 4319 - protein, 91 aa, Homo sapiens [sequence omitted]

SEQ ID NO: 4320 - DNA, 655 bp, Homo sapiens
cacagagagtacgtgtcaaaggaaactcaaaagaacacattttctcagtgattacaggttttagagaagaggaacaatgcttcctctgagcctgaagaaaagaatgaaataagggctgcaagggaacatgcaggtttcacactacaggagcttgtctgtcttggtgcaagtgggagcattccagttggcttttgagtggatacgtgcagtgagatcattgacactggaaacactagttcccattttaattacttaaaacaccacgatgaaaagaaatacctgtgatttgctttctcggagcaaaagtgcctctgaggaaacactacattccagtaatgaagaggaagaccctttccgcggaatggaaccctatcttgtccggagactttcatgtcgcaatattcagcttccccctctcgccttcagacagttggaacaagctgacttgaaaagtgaatcagagaacattcaacgaccaaccagcctccccctgaagattctgccgctgattgctatcacttctgcagaatccagtgggagaagacattttagtgaaattgttttacatggaagagctgaaaatgtattggtgaatgctaataaacatttgccaaagggcagttgtacttggaaaattaatattggccatatgtga

SEQ ID NO: 4321 - protein, 129 aa, Homo sapiens; identical to SEQ ID NO: 519

SEQ ID NO: 4322 - DNA, 465 bp, Homo sapiens
gctgcaagtggcaccaagtcactcaatgacatgcaacaagaacaactggacacagctttatacctcctgagagcagtgttaggagaaagcaggagcagaccctgtctttaatgtcctggtggtggaccatttcaagtccatcctcaagaagcacatcttagcaacagggatatcaatgaagttcttgagagcatcccagctctctctctgtctaagatgtcacatccctcattacatctcaatgtccctctcagcctgcgctcccaggctccagatacagctgcgaagcctctattacaaacatattcctttgccgatgctgacccctcattgttatttgttttagacccagattggcaagttcccccaaaataaacaagtcagtattttgacttaaattatatcaaatctacagatcagttgatggaccactgcaatttttatgatttggagacttctgatcca

SEQ ID NO: 4323 - protein, 56 aa, Homo sapiens
MKFLRASQLSLCLRCHIPHYISMSLSACAPRLQIQLRSLYYKHIPLPMLTPHCYLF

SEQ ID NO: 4324 - DNA, 339 bp, Homo sapiens
agtcagtattttgacttaaattatatcaaatctacagatcagttgatggaccactgcaatttttatgatttggagacttctgatccagggacatgttcttttagggaaggatgtagagcaaaagatatgcataaacttgtgaaactttaccactgttcagaattcctcagagagagaaactacattcatcttggaaatccatattgcgtactttgaagaactgcagttcttcttgcaaactctttatttctttgaagttaggtcaggagaataatacggcatcattctgtggacaagccatggttattgccaccaaataaaatgtctctgtatcaagaa

SEQ ID NO: 4325 - protein, 56 aa, Homo sapiens
MDHCNFYDLETSDPGTCSFREGCRAKDMHKLVKLYHCSEFLRERNYIHLGNPYCVL

SEQ ID NO: 4326 - DNA, 578 bp, Homo sapiens
attctgatgctggcttccctgaagcaacactcctgttccagatttgtatgcttgagcattccagttggcttttgagtggatacgtgcagtgagatcattgacactggaaacactagttcccattttaattacttaaaacaccacgatgaaaagaaatacctgtgatttgctttctcggagcaaaagtaatgatgccgtattattctcctgacctaacttcaaagaaataaagagtttgcaagaagaactgcagttcttcaaagtacgcaatatggatttccaagatgaatgtagtttctctctctgaggaattctgaacagtggtaaagtttcacaagtttatgcatatcttttgctctacatccttccctaaaagaacttgtgacaacaaacaaagggaaagaaataacattttttaataactatgtggaaagctctatagtaagtgcttcacatgttacctcatttaattcttacaactaccttatctagtaaattatctcccatttgacactttaaggaagcagctaagagatgtttcataactttcctagaaaaggtaggatttgaatgcaggt

SEQ ID NO: 4327 - protein, 54 aa, Homo sapiens
SFTSLCISFALHPSLKELVTTNKGKEITFFNNYVESSIVSASHVTSFNSYNYLI

SEQ ID NO: 4328 - DNA, 576 bp, Homo sapiens
gctcaccccgatgcagtccagtcatgcttcccctatgacttagttgtttgtattgtccccagagtcaagagtgtcccaagtctatgaatcttgctccagagcattgtaatttagcctacggccttgttcacacaaataaatctggcattagttccagctggcagtgatatgggcttggtgattcacttttaggcctcattggagtagagttaaagaaacttcattgtcagaaagagtgagatctctaccatgtgtcttctaagagtgttcagagtgttttttttttttagcgtgcagaagtcctaactttattcctagtaccctccattctctctttttttattgaaacataagaattgtgcatatttacagggtacatgtgatatttttatacatgtatacaatgtgtaataatcaaatcagagtaattaggttatcagttacctcaaacatttatcctttgtttgtgctgggaacattccaaatctcttcttctagctattttgcaatataaaataattccatctatgttgttgcaaataacacctcccgagtagctgggactacaggcacgcg

SEQ ID NO: 4329 - protein, 39 aa, Homo sapiens
MYTMCNNQIRVIRLSVTSNIYPLFVLGTFQISSSSYFAI

SEQ ID NO: 4330 - DNA, 8568 bp, Homo sapiens
aaaccttggcttcagcccggccgccgccaggcgttggcatcgccggggagagccttccggactccgggcggcggctggctgggggcgcgttccgaggcgccctcaggcagggcgcgggggcagagcctcgcctgggttctggaggctgcggggccatcgctccagatgcgaaagccatggagttgagctgcagcgaagcacctctttacgggcagatgatgatctatgcgaagtttgacaaaaatgtgtatcttcctgaagatgctgagttttactttacttatgacggatctcatcagcgacatgtcatgattgcagagcgcatcgaggataacgttctccagtccagcgtcccaggccatgggcttcaggagacggtgacggtatctgtgtgcctctgctcggaaggttactctccggtgaccatgggctctggctcagtgacctacgtggacaacatggcttgcaggctggctcgtctgctggtgacgcaggccaatcgcctcacagcctgcagccaccagaccctgctgaccccatttgccttgacggcaggagcactgcctgccttggatgaggagctcgtgctggctctgacccatctggaattgcctctagagtggactgtgttgggaagttcttcacttgaagtatcttctcacagagaatctcttctacacctggctatgagatggggcctggctaaactttcccagttcttcttgtgtctcccggggggagtccaggccttggctttacccaacgaagagggtgccacaccattagacttagctttacgtgaaggacactccaagctggtggaagacgtcacaaattttcagggcagatggtccccaagcttctcccgagtgcagctcagtgaagaagcctccttgcattacattcactcatcggaaacgctgaccctgaccctgaaccacacagccgagcatttgttggaggcagatattaaactcttccggaaatacttttgggatagagcctttcttgtcaaggcctttgagccagaagccaggccagaggaaagaacagctatgccctccagcggtgcagaaactgaagaagagattaagaattcagtgtccagcagatcagcagctgaaaaggaagatataaagcgtgtcaaaagcctggtggttcaacacaatgaacatgaagaccagcacagcctagatttggatcgctccttcgatatcctaaaaaaatccaagccgccctcgacattgcttgctgcaggccggctttcagacatgctgaatggaggtgatgaagtctacgctaactgtatggtgattgatcaggttggtgatttggatatcagctatattaatatagagggaatcactgccactaccagccctgaatccagaggttgcactctgtggcctcagagcagcaaacacacccttcctacagaaaccagtcccagtgtgtacccacttagtgaaaatgtcgaagggacagcacacactgaagcccagcagtccttcatgtcaccatcaagttcgtgtgcttccaacttgaatctttcttttggttggcatggatttgaaaaggaacaaagtcatctaaagaaaagaagttctagccttgatgccttggacgccgacagtgaaggggaagggcattctgagccatcccacatctgttacactccagggtctcagagctcctcaagaactgggattcctagtggggatgaattggactcttttgagactaacactgaaccggattttaatatctccagggctgaatcccttcctctatcaagtaatctacagtcgaaggaatcactgctttctggagttcgctcacgttcttattcttgctcatcacccaaaatttctttaggaaaaactcgtttggtgcgtgaattaacagtatgcagttcaagtgaaggtaagcatcatttaacatttggctttgaaaacactctattccagaacagatttttcagttagtataagtacataaaatattcaagaacagcagacaagaattttccattctgttttcataactggtttttctaagcctgacaaaattcttttcttattggataacagccaaatttgattttgatcagatttgattttgatgaaattacaaatacatgcacacctctctgttactttattctttgaataaaatgttttcctcaaggatagtgtaaattagaattgattccagttatattattatgagggccttagaggattttatttgagtaaattataaaaattacttttgtctcatatatacattgctaacataatccaactcctcagagccagagtgttgcagaatggattttcttctttctttgtttagaaagggactttggagagttgaaataacatatttgtaacatgattaaatatatctcaacatttttttggtggcaatgtaggcaattagaaatataacttttaggcaataaacttaatttaaatgtaggatacatacaaaaaggagtgcaaatcataaatatgcatcttgaattttcaagtgaattcagatctataaatggaaaaattatgtacaacttagagctccccttgtatcctctctaagccactcctcccattttcacctgcccccattttgaaatgtaattatttcatactttctgtaattaatatgtaataattgtattaaaaagcatatttgaaagtattcatgccaatgcataatacatagcattataatgaaatttttgtcaatgtcttagagaatatctttattgtctattatccttaagggacttaaaagattcagaaagcaagagatgaacttaagtactctgaagtactactcaaatattttcttaagataaaatatttaaaataggatttattttattccctctcttttttcttattcttgcttattaaattgttattttgcatttttatgccatgcagaacaatactgaaaacataatcttggtgcttgaaacagctatcctagaataatgacatatatgctagatgttcaataaatatttgttgaatgagtatgagaaaaagatagataaaacacaaaagaaatgctaccatgatttttgttttcctttttctgggatgtactgttagaagagaagagagcaagactgataatacatgtcagtttttatttttggatggggagatgaagaaaagttacaagagaaagaaaggatacaactaccttgagagggcaggataaataagatggattgaatttgttctggatttttgttttttacttcatgggttctttctaggtctccaggtctccccagccttagtttaggttggtgtatttttaatagctcgacaccttttcactgatagtcccagctgatgaattaacctcacattgttactatttggaaaacatgtttaagttttctgtgcttcaaattatggctttgcctttagatctgtggtccttgatctatgaagtcagatatctctagagtttgaaattattgaccacacaattaagaggaaacttattgttcacaagggaaaatagccctaatttacttattctttaatgatcaaggaagggtgtctttaccttacatgcaagcctgaaacctttgcatatgagttagaataaaaagctgatctcaactgctttggttttcagtaaacgaaaccttatctttagacggtatatttaaagacaaggctacttgagtgaagtttgatactatccagaaggtaacagttagaaccaggcaatttaggttgagtctactcactaaatatatgaaaattccagtggatagacttatatggctgcaaacatttggattgataccatttaggtcagtcaataccataggactatgaaaaataaattaaccactaatgaagaaggaataattttatctgtgtttatgtaatcaaagcacaaatgtgaaagcttgcctaatgcaaagatatattctaatgtttcattgtttagtcggcttggattaatcaaaagtaaattgaggtttgtgttgccataaatcctttcttgatgagttttgaatagtcctaaaaattttcaggtctatttgaacagagtccaagtctccttatgtcccagagggaagctcccatatgagagctgtaatgcagatatacaaacctaggatgctttcggtcctttttattattatttgtgatgttctgtcttccttgtcacttccaaagagttacttactgtaatttctcatgcgtcttttttttttttttgagccaagagtacgatgatggcaactttatttttgatgtttgtatacataaaacaaaatccagttttataattccctttggtctattatagatttaggcagaaaggaacattgccaatattaaaatgataactacagtctcaccaagggggacaaaggggttcagcatttaagaatttgaggaatgacgtaaacatacttttgaaaacgttgtgagctgatggatggaatttaattggattttgaacagttggtggcttattctcttggtacttcagcctatttaccataagaatagtgagttctgcctatgacttaatttgaggaacacttgataatggctataaaataaaggcttcaaattcttcaaagtagatttcctattacatacaagatagtattaggtgcaacatttgatattacccatttcaggggatatgtatttgttttcctccttatgtatcatttccctttgcaacctagttatgcctcttcactgttctggattgtgagagtgaaggatttgtccctgccctgtagatggtgtgctccacagtgactgccccctccttcaggctctctcactgtctaaatcagtgtctctactccacccctgtagtaagtatttcaactctggaaacaagatggctccaagctgcttgcatgaacctcccttctggccccctccacaagtccaatgaaaaaaatggtcctccctttcccatgagccacagagcacatctctgaacttgctgctgctaggattttatgaggacattgcagctatatgaaaattaactcttcttatgctgtccttcaagacttcatttgagctttgtttaaaagcagttatttattggttctgtatgttagggcattagtgttatgaagaatagggatgactctagtgaaaagtatccaaaaagatagagctaattttctgcacttctgaaaatgtttgctgtcccttgctgatgctaacttagttcatgaagtcattaaatgttggcatattttggccatgtttctccctaccctctttaaattacagaaagtgatttaaaaaaatccagagcaatgccttacttatataaggtaactcattttctcattattttctagctggtagtgtgtataatgatacaatatggttgagtatgcatttcagactaacatatgactgccagtttgtgtgccttagttttcattttattgttctgtgtcttgtagagcaaagagcttacagcttatcggagccaccaagagaaaacaggtacttttaactattccaattttcctgaggaactgcatgatccttctttggaaatgtccacacatcatttttgctatctgttcactagttcatgagaggtttccatgtaacaagcctgcctaagaccctttgctccctctgggatctgtatcaggatagatctgccagccctcccctttcagtccttggctgtgcaggcctcaggattggggacagcatgttctgtctgggtatcttcaaagccaaataccctcaaggggagcagtgtgaggggaccacctgttttagaaagacaacatgttttctccagctctattccaccatgacaaggggacttactttagtaacagaaccctgggtggtcaatgatagaaagtgcctaaacatccctactgtctctctatggatttttgcctagtagcccttcagctggaaacaaagaataaacaatgcagaagacttttaagcatgatcagtttcctggttgagatgcagatttaacctaagcttctctttctcctagaaggtaaaactgttgttggagtatagcttgggaagcagaccagtgtgcaagcatgattgttggtttctgttggtgttgaataactaactgcccatgagtcacactgtgaaatagccccagggttgtatgcaaaacaagtgccagaatggcacacatgtttgactttaagagaccatctgaaaagagtgaaatggtttaattttgtttgagattaatactaaaactttgaaacgttttaaacgttttagtatacggatcaagatggggtgtttcgttttaaatcctggaatcaaagtattaataagaaaaagcctcctttggatcatttctattttttttttgaaaccagaatagaaactttcaaatgatacaaaagaggaagattaagaatgcccttgaaagataggatgatgatcaagttgacttcgtgacaatggcaatgaggatgatgatagcaaaagcagtaattactgacaaatattgaacatttgtatgtgccttgtactgttttaagcagtttacatttattatctcatttaagcaatttacttcctcattctggaatttgatcttcatcttggtcatcattttgattaacagtcatctttttaacaactggaaaaataatggattgttatcaagaattttttaaattaaaaatataaaaaatattcatttgtcattaggagagagatttaagaccgaaggagccaatgttatacttggctaaatagtagcctataaaatattttcactttgatggcatctttatgaagtttctttttatctggttcttcgttctctgtcactcttgtttttgttttctgttcctttctattctttaatctttcttggtccacatcctgaaagcatcttactctctcagtcatatgccttggtgtatctagtagagtggatctttcatctcacccactctattcctgctatcttatcttgttggatatgccaataagatcccaagccatacctaatgctttgctttggtcatgttacaggtatttacctgagatgatgccttctttgatattctcttatttgtattaatcacttagtttctagaaaaggggacatccatgtaaaaaatgagctcactctataccttgcaggctcatttcagcagacactctgttctaatttcttaaagattatatggcatgacttgattattttactgccaccatctgtcttaaatctattgtatgtatttcctccttctcctcctctttcttcaaatctgaggatctgagtgttaacagaagttccactgtgtcaattttcaatctgcatagcaggaacttctttcagccctttaggcccggtgcggtggctcatgcctgtaatcccagcattttgggaggcagaggcgggcggatcatctgaggtcaggagtttgagaccagcctagtcaacatgaggaaaccctgtttctactaaaatatacaaaaattagccaggtgtggtggcaggcgcctgcaatcacagctactcaggaggctgaggcagaagaatggcttgaacctggaacgcggaggttgcaatgagccgagatcgtgccacagcatcctagtctgggcgacagagccagactccatctcaaaaaaaaacaaaaacccaaaaacaacaacaacaacaaaaaaacactttagatgccaattctttaaatagattaagggttaaaatattaagaatccatattcttaatatgttttaaatgtctatttacctattgaaaaggcagtaccattaaaggctctgagaagggtttgtaaaactttattgtgagtgatgctatcggtcatcaaactaataatagagattagacgttcttgttctgggatgttaaaaataacttaatctttccagattcttacaaatgtaaaagctatttaaattctattatgaaattatttgaaggttttctcttctcaattattttctaaagtgcctgattttgatataggtaaatatcacataattaaattagatatgaaatgaagcaaccaaccttctacatttgcccagaggttatacagtattacccatcttcataatctgatagtggattatgactatgatattcacatttctaccaggttgggtgatggtttaagttttcatatttcataattaataatatttttaaaaaagcatttttatgtttacactgttatatctcaggtcttatcaacctcagcttaaaaagttgaagtatcggctgggcgtggtggctcacgtttttaatcccagcactttgggaggccgaggtgggtgaatcaccagaggtcaggagttccagaccagcctggccaacatggcaaaaccccatctctactaaaaatatgaaaatcagctgggcctggtggtgggcgcctgtaattccagctactcaggaggctgaggcaggtgaatcacttgaacctgggagcctgaggttgcagtgagccaagatcacgccattgcactccagcctaggcaacgagagcaaaactccatctc

SEQ ID NO: 4331 - protein, 602 aa, Homo sapiens
MELSCSEAPLYGQMMIYAKFDKNVYLPEDAEFYFTYDGSHQRHVMIAERIEDNVLQSSVPGHGLQETVTVSVCLCSEGYSPVTMGSGSVTYVDNMACRLARLLVTQANRLTACSHQTLLTPFALTAGALPALDEELVLALTHLELPLEWTVLGSSSLEVSSHRESLLHLAMRWGLAKLSQFFLCLPGGVQALALPNEEGATPLDLALREGHSKLVEDVTNFQGRWSPSFSRVQLSEEASLHYIHSSETLTLTLNHTAEHLLEADIKLFRKYFWDRAFLVKAFEPEARPEERTAMPSSGAETEEEIKNSVSSRSAAEKEDIKRVKSLVVQHNEHEDQHSLDLDRSFDILKKSKPPSTLLAAGRLSDMLNGGDEVYANCMVIDQVGDLDISYINIEGITATTSPESRGCTLWPQSSKHTLPTETSPSVYPLSENVEGTAHTEAQQSFMSPSSSCASNLNLSFGWHGFEKEQSHLKKRSSSLDALDADSEGEGHSEPSHICYTPGSQSSSRTGIPSGDELDSFETNTEPDFNISRAESLPLSSNLQSKESLLSGVRSRSYSCSSPKISLGKTRLVRELTVCSSSEGKHHLTFGFENTLFQNRFFS

SEQ ID NO: 4332 - DNA, 10712 bp, Homo sapiens
tggcttcagcccggccgccgccaggcgttggcatcgccggggagagccttccggactccgggcggcggctggctgggggcgcgttccgaggcgccctcaggcagggcgcgggggcagagcctcgcctgggttctggaggctgcggggccatcgctccaggggcagatgatgatctatgcgaagtttgacaaaaatgtgtatcttcctgaagatgctgagttttactttacttatgacggatctcatcagcgacatgtcatgattgcagagcgcatcgaggataacgttctccagtccagcgtcccaggccatgggcttcaggagacggtgacggtatctgtgtgcctctgctcggaaggttactctccggtgaccatgggctctggctcagtgacctacgtggacaacatggcttgcaggctggctcgtctgctggtgacgcaggccaatcgcctcacagcctgcagccaccagaccctgctgaccccatttgccttgacggcaggagcactgcctgccttggatgaggagctcgtgctggctctgacccatctggaattgcctctagagtggactgtgttgggaagttcttcacttgaagtatcttctcacagagaatctcttctacacctggctatgagatggggcctggctaaactttcccagttcttcttgtgtctcccggggggagtccaggccttggctttacccaacgaagagggtgccacaccattagacttagctttacgtgaaggacactccaagctggtggaagacgtcacaaattttcagggcagatggtccccaagcttctcccgagtgcagctcagtgaagaagcctccttgcattacattcactcatcggaaacgctgaccctgaccctgaaccacacagccgagcatttgttggaggcagatattaaactcttccggaaatacttttgggatagagcctttcttgtcaaggcctttgagccagaagccaggccagaggaaagaacagctatgccctccagcggtgcagaaactgaagaagagattaagaattcagtgtccagcagatcagcagctgaaaaggaagatataaagcgtgtcaaaagcctggtggttcaacacaatgaacatgaagaccagcacagcctagatttggatcgctccttcgatatcctaaaaaaatccaagccgccctcgacattgcttgctgcaggccggctttcagacatgctgaatggaggtgatgaagtctacgctaactgtatggtgattgatcaggttggtgatttggatatcagctatattaatatagagggaatcactgccactaccagccctgaatccagaggttgcactctgtggcctcagagcagcaaacacacccttcctacagaaaccagtcccagtgtgtacccacttagtgaaaatgtcgaagggacagcacacactgaagcccagcagtccttcatgtcaccatcaagttcgtgtgcttccaacttgaatctttcttttggttggcatggatttgaaaaggaacaaagtcatctaaagaaaagaagttctagccttgatgccttggacgccgacagtgaaggggaagggcattctgagccatcccacatctgttacactccagggtctcagagctcctcaagaactgggattcctagtggggatgaattggactcttttgagactaacactgaaccggattttaatatctccagggctgaatcccttcctctatcaagtaatctacagtcgaaggaatcactgctttctggagttcgctcacgttcttattcttgctcatcacccaaaatttctttaggaaaaactcgtttggtgcgtgaattaacagtatgcagttcaagtgaagagcaaagagcttacagcttatcggagccaccaagagaaaacagaattcaggaagaagaatgggataaatacatcatacctgccaaatcagagtctgaaaaatataaagtgagtcgaactttcagtttcctcatgaataggatgactagccctcggaataaatcaaagacaaaaagcaaggatgccaaagataaagagaagctgaatcgacatcagtttgccccaggaacattctctggggttctgcagtgtttggtttgtgataaaacactcctggggaaagagtcactgcagtgttctaactgtaatgcaaatgtgcacaaaggttgtaaagatgctgcgcctgcatgcaccaagaaattccaagagaaatataacaagaacaaaccacagaccatccttggaaattcttcatttagagacatcccacagcctggtctctccttgcacccttcttcctccgtgcctgttggattgccgactggaaggagggagactgtgggacaggtccatccattgtccagaagtgttccaggcaccaccttggaaagcttcaggaggtcagccacatccttggagtctgagagtgaccataacagctgcagaagcaggtctcattctgatgagctgctacagtccatgggctcttctccctctacagagtctttcataatggaagatgttgtggattcttctctgtggagtgacctcagcagtgatgcccaggagtttgaagcagaatcttggagtcttgtggtggatccctcattttgtaataggcaggagaaggatgtcatcaaaagacaggatgtcatttttgagctaatgcaaacagagatgcatcacatccagaccctgttcatcatgtctgagatcttcaggaaaggcatgaaagaggagctgcagctggaccacagcaccgtggataaaattttcccctgtttagatgagttgcttgaaatccacaggcatttcttctacagtatgaaggaacgaaggcaggaatcctgtgctggcagcgacaggaattttgtgatcgaccgaattggagatattttggtacaacagttttcagaagaaaatgcaagtaaaatgaagaaaatatatggagaattctgttgccatcataaagaagctgttaacctctttaaagaactccagcagaataaaaagtttcagaattttattaagctccgaaatagtaatcttttggctcgacgccgaggaattccagaatgcattctgttggtcactcagcgtattacaaaataccctgtcttggtggaaaggatattgcagtacacaaaggaaagaactgaggaacataaagacttacgcaaagcgctttgcttaattaaagacatgattgcaacagtggatttaaaagtcaatgaatatgagaaaaaccaaaaatggcttgagatcctaaataagattgaaaacaaaacatacacgaagctcaaaaatggacatgtgtttaggaagcaggcactgatgagtgaagaaaggactctgttatatgatggccttgtttactggaaaactgctacaggtcgtttcaaagatatcctagctctacttctaactgatgtgctgctctttttacaagaaaaagaccagaaatacatctttgcagccgttgatcagaagccatcagttatttcccttcaaaagcttattgctagagaagttgctaatgaggagagaggaatgtttctgatcagtgcttcatctgctggtcctgagatgtatgaaattcacaccaattccaaggaggaacgcaataactggatgagacggatccagcaggctgtagaaagttgtcctgaagaaaaagggggaaggacaagtgaatctgatgaagacaagaggaaagctgaagccagagtggccaaaattcagcaatgtcaagaaatactcactaaccaagaccaacaaatttgtgcgtatttggaggagaagctgcatatctatgctgaacttggagaactgagcggatttgaggacgtccatctagagccccacctccttattaaacctgacccaggcgagcctccccaggcagcctcattactggcagcagcactgaaagaagctgagagcctacaagttgcagtgaaggcctcacagatgggcgccgtgagtcaatcatgtgaggacagttgtggagactctgtcttggcggacacactcagttctcatgatgtaccaggatcaccgactgcctgtaagtgaaaatgcaggccttggcaatgagcctgagcacagtccctggagcttacagtggtcacgtaaagtaaaggcaatgactgtctctggttgaaggggacttgatatatttttttaaattagaaaaaaactgagaataaatatgctagcctaaatgaatatcataggcatataataatgacactggggtttcaagtatgaggatctaaagagtagttggtgggttatactgctctgtttgccggccaaatatcggaccttccccaacccctaccctgcctcatttttgatatgatttattcattacagttttgaaagaactttttaacttttcaggttttttaaaaaaggagtccctgcggtcaattacagaacaagcccttaaacctaatctcatgtgcatcaactgagaaaacaactcagaaaaccagaaatatacacacggctccctccgtctccctcctttctctctccctctctctttctctctctctcacacacacgaagtttggtggtatggttaaagcagaagtgccagaaaattcttgatctgtgccatcctacactttagttcatgtcagaattcatttatgaaaacattgtttcaaaacattttaaatataaaaaaaaatagaatgtagagatttggtttaggtaatttccccgaacctagctatcctgttatatgtatagttgtaggctacttagttccataaaggtttctaagataagagcataaagagtatacttttcatcctgtgcaggtggtaacaaccttacttccacaaggtcttatgtgcgtaagataaaatggataaaatgtcttcagtagttagagatcagaagattaaattgaactcaagattggaagattaaattgaactcagaacttctttaacaacatcccttgattaattaagatatatagatgcagtatagctttttaattctatacttcttttttttttcttttttaaacatcagcaccactaattatcttcctctctcaagttctgctttatctaatcctgagtttctagtttcagaatgcgcacgtatgtttttcattttgacacagcccagattcatcaggggagttgtactgccctgggtgatttccttttaaaagaagaacctcattatgccattgaggagtctctgtctaaaaatacgtgcagggatctgctgagggatctgctgctctcagcctcgccccagggacagctggagaggctcccctctgcagctgcccgagcccgcggtcgtgccttccctcccttcaggccaggcagtgaaggtctccttgtctgtatccacatctctcatgactggggagagtttcaaagggacacccgtggcatttgccagaaccattgagaggctctttagaggggtctgatgtcgggattcaggtagaggaagtaccgaagctggctggtggggtcctgtaccccaaggcctcttcagttctgggtcagactggaacatggtgctatgagagtttgattctctttataaagttgttcaaggcacaaggctagttctaaatgaaggtctacaactgtgactgaatgggtcggttctgcaaatgacttggagaactgggctcttcttcatcaggcttatgtcagcctgaggttataagccaagcagacagctctattttcagtcttcagtatacatgatgagtatcttctacttctaggaaagttctgttcactggagaccctctggcccaccctgaaattggatacagggacagggacctgatctgtgttttattcttctgccttgtcatcagcttctttcccatttgattttcctaatttctatgagggagtgagaaacagagtggtgaattctttagtgatgcctttggccactctttaagagttaggaatagcacccaatagtagaaccatttttcaaatgacagagaaacctataaaatgtccctcattgtaagtgaataagtgctgatcagcttgaacaaaatggacttgtttttagctgatctcatctgaagccgtttccgtttagacaaaaacttctttgtattagaagaggtctttgaaatcctagaggactctcattttccaaagacataagtatttttattaaagaaaaaagcatttcctatattggaaataaagttttaaaaagacacaataaaaattatacaaacaaacagtgtcataaagtgaatatcgattttgtcagggtctggattggacatggttctaataaaacactgttttgggctttgaaaattctagttttaatcagtgcaaggtgggcacagtttaagttttaactgagttcacatgggtaaagaaataaaatcctgccaacagagatttaatggatgaagtgaaatctgtatttggtacttaaaaatatttcgggactagtttctatgttttcatagtttaaatacatagtatttgtaaatctaaagcataacaagaaatgtgagaaaaacaacacatttagaaattgttaaaaaataagttattcagagatagggacaggttcttggtttgtatgactatgagaccgtgaagtattagccatctccgccttcctagaaagatgtctccctcctgcttcggactcctccttcctcctaaaccttgtttatcgtctgctgctcttgcactggccacaagagagactttttacagacttaagtctgccaagagaccttgcttttgttctacagcacctgttttaaatttcacccttcccaggaggcattttcctattaagtgagagtgagatgtagattctaccctctgtaacacaaacgacacacgaacacttcagtgcaagaaagaaaagtacaaagatggtgatactttgtgcggttcgtcagttgctgtctgttagcgtgtaagccccatgtgggcagggaccacatgcattgctctgcgctcatccaagcacctcatctaagaatactcaatatgtattattttgtggtgtttcctattttgaaatatgtgttggccgtgtacagaagaacccggtgggctggccgatgtttgacgctgtcctttttgtttctgtctcgatggcgtgcttccagcattagtcacaggagggagagaaggaagaggctgttcggatgtggatcccgggatccagggtgtggtaaccgacttggccgtctctgatgcaggggagaaggtattgtgaactgatttgttagtaaacggcagcggttactgtgtataataaaatagcctcaggttctggtctgtcacggcagtcagtggggcaaaggtgcttttctgaattgttctcaattgatttaaatattcatatttaaactttctaacttatttcttcttcaaatgtgcttgcactgcctgtgtcatgtaggtgtaaacaaagcaacgattgaaaagttattaaaaagattaaaaactctcctgtgtatatgtgtgtctgtgctctctgacttctggtctttctgccctgcaaacctttgcttctcacccactatgtctggcagctctggcacccgggggcccttttgcaaccagatggcgccaaagtaattgaaacaccttttactttggaatattcttgcttctttcaccttccttgaccctcctctccttgcagagttgatttcctgtcaccacccacatttcacctactttttttgtggttaatttttaattaatctgaccagtttttgcttggggcacagcgattcccaaagggaatcctcttttttgacttactgctatagacatagatattaactctctctttaagaattaaatacataaaacttcctattaatgtctactgaaagtgagatgtcagaaatagggaaggaataaaatatgattctgggaggtggctagttggcctcttcctgcttgtcagggctccagagtttagctttatctaaaattgaattaggtacattaataggtgccaatatgtgtcaatgtgaaaaaatggcaaatgtcagatcttctcacatatacaacatattttacatattatatactttttgtgtatattacataagactgagaaatcaagtcaaggacttttaaaatccagagaaaagacagctgtgactgagtgttcttttttaaacttcagaggccaaaatgagcataggaatgtaatattttactccttctgattgtaagctttctaatgtattgcttcttaaaatgttcctgcttttcatcacttttaagtgtgaagtttgtggtgtccaactgtgttaatagaaaagagagagtgaattggacagtaataatttaatcttgaacgcaaagttgggtggctcctacccctaaagtctccctcttccactccaattcagctacaggtagataattgaggttaagtgtctgggttcttctttggattaagctatctgcaaaattttttgcttaataaggcattttgaaagattaatacattaataaacccaggtaaagggcaggatcacttgaaatcaaacttttaaaaggtgtataatggatattttgtcattagcttcctctacaaggtaaggttagaacaaatttctgaaagaatattaaaaaatgaaatctgactcaaatgcagaaataatggataaatcgccaactgcagttttaaacatttaccacaaggtggcagaacaactccattaaaaacgcgaaatttcctgtcttgtgtcaaacctagtggcttttgggcataagtaaccgcgggtagcacagtccaactcatttctatggttctaatttttatagactataaaaactctgtgccatatggtcttactacagaagcagtggagtgtggatgggccacgacagagccagaagagcagcgagaacgccaaccatccctctagggcgggggttcttagagcctgttctctcccatagggtttggcacagatctaatgtctttaagcttcatctccattttcagcctctgtcttttctctatcagaggggctgcttacgagtgaaatctttaattggcagtccaagggaagcggaggtctggctagctcatcctggcatcatcagcctaaactaattgaatttaacaagttcaaaattacccgaggacatgaccatggctggctgctttttatggcttaaaattagatgagacagtaggcccttgaggacagggcatctgatggtctcccatagcgtaaggtgtgaagtttacagtgggtgatcgatatttatttattgaatggcgtgccatcgagttcaactgggagtcattcgttcaattatggaggctgcaaaccatcactatccacgtgtgcccttaatgtgtgctgtggaagagacaaagaacaaggcatagaccctctccctaaagaacagacggtctcctgtggctggttcgtggcctctgctgctagtacttctactatggcagtcactggtctggtgatctctgactgtggtgggatctagagcagcccagctacgcgcgccactatggccaccgtctgagtctggtttcttttcccaactgctgtatatgttgatatcgtgaatctcaaacattgagaaaaggagttaaggccagacatgatattctttctttaactttcaatctgtcctctagaatataagaggtcagcctgacccaaaagacaacttcagtctgggcacagagaactcaattcacattgtggtttgcacaaggtaaatgttgttacttgagttttcagggtgtccttactgtcatcccttgttgttttaaggggtgattgggtgaaaattgccatccatctcaaacatcgactttgcgtgaaggacgctcttgttgtcaagtgtttgtttgattctataggcttttatttctgggaggaaactgagtcagtatagataaggtaatcaagtttagagatagcaaagtgatttacccaaggtcatacattttgggacactgcagggcagcttttcagaagtagaatggttattcattttcttgttttttatgtattttaggtggaatgtagaaattttccaggttcttcacaatcagagattatacaagccatacagaatttaacccgtctcttatacagccttcaggtaactatcctcctctaatctttgaccttgtgaatggttctcttaatgcaattctctttgatgattcccagactttaaaaatgagaacaagtgagaggtagggaatgatcttaaaagaatgacaaccttctaagtgtgatgtgttggactcacatggttttgtaatcagaggcaacaccatgactacattttataccattcttctctgaaatcataaaacagttcatatctttaaaaaatattgatgaatatgatctggcttgacatttacaatgaaactcttaggtgagtgtagcatgacttcacattttctgatgaaaacctaaattcacacctaaaattctttgacttctccatgtggccatcagcctttagagcagttaagtaatccatatgttgctttactcttttgtttgttcatccactcaacatttattaatttattaatgttgaggggatgaacacacaaaaaagaaatcatgcttgcatttaggattaaatggttggatgatcccttaggct

SEQ ID NO: 4333 - protein, 1313 aa, Homo sapiens
MMIYAKFDKNVYLPEDAEFYFTYDGSHQRHVMIAERIEDNVLQSSVPGHGLQETVTVSVCLCSEGYSPVTMGSGSVTYVDNMACRLARLLVTQANRLTACSHQTLLTPFALTAGALPALDEELVLALTHLELPLEWTVLGSSSLEVSSHRESLLHLAMRWGLAKLSQFFLCLPGGVQALALPNEEGATPLDLALREGHSKLVEDVTNFQGRWSPSFSRVQLSEEASLHYIHSSETLTLTLNHTAEHLLEADIKLFRKYFWDRAFLVKAFEPEARPEERTAMPSSGAETEEEIKNSVSSRSAAEKEDIKRVKSLVVQHNEHEDQHSLDLDRSFDILKKSKPPSTLLAAGRLSDMLNGGDEVYANCMVIDQVGDLDISYINIEGITATTSPESRGCTLWPQSSKHTLPTETSPSVYPLSENVEGTAHTEAQQSFMSPSSSCASNLNLSFGWHGFEKEQSHLKKRSSSLDALDADSEGEGHSEPSHICYTPGSQSSSRTGIPSGDELDSFETNTEPDFNISRAESLPLSSNLQSKESLLSGVRSRSYSCSSPKISLGKTRLVRELTVCSSSEEQRAYSLSEPPRENRIQEEEWDKYIIPAKSESEKYKVSRTFSFLMNRMTSPRNKSKTKSKDAKDKEKLNRHQFAPGTFSGVLQCLVCDKTLLGKESLQCSNCNANVHKGCKDAAPACTKKFQEKYNKNKPQTILGNSSFRDIPQPGLSLHPSSSVPVGLPTGRRETVGQVHPLSRSVPGTTLESFRRSATSLESESDHNSCRSRSHSDELLQSMGSSPSTESFIMEDVVDSSLWSDLSSDAQEFEAESWSLVVDPSFCNRQEKDVIKRQDVIFELMQTEMHHIQTLFIMSEIFRKGMKEELQLDHSTVDKIFPCLDELLEIHRHFFYSMKERRQESCAGSDRNFVIDRIGDILVQQFSEENASKMKKIYGEFCCHHKEAVNLFKELQQNKKFQNFIKLRNSNLLARRRGIPECILLVTQRITKYPVLVERILQYTKERTEEHKDLRKALCLIKDMIATVDLKVNEYEKNQKWLEILNKIENKTYTKLKNGHVFRKQALMSEERTLLYDGLVYWKTATGRFKDILALLLTDVLLFLQEKDQKYIFAAVDQKPSVISLQKLIAREVANEERGMFLISASSAGPEMYEIHTNSKEERNNWMRRIQQAVESCPEEKGGRTSESDEDKRKAEARVAKIQQCQEILTNQDQQICAYLEEKLHIYAELGELSGFEDVHLEPHLLIKPDPGEPPQAASLLAAALKEAESLQVAVKASQMGAVSQSCEDSCGDSVLADTLSSHDVPGSPTACK

SEQ ID NO: 4334 - DNA, 8702 bp, Homo sapiens
atcgccggggagagccttccggactccgggcggcggctggctgggggcgcgttccgaggcgccctcaggcagggcgcgggggcagagcctcgcctgggttctggaggctgcggggccatcgctccaggcccacagcgtccccgcattggttggctgggtgggccgaggaacagtggcaacatctgtgtttgtgcggcttctcccgccttgacccctgcctgggtatccacacatctcctcacaccaggagttatagaggttcaccacggaccacaccaattgggcaaaatccaaagaaaatgcgaaagccatggagttgagctgcagcgaagcacctctttacgggcagatgatgatctatgcgaagtttgacaaaaatgtgtatcttcctgaagatgctgagttttactttacttatgacggatctcatcagcgacatgtcatgattgcagagcgcatcgaggataacgttctccagtccagcgtcccaggccatgggcttcaggagacggtgacggtatctgtgtgcctctgctcggaaggttactctccggtgaccatgggctctggctcagtgacctacgtggacaacatggcttgcaggctggctcgtctgctggtgacgcaggccaatcgcctcacagcctgcagccaccagaccctgctgaccccatttgccttgacggcaggagcactgcctgccttggatgaggagctcgtgctggctctgacccatctggaattgcctctagagtggactgtgttgggaagttcttcacttgaagtatcttctcacagagaatctcttctacacctggctatgagatggggcctggctaaactttcccagttcttcttgtgtctcccggggggagtccaggccttggctttacccaacgaagagggtgccacaccattagacttagctttacgtgaaggacactccaagctggtggaagacgtcacaaattttcagggcagatggtccccaagcttctcccgagtgcagctcagtgaagaagcctccttgcattacattcactcatcggaaacgctgaccctgaccctgaaccacacagccgagcatttgttggaggcagatattaaactcttccggaaatacttttgggatagagcctttcttgtcaaggcctttgagccagaagccaggccagaggaaagaacagctatgccctccagcggtgcagaaactgaagaagagattaagaattcagtgtccagcagatcagcagctgaaaaggaagatataaagcgtgtcaaaagcctggtggttcaacacaatgaacatgaagaccagcacagcctagatttggatcgctccttcgatatcctaaaaaaatccaagccgccctcgacattgcttgctgcaggccggctttcagacatgctgaatggaggtgatgaagtctacgctaactgtatggtgattgatcaggttggtgatttggatatcagctatattaatatagagggaatcactgccactaccagccctgaatccagaggttgcactctgtggcctcagagcagcaaacacacccttcctacagaaaccagtcccagtgtgtacccacttagtgaaaatgtcgaagggacagcacacactgaagcccagcagtccttcatgtcaccatcaagttcgtgtgcttccaacttgaatctttcttttggttggcatggatttgaaaaggaacaaagtcatctaaagaaaagaagttctagccttgatgccttggacgccgacagtgaaggggaagggcattctgagccatcccacatctgttacactccagggtctcagagctcctcaagaactgggattcctagtggggatgaattggactcttttgagactaacactgaaccggattttaatatctccagggctgaatcccttcctctatcaagtaatctacagtcgaaggaatcactgctttctggagttcgctcacgttcttattcttgctcatcacccaaaatttctttaggaaaaactcgtttggtgcgtgaattaacagtatgcagttcaagtgaaggtaagcatcatttaacatttggctttgaaaacactctattccagaacagatttttcagttagtataagtacataaaatattcaagaacagcagacaagaattttccattctgttttcataactggtttttctaagcctgacaaaattcttttcttattggataacagccaaatttgattttgatcagatttgattttgatgaaattacaaatacatgcacacctctctgttactttattctttgaataaaatgttttcctcaaggatagtgtaaattagaattgattccagttatattattatgagggccttagaggattttatttgagtaaattataaaaattacttttgtctcatatatacattgctaacataatccaactcctcagagccagagtgttgcagaatggattttcttctttctttgtttagaaagggactttggagagttgaaataacatatttgtaacatgattaaatatatctcaacatttttttggtggcaatgtaggcaattagaaatataacttttaggcaataaacttaatttaaatgtaggatacatacaaaaaggagtgcaaatcataaatatgcatcttgaattttcaagtgaattcagatctataaatggaaaaattatgtacaacttagagctccccttgtatcctctctaagccactcctcccattttcacctgcccccattttgaaatgtaattatttcatactttctgtaattaatatgtaataattgtattaaaaagcatatttgaaagtattcatgccaatgcataatacatagcattataatgaaatttttgtcaatgtcttagagaatatctttattgtctattatccttaagggacttaaaagattcagaaagcaagagatgaacttaagtactctgaagtactactcaaatattttcttaagataaaatatttaaaataggatttattttattccctctcttttttcttattcttgcttattaaattgttattttgcatttttatgccatgcagaacaatactgaaaacataatcttggtgcttgaaacagctatcctagaataatgacatatatgctagatgttcaataaatatttgttgaatgagtatgagaaaaagatagataaaacacaaaagaaatgctaccatgatttttgttttcctttttctgggatgtactgttagaagagaagagagcaagactgataatacatgtcagtttttatttttggatggggagatgaagaaaagttacaagagaaagaaaggatacaactaccttgagagggcaggataaataagatggattgaatttgttctggatttttgttttttacttcatgggttctttctaggtctccaggtctccccagccttagtttaggttggtgtatttttaatagctcgacaccttttcactgatagtcccagctgatgaattaacctcacattgttactatttggaaaacatgtttaagttttctgtgcttcaaattatggctttgcctttagatctgtggtccttgatctatgaagtcagatatctctagagtttgaaattattgaccacacaattaagaggaaacttattgttcacaagggaaaatagccctaatttacttattctttaatgatcaaggaagggtgtctttaccttacatgcaagcctgaaacctttgcatatgagttagaataaaaagctgatctcaactgctttggttttcagtaaacgaaaccttatctttagacggtatatttaaagacaaggctacttgagtgaagtttgatactatccagaaggtaacagttagaaccaggcaatttaggttgagtctactcactaaatatatgaaaattccagtggatagacttatatggctgcaaacatttggattgataccatttaggtcagtcaataccataggactatgaaaaataaattaaccactaatgaagaaggaataattttatctgtgtttatgtaatcaaagcacaaatgtgaaagcttgcctaatgcaaagatatattctaatgtttcattgtttagtcggcttggattaatcaaaagtaaattgaggtttgtgttgccataaatcctttcttgatgagttttgaatagtcctaaaaattttcaggtctatttgaacagagtccaagtctccttatgtcccagagggaagctcccatatgagagctgtaatgcagatatacaaacctaggatgctttcggtcctttttattattatttgtgatgttctgtcttccttgtcacttccaaagagttacttactgtaatttctcatgcgtcttttttttttttttgagccaagagtacgatgatggcaactttatttttgatgtttgtatacataaaacaaaatccagttttataattccctttggtctattatagatttaggcagaaaggaacattgccaatattaaaatgataactacagtctcaccaagggggacaaaggggttcagcatttaagaatttgaggaatgacgtaaacatacttttgaaaacgttgtgagctgatggatggaatttaattggattttgaacagttggtggcttattctcttggtacttcagcctatttaccataagaatagtgagttctgcctatgacttaatttgaggaacacttgataatggctataaaataaaggcttcaaattcttcaaagtagatttcctattacatacaagatagtattaggtgcaacatttgatattacccatttcaggggatatgtatttgttttcctccttatgtatcatttccctttgcaacctagttatgcctcttcactgttctggattgtgagagtgaaggatttgtccctgccctgtagatggtgtgctccacagtgactgccccctccttcaggctctctcactgtctaaatcagtgtctctactccacccctgtagtaagtatttcaactctggaaacaagatggctccaagctgcttgcatgaacctcccttctggccccctccacaagtccaatgaaaaaaatggtcctccctttcccatgagccacagagcacatctctgaacttgctgctgctaggattttatgaggacattgcagctatatgaaaattaactcttcttatgctgtccttcaagacttcatttgagctttgtttaaaagcagttatttattggttctgtatgttagggcattagtgttatgaagaatagggatgactctagtgaaaagtatccaaaaagatagagctaattttctgcacttctgaaaatgtttgctgtcccttgctgatgctaacttagttcatgaagtcattaaatgttggcatattttggccatgtttctccctaccctctttaaattacagaaagtgatttaaaaaaatccagagcaatgccttacttatataaggtaactcattttctcattattttctagctggtagtgtgtataatgatacaatatggttgagtatgcatttcagactaacatatgactgccagtttgtgtgccttagttttcattttattgttctgtgtcttgtagagcaaagagcttacagcttatcggagccaccaagagaaaacaggtacttttaactattccaattttcctgaggaactgcatgatccttctttggaaatgtccacacatcatttttgctatctgttcactagttcatgagaggtttccatgtaacaagcctgcctaagaccctttgctccctctgggatctgtatcaggatagatctgccagccctcccctttcagtccttggctgtgcaggcctcaggattggggacagcatgttctgtctgggtatcttcaaagccaaataccctcaaggggagcagtgtgaggggaccacctgttttagaaagacaacatgttttctccagctctattccaccatgacaaggggacttactttagtaacagaaccctgggtggtcaatgatagaaagtgcctaaacatccctactgtctctctatggatttttgcctagtagcccttcagctggaaacaaagaataaacaatgcagaagacttttaagcatgatcagtttcctggttgagatgcagatttaacctaagcttctctttctcctagaaggtaaaactgttgttggagtatagcttgggaagcagaccagtgtgcaagcatgattgttggtttctgttggtgttgaataactaactgcccatgagtcacactgtgaaatagccccagggttgtatgcaaaacaagtgccagaatggcacacatgtttgactttaagagaccatctgaaaagagtgaaatggtttaattttgtttgagattaatactaaaactttgaaacgttttaaacgttttagtatacggatcaagatggggtgtttcgttttaaatcctggaatcaaagtattaataagaaaaagcctcctttggatcatttctattttttttttgaaaccagaatagaaactttcaaatgatacaaaagaggaagattaagaatgcccttgaaagataggatgatgatcaagttgacttcgtgacaatggcaatgaggatgatgatagcaaaagcagtaattactgacaaatattgaacatttgtatgtgccttgtactgttttaagcagtttacatttattatctcatttaagcaatttacttcctcattctggaatttgatcttcatcttggtcatcattttgattaacagtcatctttttaacaactggaaaaataatggattgttatcaagaattttttaaattaaaaatataaaaaatattcatttgtcattaggagagagatttaagaccgaaggagccaatgttatacttggctaaatagtagcctataaaatattttcactttgatggcatctttatgaagtttctttttatctggttcttcgttctctgtcactcttgtttttgttttctgttcctttctattctttaatctttcttggtccacatcctgaaagcatcttactctctcagtcatatgccttggtgtatctagtagagtggatctttcatctcacccactctattcctgctatcttatcttgttggatatgccaataagatcccaagccatacctaatgctttgctttggtcatgttacaggtatttacctgagatgatgccttctttgatattctcttatttgtattaatcacttagtttctagaaaaggggacatccatgtaaaaaatgagctcactctataccttgcaggctcatttcagcagacactctgttctaatttcttaaagattatatggcatgacttgattattttactgccaccatctgtcttaaatctattgtatgtatttcctccttctcctcctctttcttcaaatctgaggatctgagtgttaacagaagttccactgtgtcaattttcaatctgcatagcaggaacttctttcagccctttaggcccggtgcggtggctcatgcctgtaatcccagcattttgggaggcagaggcgggcggatcatctgaggtcaggagtttgagaccagcctagtcaacatgaggaaaccctgtttctactaaaatatacaaaaattagccaggtgtggtggcaggcgcctgcaatcacagctactcaggaggctgaggcagaagaatggcttgaacctggaacgcggaggttgcaatgagccgagatcgtgccacagcatcctagtctgggcgacagagccagactccatctcaaaaaaaaacaaaaacccaaaaacaacaacaacaacaaaaaaacactttagatgccaattctttaaatagattaagggttaaaatattaagaatccatattcttaatatgttttaaatgtctatttacctattgaaaaggcagtaccattaaaggctctgagaagggtttgtaaaactttattgtgagtgatgctatcggtcatcaaactaataatagagattagacgttcttgttctgggatgttaaaaataacttaatctttccagattcttacaaatgtaaaagctatttaaattctattatgaaattatttgaaggttttctcttctcaattattttctaaagtgcctgattttgatataggtaaatatcacataattaaattagatatgaaatgaagcaaccaaccttctacatttgcccagaggttatacagtattacccatcttcataatctgatagtggattatgactatgatattcacatttctaccaggttgggtgatggtttaagttttcatatttcataattaataatatttttaaaaaagcatttttatgtttacactgttatatctcaggtcttatcaacctcagcttaaaaagttgaagtatcggctgggcgtggtggctcacgtttttaatcccagcactttgggaggccgaggtgggtgaatcaccagaggtcaggagttccagaccagcctggccaacatggcaaaaccccatctctactaaaaatatgaaaatcagctgggcctggtggtgggcgcctgtaattccagctactcaggaggctgaggcaggtgaatcacttgaacctgggagcctgaggttgcagtgagccaagatcacgccattgcactccagcctaggcaacgagagcaaaactccatctc

SEQ ID NO: 4335 - protein, 602 aa, Homo sapiens; identical to SEQ ID NO: 4331

SEQ ID NO: 4336 - DNA, 992 bp, Homo sapiens
aatgtttgcgctttttctatcccccaaatgctgagagaactctagacgagcagtccagacgctaaatagatcagtcctctgctctataggggtagtgggagtctatagtgtggtcggtaagggagtggactgatcacctgagttctgacggcttgggccagtgtcacctcaggtcacaccaagcagaaggttctcaggaatatcatgcatgtaccagaaagagaaccgaaaatcttgacgccagaaagaagggcttctggcctgtgcatctgccacctggagcagaccaaatccacatcctaagacacaggaatctcagaggaccaggatagtcaccaagtgccatgccgctgtctgagcatctcttctgaggaaaagcacttggctgagctctgcccccatggaactgatgctggcaaaaccaagcgtctgcccagccagaataaccaccacttggtgctttggtgagaaaccacagtgatggctgaaggcttgagtagcattttttttttttttttagacggagtctcgctctgtcaccaggctggagcgcagtggtgcgatctcggctcaccgcaacctccgcctcccgggttcaagcaattctcctgcctcagcctcccaagtagctaggactacaggcgcatgccactgcgcccagctaatttttgtatttttagtagagacgatgtttcaccatgttggccaggatggtctcgatctcctgacctcatgatccacccacctcggctacccaaagtgccaaagtgccaggattacaggtgtgagccaccacgcccagccagcttgagcagttttaaatgacaagcatccttaaaagaagaccctcattctgtatatactggatgtgatgctgtatgtcagaaaattacacaccaaattccctaaaacccagcaaagagagaaagatcatactctgaagaccatgttttattttaactgattaaataaaactctatatggagtaagcc

SEQ ID NO: 4337 - protein, 59 aa, Homo sapiens
MPLRPANFCIFSRDDVSPCWPGWSRSPDLMIHPPRLPKVPKCQDYRCEPPRPASLSSFK

SEQ ID NO: 4338 - DNA, 507 bp, Homo sapiens
caaaagctcccatcagcagatcctgataattatttcttttgcagagattaagaattcagtgtccagcagatcagcagctgaaaaggaagatataaagcgtgtcaaaagcctggtggttcaacacaatgaacatgaagaccagcacagcctagatttgggtatgaaataacgcttttacctatactcgtaggggcatcccagatccaggtttagagtggacaagaagcaagtaaattttaacataaaatattccttcctggtaaccttatctatttcctgaaacgcatccagataaattttatttgtaggatcatttgtaatactatgactctagaggttgagactccatttacaatctaaaaaacaaggcaatcaaagcttttcctgaacagttttactctgagccagaagctggctctggacttgtcatatgttcccttgttatttctgtgaagtaggcactaccagtctcaggttcaggtgaagcagttgaagcactggtggaga

SEQ ID NO: 4339 - protein, 38 aa, Homo sapiens
DSIYNLKNKAIKAFPEQFYSEPEAGSGLVICSLVISVK

SEQ ID NO: 4340 - DNA, 856 bp, Homo sapiens
aaaaaatccaagccgccctcgacattgcttgctgcaggccggctttcagacatgctgaatggaggtgatgaagtctacgctaactgtatggtgattgatcaggttggtgatttggatatcagctatattaatatagagggaatcactgccactaccagccctgaatccagaggttgcactctgtggcctcagagcagcaaacacacccttcctacagaaaccagtcccagtgtgtacccacttagtgaaaatgtcgaagggacacacctggagcaccaactaccactccctggaaagaacccttccctgcagttttttaaggacaaaactgcccactcctcattaagtttgctgcctggatacacttttccacaaaggaaaactggcatatcctgccttccgagtagtatgggtctctgtgtgagaaaccaggagatattttcatcttgttcggaaatacttgtatgtattttggtgtcaataaatatcttgtacctcattattttactttgtaattttaacattatgtgtaggaccatagtaaaacattcatttcacacagacatctaatctcacctcgtgaaaagtgaaaataaaggaaaactattagattcatccaaaaatgcaacacctactgggagtgagatgtgataggaacagaaaaaaaaaaaaaaaaatcacccggatctcaatagttttttctccctacttaaagttgttaagttggatatctacattgtgtttttacttaggcaagtccaatcctaatttttttaaaagccccttttgggggcagtctttttctgactttagctggctatttttgtaacaattacattaaaaattcggtgactga

SEQ ID NO: 4341 - protein, 172 aa, Homo sapiens
MLNGGDEVYANCMVIDQVGDLDISYINIEGITATTSPESRGCTLWPQSSKHTLPTETSPSVYPLSENVEGTHLEHQLPLPGKNPSLQFFKDKTAHSSLSLLPGYTFPQRKTGISCLPSSMGLCVRNQEIFSSCSEILVCILVSINILYLIILLCNFNIMCRTIVKHSFHTDI

SEQ ID NO: 4342 - DNA, 536 bp, Homo sapiens
attgctttgccaacattgctgcaacagatgtgagcatttattattaaagtggaaaagtctagggccaacctgaccctattcctttgttgataacccttgtcttctgccttatgcttgaggacttttcattttttaatcatatggatattatgagaatatgtctatagagtaggtgtcatttaattatttttcttaggaaacagtgagaacttttgatgtgtccttttgggcgctttttcagctttatagaattcttgtctatggtggctttgactgtcactgcttctgatctaatttttctgatctcttccttggactgtaatgcaaatgtgcacaaaggttgtaaagatgctgcgcctgcatgcaccaagaaattccaagagaaatataacaagaacaaaccacagaccatccttggaaattcttcatttagagacatcccacagcctggtctctccttgcacccttcttcctccgtgcctgttggattgccgactggaaggagggagactgtgggacaggtccatccattgtcc

SEQ ID NO: 4343 - protein, 106 aa, Homo sapiens
MCPFGRFFSFIEFLSMVALTVTASDLIFLISSLDCNANVHKGCKDAAPACTKKFQEKYNKNKPQTILGNSSFRDIPQPGLSLHPSSSVPVGLPTGRRETVGQVHPL

SEQ ID NO: 4344 - DNA, 539 bp, Homo sapiens
atacaggtatttttataaaactttcatacttagactaaatcttagtcttttgatttttattcagtttatttgaactgtggtttgcttcattaatactagtaatgttttttctttaaagatatcctagctctacttctaactgatgtgctgctctttttacaagaaaaagaccagaaatacatctttgcagccgttgatcagaagccatcagttatttcccttcaaaagcttattgctagagaagttgctaatgaggagagaggaatgtttctgatcagtgcttcatctgctggtcctgagatgtatgaaattcacaccaattccaaggaggaacgcaataactggatgagacggatccagcaggctgtagaaagttgtcctgaagaaaaagggggaaggacaagtgaatctgatgaagacaagaggaaagctgaagccagagtggccaaaattcagcaatgtcaaggtacagtgcaggcacttctggctccctggtcgtggtgttctcctgggtgttgggaaagcctgagtgtcatgaa

SEQ ID NO: 4345 - protein, 90 aa, Homo sapiens
MFLISASSAGPEMYEIHTNSKEERNNWMRRIQQAVESCPEEKGGRTSESDEDKRKAEARVAKIQQCQGTVQALLAPWSWCSPGCWESLSV

SEQ ID NO: 4346 - DNA, 1926 bp, Homo sapiens
tttatccctaggagagaaatgatttctcatatggggtcaaaacatacacacatactcagtatgtgtccattttcaatttgtcccttctgtactgctttgcactctaaatgggaacttttaaaattaaaagcttccaagggcattcacagagatctctttggttttgtggaatccttccaaatcttggtaattatttcctgtgatgttgccaaacttttcataggcagataccgtaactcaaaatgtttttttaatctggttggtaatgtcctctgggctttagagtatctattttcccttaatcatttcagcctcctgttagcgatctattaaacaaataaatttcagcttagttttttgtgcatgaccttcctgctataatacaaagatataacagtaatgagactagctttagccacttacatatctcctaaaaatggtattaactgctattcttaggcattatgttataaaaacattatttacctaaagtctccaaatagttgttttttatttttatgtcttcataatgcaatgtagctcaagtaatttctggtttgggactcaaaggaaggatactactaggtttatgtggattcttaagttctcatgaatgattgactagggagagacctcagcaagagagtgagatgtaggacaggaatgcacagccttgtgaatttatgtgccgagttcgtattcagaagactcgcttaactatcacccaaccaccagcagcaaactaccttcccacaggagaggatgatattgcttttgggctttgtttcttttctctataaattcacaggtcctacccctaggacagatgtagacacacctctctggaacgccaaaaaccttgcctttggaggtaacttagaaaaaggccagaaatattaagagaagtgaattcgggcctgcgttttgtgtttcgaggtagttccaaccgaaagggtaaacaataaccatggaaccttgtgttcagtgatttttcctctgtctgctctgacaggccgccttgaccattcaggacagccacattgagatccacaggctggttctccagcagcaggagggcctgtctctcggccactctatcctccgaggcggccccttgcaggaccagaagtctcgcgacgcggacaggcagcatgaggagctggccaatgtgcaccagcttcagcaccagctccagcaggagcagcggcgctggctgcgcaggtgtgagcagcagcagcgggcgcaggcgaccagggagagctggctgcaggagcgggagcgggagtgccagtcgcaggaggagctgctgctgcggagccggggcgagctggacctccagctccaggagtaccagcacagcctggagcggctgagggagggccagcgcctggtggagagggagcaggcgaggatgcgggcccagcagagcctgctgggccactggaagcacggccggcagaggagcctgcccgcggtgctccttccgggtggccccgaggtaatggaacttaatcgatctgagagtttatgtcatgaaaactcattcttcatcaatgaagctttagtacaaatgtcatttaacactttcaacaaactgaatccatcagttatccatcaggatgccacttaccctacaactcaatctcattctgacttggtgaggactagtgaacatcaagtagacctcaaggtggacccttctcagccttcgaatgtcagtcacaaactgtggacagccgctggttccggccatcagatacttcctttccatgaaagcagcaaggattcttgtaaaaatggtaattaacactttaaacatcatctgtatagtttgaacaagaagttgtccctctgaatggttggctcttgtgtagagtgaatcaaagtcctccctagcatgggaataaatcggtactgatgagctgg

SEQ ID NO: 4347 - protein, 131 aa, Homo sapiens
MRAQQSLLGHWKHGRQRSLPAVLLPGGPEVMELNRSESLCHENSFFINEALVQMSFNTFNKLNPSVIHQDATYPTTQSHSDLVRTSEHQVDLKVDPSQPSNVSHKLWTAAGSGHQILPFHESSKDSCKNGN

SEQ ID NO: 4348 - DNA, 2355 bp, Homo sapiens
gaaagggtaaacaataaccatggaaccttgtgttcagtgatttttcctctgtctgctctgacaggccgccttgaccattcaggacagccacattgagatccacaggctggttctccagcagcaggagggcctgtctctcggccactctatcctccgaggcggccccttgcaggaccagaagtctcgcgacgcggacaggcagcatgaggagctggccaatgtgcaccagcttcagcaccagctccagcaggagcagcggcgctggctgcgcaggtgtgagcagcagcagcgggcgcaggcgaccagggagagctggctgcaggagcgggagcgggagtgccagtcgcaggaggagctgctgctgcggagccggggcgagctggacctccagctccaggagtaccagcacagcctggagcggctgagggagggccagcgcctggtggagagggagcaggcgaggatgcgggcccagcagagcctgctgggccactggaagcacggccggcagaggagcctgcccgcggtgctccttccgggtggccccgaggtaatggaacttaatcgatctgagagtttatgtcatgaaaactcattcttcatcaatgaagctttagtacaaatgtcatttaacactttcaacaaactgaatccatcagttatccatcaggatgccacttaccctacaactcaatctcattctgacttggtgaggactagtgaacatcaagtagacctcaaggtggacccttctcagccttcgaatgtcagtcacaaactgtggacagccgctggttccggccatcagatacttcctttccatgaaagcagcaaggattcttgtaaaaatgatttggacacctcccacactgagtccccaaccccccatgactcaaattcacaccgccctcaactgcaggcgtttataacagaagcaaagctaaatctaccgacaaggacaatgaccagacaagatggggaaactggagatggagccaaagaaaatattgtttacctctaattgtgttgtcatttttccaaacaaaacaaaacactggcacttttgggagaaactttttgtctccattccttatgtatgtgtgattgtctgtgtccaaattgctttaagaataatatttaatatttcctggaagctcatttttttggcatgagtctaattaaattattgaaagccaccctgtttgtataatctttaacttatcaaatctaatttcagatttctggaggagaaactaacttgaataagcaggactattttaaaagttgttttgacgctagagtaaaattccatgtcacattttctacccaatcatctggatttcaagattccttttaagatctcaatgaagcaatttggatttaaagagtggtattcacaaggggtgaactttcacagtcagggcagttgcctcagtgcccacataggcagaggaggatgtgggaaagggtttttctcagctagtttttgtgtgctcatttcttctgggagcattaaaagtggtgatctgttacagtcactattcaactgggcacgtgttgtgattggtcagtcactgagccagggatacagtccggacttgcttagtacctaagcctaatgctggtggggtttcaagacatggttcagcatcatcttttaacaaggcccagaggcccagagcccccatcaagtcattttgatgtaaatagtgaactttgttagagccctcacttctatcaatcagctgtcctgtccctgccagcacctggagcaccaactaccactccctggaaagaacccttccctgcagttttttaaggacaaaactgcccactcctcattaagtttgctgcctggatacacttttccacaaaggaaaactggcatatcctgccttccgagtagtatgggtctctgtgtgagaaaccaggagatattttcatcttgttcggaaatacttgtatgtattttggtgtcaataaatatcttgtacctcattattttactttgtaattttaacattatgtgtaggaccatagtaaaacattcatttcacacagacatctaatctcacctcgtgaaaagtgaaaataaaggaaaactattagattcatccaaaaatgcaacacctactgggagtgagatgtgataggaacagaaaaaaaaaaaaaaaaatcacccggatctcaatagttttttctccctacttaaagttgttaagttggatatctacattgtgtttttacttaggcaagtccaatcctaatttttttaaaagccccttttgggggcagtctttttctgactttagctggctatttttgtaacaattacattaaaaattcggtgactga

SEQ ID NO: 4349 - protein, 185 aa, Homo sapiens
MRAQQSLLGHWKHGRQRSLPAVLLPGGPEVMELNRSESLCHENSFFINEALVQMSFNTFNKLNPSVIHQDATYPTTQSHSDLVRTSEHQVDLKVDPSQPSNVSHKLWTAAGSGHQILPFHESSKDSCKNDLDTSHTESPTPHDSNSHRPQLQAFITEAKLNLPTRTMTRQDGETGDGAKENIVYL

SEQ ID NO: 4350 - DNA, 1897 bp, Homo sapiens
gcttcgccgaggctgatcttcgttcaagtgtgagctgcggctgagcccagcgctcgaggcgcgaggcagccaggagggcccgtgcggcgcggggagccagcgagcgcgccttcggcattggccgccgcgatgtcagctcagtgctgtgcgggccagctggcctgctgctgtgggtctgcaggctgctctctctgctgtgattgctgccccaggattcggcagtccctcagcacccgcttcatgtacgccctctacttcattctggtcgtcgtcctctgctgcatcatgatgtcaacaaccgtggctcacaagatgaaagagcacattcctttttttgaagatatgtgtaaaggcattaaagctggtgacacctgtgagaagctggtgggatattctgccgtgtatagagtctgttttggaatggcttgtttcttctttatcttctgtctactgaccttgaaaatcaacaacagcaaaagttgtagagctcatattcacaatggcttttggttctttaaacttctgctgttgggggccatgtgctcaggagctttcttcattccagatcaggacacctttctgaacgcctggcgctatgtgggagccgtcggaggcttcctcttcattggcatccagctcctcctgctcgtggagtttgcacataagtggaacaagaactggacagcaggcacagccagtaacaagctgtggtacgcctccctggccctggtgacgctcatcatgtattccattgccactggaggcttggttttgatggcagtgttttatacacagaaagacagctgcatggaaaacaaaattctgctgggagtaaatggaggcctgtgcctgcttatatcattggtagccatctcaccctgggtccaaaatcgacagccacactcggggctcttacaatcaggggtcataagctgctatgtcacctacctcaccttctcagctctgtccagcaaacctgcagaagtagttctagatgaacatgggaaaaatgttacaatctgtgtgcctgactttggtcaagacctgtacagagatgaaaacttggtgactatactggggaccagcctcttaatcggatgtatcttgtattcatgtttgacatcaacaacaagatcgagttctgacgctctgcaggggcgatacgcagctcctgaattggagatagctcgctgttgtttttgcttcagtcctggtggagaggacactgaagagcagcagccggggaaggagggaccacgggtcatttatgacgagaagaaaggcaccgtctacatctactcctacttccacttcgtgttcttcctagcttccctgtatgtgatgatgaccgtcaccaactggttcaaaagtgcctttcacctcctgccatgattctgaggcctccccagccatgtggaactctgagaaacctgaacggactccatttggctccttcatttgcaagacatcaagggctccttacccacccccttcctcaaggaattaacttgtgcaagctgactcccagcacatcaaagaatgcaattaactgataacatgctgtggcaagctatgtccgcagttcccaggaatttgtccagttgatattaccctaagcccctgtgtttttgtctggttgatagcacccaaagcccagcgtctatcaccttgtgatggatttaaagcccctgcacctggaactgtttgctttcctgtaaccatttgtctttttaacttcttttgcctgttttacttctgtaagactgctacagctaggctccccctcccctctctaaaccaaagtataaaacaaaatctagccccttcttcagggccgagagaattttgagcactagccgtctctcggtcgctggctaataaaggactcctcaattcg

SEQ ID NO: 4351 - protein, 420 aa, Homo sapiens
MSAQCCAGQLACCCGSAGCSLCCDCCPRIRQSLSTRFMYALYFILVVVLCCIMMSTTVAHKMKEHIPFFEDMCKGIKAGDTCEKLVGYSAVYRVCFGMACFFFIFCLLTLKINNSKSCRAHIHNGFWFFKLLLLGAMCSGAFFIPDQDTFLNAWRYVGAVGGFLFIGIQLLLLVEFAHKWNKNWTAGTASNKLWYASLALVTLIMYSIATGGLVLMAVFYTQKDSCMENKILLGVNGGLCLLISLVAISPWVQNRQPHSGLLQSGVISCYVTYLTFSALSSKPAEVVLDEHGKNVTICVPDFGQDLYRDENLVTILGTSLLIGCILYSCLTSTTRSSSDALQGRYAAPELEIARCCFCFSPGGEDTEEQQPGKEGPRVIYDEKKGTVYIYSYFHFVFFLASLYVMMTVTNWFKSAFHLLP

SEQ ID NO: 4352 - DNA, 1658 bp, Homo sapiens
ttcgccgaggctgatcttcgttcaagtgtgagctgcggctgagcccagcgctcgaggcgcgaggcagccaggagggcccgtgcggcgcggggagccagcgagcgcgccttcggcattggccgccgcgatgtcagctcagtgctgtgcgggccagctggcctgctgctgtgggtctgcaggctgctctctctgctgtgattgctgccccaggattcggcagtccctcagcacccgcttcatgtacgccctctacttcattctggtcgtcgtcctctgctgcatcatgatgtcaacaaccgtggctcacaagatgaaagagcacattcctttttttgaagatatgtgtaaaggcattaaagctggtgacacctgtgagaagctggtgggatattctgccgtgtatagagtctgttttggaatggcttgtttcttctttatcttctgtctactgaccttgaaaatcaacaacagcaaaagttgtagagctcatattcacaatggcttttggttctttaaacttctgctgttgggggccatgtgctcaggagctttcttcattccagatcaggacacctttctgaacgcctggcgctatgtgggagccgtcggaggcttcctcttcattggcatccagctcctcctgctcgtggagtttgcacataagtggaacaagaactggacagcaggcacagccagtaacaagctgtggtacgcctccctggccctggtgacgctcatcatgtattccattgccactggaggcttggttttgatggcagtgttttatacacagaaagacagctgcatggaaaacaaaattctgctgggagtaaatggaggcctgtgcctgcttatatcattggtagccatctcaccctgggtccaaaatcgacagccacactcggggctcttacaatcaggggtcataagctgctatgtcacctacctcaccttctcagctctgtccagcaaacctgcagaagtagttctagatgaacatgggaaaaatgttacaatctgtgtgcctgactttggtcaagacctgtacagagatgaaaacttggtgactatactggggaccagcctcttaatcggatgtatcttgtattcatgtttgacatcaacaacaagatcgagttctgacgctctgcaggggcgatacgcagctcctgaattggagatagctcgctgttgtttttgcttcagtcctggtggagaggacactgaagagcagcagccggggaaggagggaccacgggtcatttatgacgagaagaaaggcaccgtctacatctactcctacttccacttcgtgttcttcctagcttccctgtatgtgatgatgaccgtcaccaactggttcaaaaactatcaatgctgaagacttaaggcctcttaagaataccctttttgcaagaggggatggaaacatctctggccccaactccgacaggaaagcctggttttagcattgaaaagatgattgaatacagcttgccttttctccagggaagagagacaagatggagtgccagagaggcctacggcaagaagtgcctttcacctcctgccatgattctgaggcctccccagccatgtggaactctgagaaacctgaacggactccatttggctccttcatttgcaagacatcaagg

SEQ ID NO: 4353 - protein, 417 aa, Homo sapiens
MSAQCCAGQLACCCGSAGCSLCCDCCPRIRQSLSTRFMYALYFILVVVLCCIMMSTTVAHKMKEHIPFFEDMCKGIKAGDTCEKLVGYSAVYRVCFGMACFFFIFCLLTLKINNSKSCRAHIHNGFWFFKLLLLGAMCSGAFFIPDQDTFLNAWRYVGAVGGFLFIGIQLLLLVEFAHKWNKNWTAGTASNKLWYASLALVTLIMYSIATGGLVLMAVFYTQKDSCMENKILLGVNGGLCLLISLVAISPWVQNRQPHSGLLQSGVISCYVTYLTFSALSSKPAEVVLDEHGKNVTICVPDFGQDLYRDENLVTILGTSLLIGCILYSCLTSTTRSSSDALQGRYAAPELEIARCCFCFSPGGEDTEEQQPGKEGPRVIYDEKKGTVYIYSYFHFVFFLASLYVMMTVTNWFKNYQC

SEQ ID NO: 4354 - DNA, 1609 bp, Homo sapiens
ttcgccgaggctgatcttcgttcaagtgtgagctgcggctgagcccagcgctcgaggcgcgaggcagccaggagggcccgtgcggcgcggggagccagcgagcgcgccttcggcattggccgccgcgatgtcagctcagtgctgtgcgggccagctggcctgctgctgtgggtctgcaggctgctctctctgctgtgattgctgccccaggattcggcagtccctcagcacccgcttcatgtacgccctctacttcattctggtcgtcgtcctctgctgcatcatgatgtcaacaaccgtggctcacaagatgaaagagcacattcctttttttgaagatatgtgtaaaggcattaaagctggtgacacctgtgagaagctggtgggatattctgccgtgtatagagtctgttttggaatggcttgtttcttctttatcttctgtctactgaccttgaaaatcaacaacagcaaaagttgtagagctcatattcacaatggcttttggttctttaaacttctgctgttgggggccatgtgctcaggagctttcttcattccagatcaggacacctttctgaacgcctggcgctatgtgggagccgtcggaggcttcctcttcattggcatccagctcctcctgctcgtggagtttgcacataagtggaacaagaactggacagcaggcacagccagtaacaagctgtggtacgcctccctggccctggtgacgctcatcatgtattccattgccactggaggcttggttttgatggcagtgttttatacacagaaagacagctgcatggaaaacaaaattctgctgggagtaaatggaggcctgtgcctgcttatatcattggtagccatctcaccctgggtccaaaatcgacagccacactcggggctcttacaatcaggggtcataagctgctatgtcacctacctcaccttctcagctctgtccagcaaacctgcagaagtagttctagatgaacatgggaaaaatgttacaatctgtgtgcctgactttggtcaagacctgtacagagatgaaaacttggtgactatactggggaccagcctcttaatcggatgtatcttgtattcatgtttgacatcaacaacaagatcgagttctgacgctctgcaggggcgatacgcagctcctgaattggagatagctcgctgttgtttttgcttcagtcctggtggagaggacactgaagagcagcagccggggaaggagggaccacgggtcatttatgacgagaagaaaggcaccgtctacatctactcctacttccacttcgtgttcttcctagcttccctgtatgtgatgatgaccgtcaccaactggttcaaatggagtcccactctgttgcccaggctggagtacagtggcatgatcttggctcactgcaacctccacctcccagatgtcaagcgattctcttgcctcagcctcccaagtagctggggttacaggcatgtgccaccatgaagtgcctttcacctcctgccatgattctgaggcctccccagccatgtggaactctgagaaacctgaacggactccatttggctccttcatttgcaagacatcaag

SEQ ID NO: 4355 - protein, 458 aa, Homo sapiens
MSAQCCAGQLACCCGSAGCSLCCDCCPRIRQSLSTRFMYALYFILVVVLCCIMMSTTVAHKMKEHIPFFEDMCKGIKAGDTCEKLVGYSAVYRVCFGMACFFFIFCLLTLKINNSKSCRAHIHNGFWFFKLLLLGAMCSGAFFIPDQDTFLNAWRYVGAVGGFLFIGIQLLLLVEFAHKWNKNWTAGTASNKLWYASLALVTLIMYSIATGGLVLMAVFYTQKDSCMENKILLGVNGGLCLLISLVAISPWVQNRQPHSGLLQSGVISCYVTYLTFSALSSKPAEVVLDEHGKNVTICVPDFGQDLYRDENLVTILGTSLLIGCILYSCLTSTTRSSSDALQGRYAAPELEIARCCFCFSPGGEDTEEQQPGKEGPRVIYDEKKGTVYIYSYFHFVFFLASLYVMMTVTNWFKWSPTLLPRLEYSGMILAHCNLHLPDVKRFSCLSLPSSWGYRHVPP

SEQ ID NO: 4356 - DNA, 1780 bp, Homo sapiens
atgaaaggatggggacctcaccagagaggactggtctcagcaatgtccttaagtggtcaaaacatgctgcggttgagtctccacccacatttgcacaaaggaccatcacctgtccttcctggaatctctaaagttttctgctttccttctgtcctgatggccagctctgctaagtcagctgagatgcccaccatctccaaaaccgttaaccctactcctgatcctcatcaagaatatctggaccctaggattaccattgccttattcgaaattggatcacattccccttcctcctggggctctctccctttcctaaagaatagcagccatcaagttacagaacaacagactgcacagaagtttaacaatctcttaaaagaaattaaagatattcttaaaaatatggcaggttttgaagagaagatcacagaagcaaaagaactttttgaggaaaccaatattactgaggatgtgtcagcccacaaagaaaatatcagaggacttgacaaaatcaatgaaatgttatcaacaaacctgcctgttagtttagccccagagaaagaagacaatgaaaagaaacaggagatgatattggaaaccaatattactgaggatgtgtcagcccacaaagaaaatatcagaggacttgacaaaatcaatgaaatgttatcaacaaacctgcctgttagtttagccccagagaaagaagacaatgaaaagaaacagcagatgataatggaaaaccagaactctgagaacaccgcacaagtttttgcaagagatttggtaaatcgtttagaagaaaaaaaagtccttaacgaaactcaacaaagtcaggaaaaagcaaaaaacagacttaatgttcaagaagaaactatgaaaattaggaacaacatggagcagttactacaggaagcagaacactggagtaaacaacatactgagctcagtaaactgataaaatcctatcagaaatctcagaaagacataagtgaaactcttggaaataatggagtcggtttccaaacccagccaaataatgaagtgtcggctaagcatgagctggaggaacaggtgaagaaactgagccatgacacctattcattgcagttgatggcagctttgctagagaatgaatgccaaatcttacagcagagagtagagattctcaaggaactccatcatcagaaacagggaactctgcaagagaagccaattcagataaactataaacaggacaagaaaaatcagaagccatcagaagcaaagaaagtagaaatgtataagcagaacaagcaagcaatgaagggtacattttggaaaaaagacagatcctgtagaagcctggatgtttgtcttaataagaaagcttgcaatacccagttcaatattcatgttgcaagaaaagctcttaggggaaaaatgaggtcagctagcagcctaagatagaaaataccaaaagcagatgaaaaggtgaatccttaaaaaactacatctgttacctccaacttgtcagtcatgatcaatcatcaaaccttgggcagatctgctggttcaaccaagaaagagctatagaataaggagattgacacttatattactcattacttcagcagttatgtaagtctggtctttaatgaccattgtgtctacatcaagttcataacttttcacctttacaatctgcttgttttttttgtaattattagatagacagcctagagtgagaagttaaaggtccaattaagtaaagatctaaataaaaaccagaatacaaggg

SEQ ID NO: 4357 - protein, 482 aa, Homo sapiens
MKGWGPHQRGLVSAMSLSGQNMLRLSLHPHLHKGPSPVLPGISKVFCFPSVLMASSAKSAEMPTISKTVNPTPDPHQEYLDPRITIALFEIGSHSPSSWGSLPFLKNSSHQVTEQQTAQKFNNLLKEIKDILKNMAGFEEKITEAKELFEETNITEDVSAHKENIRGLDKINEMLSTNLPVSLAPEKEDNEKKQEMILETNITEDVSAHKENIRGLDKINEMLSTNLPVSLAPEKEDNEKKQQMIMENQNSENTAQVFARDLVNRLEEKKVLNETQQSQEKAKNRLNVQEETMKIRNNMEQLLQEAEHWSKQHTELSKLIKSYQKSQKDISETLGNNGVGFQTQPNNEVSAKHELEEQVKKLSHDTYSLQLMAALLENECQILQQRVEILKELHHQKQGTLQEKPIQINYKQDKKNQKPSEAKKVEMYKQNKQAMKGTFWKKDRSCRSLDVCLNKKACNTQFNIHVARKALRGKMRSASSLR

SEQ ID NO: 4358 - DNA, 1869 bp, Homo sapiens
gaataaacaccgggtgcctagaggagaagagatggagccccagccttggtcccctttcccacccttcctccccacaaggctgtctgagatgccaccttccacctaaacatcatctcccaaattttaatccttaactttggtctctgacttctgcttgattccacagtctccacccacatttgcacaaaggaccatcacctgtccttcctggaatctctaaagttttctgctttccttctgtcctgatggccagctctgctaagtcagctgagatgcccaccatctccaaaaccgttaaccctactcctgatcctcatcaagaatatctggaccctaggattaccattgccttattcgaaattggatcacattccccttcctcctggggctctctccctttcctaaagaatagcagccatcaagttacagaacaacagactgcacagaagtttaacaatctcttaaaagaaattaaagatattcttaaaaatatggcaggttttgaagagaagatcacagaagcaaaagaactttttgaggaaaccaatattactgaggatgtgtcagcccacaaagaaaatatcagaggacttgacaaaatcaatgaaatgttatcaacaaacctgcctgttagtttagccccagagaaagaagacaatgaaaagaaacaggagatgatattggaaaccaatattactgaggatgtgtcagcccacaaagaaaatatcagaggacttgacaaaatcaatgaaatgttatcaacaaacctgcctgttagtttagccccagagaaagaagacaatgaaaagaaacagcagatgataatggaaaaccagaactctgagaacaccgcacaagtttttgcaagagatttggtaaatcgtttagaagaaaaaaaagtccttaacgaaactcaacaaagtcaggaaaaagcaaaaaacagacttaatgttcaagaagaaactatgaaaattaggaacaacatggagcagttactacaggaagcagaacactggagtaaacaacatactgagctcagtaaactgataaaatcctatcagaaatctcagaaagacataagtgaaactcttggaaataatggagtcggtttccaaacccagccaaataatgaagtgtcggctaagcatgagctggaggaacaggtgaagaaactgagccatgacacctattcattgcagttgatggcagctttgctagagaatgaatgccaaatcttacagcagagagtagagattctcaaggaactccatcatcagaaacagggaactctgcaagagaagccaattcagataaactataaacaggacaagaaaaatcagaagccatcagaagcaaagaaagtagaaatgtataagcagaacaagcaagcaatgaagggtacattttggaaaaaagacagatcctgtagaagcctggatgtttgtcttaataagaaagcttgcaatacccagttcaatattcatgttgcaagaaaagctcttaggggaaaaatgaggtcagctagcagcctaagatagaaaataccaaaagcagatgaaaaggtgaatccttaaaaaactacatctgttacctccaacttgtcagtcatgatcaatcatcaaaccttgggcagatctgctggttcaaccaagaaagagctatagaataaggagattgacacttatattactcattacttcagcagttatgtaagtctggtctttaatgaccattgtgtctacatcaagttcataacttttcacctttacaatctgcttgttttttttgtaattattagatagacagcctagagtgagaagttaaaggtccaattaagtaaagatctaaataaaaaccagaatacaaggg

SEQ ID NO: 4359 - protein, 430 aa, Homo sapiens
MASSAKSAEMPTISKTVNPTPDPHQEYLDPRITIALFEIGSHSPSSWGSLPFLKNSSHQVTEQQTAQKFNNLLKEIKDILKNMAGFEEKITEAKELFEETNITEDVSAHKENIRGLDKINEMLSTNLPVSLAPEKEDNEKKQEMILETNITEDVSAHKENIRGLDKINEMLSTNLPVSLAPEKEDNEKKQQMIMENQNSENTAQVFARDLVNRLEEKKVLNETQQSQEKAKNRLNVQEETMKIRNNMEQLLQEAEHWSKQHTELSKLIKSYQKSQKDISETLGNNGVGFQTQPNNEVSAKHELEEQVKKLSHDTYSLQLMAALLENECQILQQRVEILKELHHQKQGTLQEKPIQINYKQDKKNQKPSEAKKVEMYKQNKQAMKGTFWKKDRSCRSLDVCLNKKACNTQFNIHVARKALRGKMRSASSLR

SEQ ID NO: 4360 - DNA, 1722 bp, Homo sapiens
taaacaccgggtgcctagaggagaagagatggagccccagccttggtcccctttcccacccttcctccccacaaggctgtctgagatgccaccttccacctaaacatcatctcccaaattttaatccttaactttggtctctgacttctgcttgattccacagtctccacccacatttgcacaaaggaccatcacctgtccttcctggaatctctaaagttttctgctttccttctgtcctgatggccagctctgctaagtcagctgagatgcccaccatctccaaaaccgttaaccctactcctgatcctcatcaagaatatctggaccctaggattaccattgccttattcgaaattggatcacattccccttcctcctggggctctctccctttcctaaagaatagcagccatcaagttacagaacaacagactgcacagaagtttaacaatctcttaaaagaaattaaagatattcttaaaaatatggcaggttttgaagagaagatcacagaagcaaaagaactttttgaggaaaccaatattactgaggatgtgtcagcccacaaagaaaatatcagaggacttgacaaaatcaatgaaatgttatcaacaaacctgcctgttagtttagccccagagaaagaagacaatgaaaagaaacagcagatgataatggaaaaccagaactctgagaacaccgcacaagtttttgcaagagatttggtaaatcgtttagaagaaaaaaaagtccttaacgaaactcaacaaagtcaggaaaaagcaaaaaacagacttaatgttcaagaagaaactatgaaaattaggaacaacatggagcagttactacaggaagcagaacactggagtaaacaacatactgagctcagtaaactgataaaatcctatcagaaatctcagaaagacataagtgaaactcttggaaataatggagtcggtttccaaacccagccaaataatgaagtgtcggctaagcatgagctggaggaacaggtgaagaaactgagccatgacacctattcattgcagttgatggcagctttgctagagaatgaatgccaaatcttacagcagagagtagagattctcaaggaactccatcatcagaaacagggaactctgcaagagaagccaattcagataaactataaacaggacaagaaaaatcagaagccatcagaagcaaagaaagtagaaatgtataagcagaacaagcaagcaatgaagggtacattttggaaaaaagacagatcctgtagaagcctggatgtttgtcttaataagaaagcttgcaatacccagttcaatattcatgttgcaagaaaagctcttaggggaaaaatgaggtcagctagcagcctaagatagaaaataccaaaagcagatgaaaaggtgaatccttaaaaaactacatctgttacctccaacttgtcagtcatgatcaatcatcaaaccttgggcagatctgctggttcaaccaagaaagagctatagaataaggagattgacacttatattactcattacttcagcagttatgtaagtctggtctttaatgaccattgtgtctacatcaagttcataacttttcacctttacaatctgcttgttttttttgtaattattagatagacagcctagagtgagaagttaaaggtccaattaagtaaagatctaaataaaaaccagaatacaaggg

SEQ ID NO: 4361 - protein, 382 aa, Homo sapiens [sequence omitted]

SEQ ID NO: 4362 - DNA, 8174 bp, Homo sapiens
agctgggccatggccgcgaggcaggggtgagaccggcggccacccgtgagccctccgcacccgcaccatgcagaagagcgtgcgctacaacgaggggcacgccctgtacctggcctttctggcgcgcaaggagggcaccaagcgcggcttcctgagtaagaagacggccgaggcgagccgctggcacgagaagtggttcgccctctaccagaatgtgctcttctacttcgagggcgagcagagctgccgcccggcgggcatgtacctcctggagggctgcagctgcgaacgaacgcccgcgccacccagggccggcgccgggcagggaggcgtccgagacgcgctggacaagcagtattactttactgttctttttggccatgaaggtcagaagccactggagctgcgctgtgaggaggagcaggatggtaaagagtggatggaggccattcaccaagccagttatgcagacattttgattgagagggaagtattaatgcagaagtacattcatctagttcagatcgtagagacagaaaaaattgcagctaaccaactccgacatcaacttgaagatcaagacacagaaatcgaaaggcttaaatcagagattattgctcttaataaaaccaaagaacgaatgcgaccttaccaaagcaaccaagaagacgaagatccagacatcaagaagattaaaaaggttcagagcttcatgcgaggatggttgtgcagaaggaaatggaagaccatcgtgcaggattacatttgttctcctcatgctgaaagtatgaggaagagaaaccagattgtgttcaccatggtggaggcagagtcagagtacgttcaccagctctacatcctggtcaatggctttctccggcccctgcgtatggccgccagctccaagaagccccccatcagccacgacgacgtcagcagtatttttcttaacagtgaaacaatcatgtttcttcatgaaatatttcatcaaggactaaaggcaaggatagcaaactggcccactttaattttagctgatctgtttgatattttgctccccatgctgaacatttatcaagaatttgtgcgtaatcaccagtacagcctgcaagttctcgccaattgtaagcaaaacagagattttgacaaactcttaaaacagtatgaagccaatccagcctgtgaggggaggatgctggagacattcttgacctatcccatgtttcagatccccagatatatcatcacactccatgagctccttgctcacacaccccatgagcatgtggaaaggaaaagcctggagtttgccaaatcaaagctagaggaactatccagagtaatgcacgatgaagtcagcgacactgaaaacataaggaaaaaccttgccatcgaaagaatgatcgtggagggctgtgacatcttgctggacaccagccaaacgttcatccgccaaggttctcttattcaagtaccttccgttgagagggggaaacttagtaaagttcgcctgggttcgttgtctttgaaaaaggaaggagagagacaatgcttcttatttacaaaacactttttaatatgtacaagaagttcaggagggaagcttcatctgctcaagacaggtggggttctgtctctaatagactgcacattgattgaggagccagatgcaagcgatgatgactctaaaggttctgggcaagtgtttgggcacctggattttaaaatagtggtggagcctcctgacgctgccgccttcactgttgtcttgttagcaccctcacgccaggagaaagctgcctggatgagtgacatcagtcagtgtgtggacaatatacgatgtaatggtttaatgactatagtgtttgaagagaattccaaagtcactgtgccacatatgattaagtctgatgcccgtcttcataaagacgacactgacatttgcttcagtaaaacactcaactcctgcaaagtgccccagatccgttatgccagcgtggagcgcctcttggaacgactgacagacttgcggtttcttagtattgatttcctcaacacctttctgcacacctatcgtattttcactactgccgctgtggtgctggggaaactctccgacatatacaagaggcctttcacctccatccctgtcaggtcattggaattgttttttgctaccagccagaacaacagaggtgaacatttggtggatggcaaatccccacgtctgtgtcgcaaattctcttccccgccaccactggctgtgtccagaacatcttccccagtgagggccagaaagctgtctttgacttctcccttgaactcaaagataggagcattggacctgacaacttccagcagtcccaccaccaccacccagagtcccgctgcgtctccaccaccacacactggtcagataccactggatctcagcagaggcctctcttctccagagcaaagcccgggaacggtagaagagaatgtcgataacccacgcgtggatctgtgtaacaagctaaaacgaagtattcaaaaagcagtcctagagtctgcaccagcggaccgagcaggagtggaaagctcccctgcagcggacaccacagaactttcaccttgcagatccccctcaactcctcggcacctccgctatcgacagcctggaggacagacggcggacaatgcccactgctctgtttcaccggcttctgcttttgcaatagccacagctgcagcaggacatgggagtccaccaggctttaacaacaccgagagaacatgtgataaagagtttattatacggagaacggctaccaatcgagttctgaacgtcctccgtcactgggtctcaaagcacgcacaggatttcgaactcaacaatgaactaaagatgaatgtcctaaatttgctagaagaagttttgcgagacccagaccttcttccccaagaaaggaaagccgccgcgaatatcctcagggccctttcacaagatgaccaagatgacatccacctaaaattagaggatataattcaaatgactgactgcatgaaggccgaatgctttgagtccttgtcggccatggagctggcagaacagatcaccctcctggaccatgtcattttcagaagcattccctacgaggagtttcttgggcaggggtggatgaagctggataaaaacgaaagaactccttacattatgaaaaccagccaacacttcaatgacatgagtaacctggtggcctcccagataatgaactatgctgatgtcagctcccgtgccaacgccatcgagaaatgggtggcagtggcggacatctgccgatgcctgcacaactacaacggcgtgctggagatcacctcggccttaaacagaagtgccatctacaggctgaagaaaacctgggccaaggtctctaagcagacaaaagctctaatggacaaacttcaaaagactgtttcctctgaaggaagatttaaaaatcttagagaaacccttaaaaattgtaaccctcctgcagttccttatcttgggatgtacttgacagacctggcatttattgaagaaggaacaccaaactttactgaggaaggccttgtcaatttctccaaaatgagaatgatatcacacatcatcagagagatacgccagttccagcagacttcctacagaatagatcatcagccaaaggtcgcacagtacttgcttgacaaagaccttatcatagatgaagatacgctatatgagctgtcactaaaaattgaacctcgactccctgcttgaagatctggccttgcccctgagtccacgggatgttcatggaaagcaggacagacagaattgtgtatgccttgcctatcacggtacagcacgaagccaggctcctttctccaccaaagaagatggaaccagactggaattctgtctccagagagaaacccagctgtttgggtcaaagacagatgcttcagacttgggtgggaaggtgaaagatggctatttagaaagctggtggcacgttttacataagggaatgtcagatgggagatgctagttgccattttaacaaagcaggtaaatcggtaaattttaaactctgtccatgttctgttagaactcagggacaaggatccatgaaaaagacctgtgatgtttctctggcgctttactggcctgggcacacctaccaatcttctaggatttgactggttccattacatttccttttggtataagcttcacagaaaagctgacacttcctctacagagatggaccaaaacataagcaatttcagtctacagcatgtgcatggttgtcagtgcattctaaatatttctatgtgaggaatggtaccttctgaaactgcctttccagtctttaggcaatgggataggaaagaaagaatgaaacacaaatggatttgtatgtaacatttccttaattaaatgcagtaggctgtgccccagaggattccagacagtggctggctgaggtgggtggggagcttttccttgagactgttggtcctaagaagccagcccttttggagaggcagctgcaaaaaggtgcacgcccatctcaccgacaaaactgtggaacagaaggccaccaagtgctgtggggaatcatgggtttcagtgctgagtgaaaatctatacctaaaaatcatctctgcaccttgctttgtttgttttctttccccactcatagtactgcaggaatctattctcatttacacagacctttttttaggcttactatgaacattggctgtattttttttaaacagtttagtgaaattttcttttcaaaacccacacttccatatgctgttcgtagatctctttctttaaaaactgatgttgagagatctctgagaatattataagtgcatgggaaatgggcccaaccaccgaacagctcttacattacaaaaccaaatgcaagggttagtcctgctacctgaggctggggaagtgaccttccttttcccaagattgtcagttgttgaagaaatagggctatctcattgtttacctccctcttctcttctcagggagactgctgctttaaaagaaggaagagaaaaaatatagttctatttccctgaacctgttgcacctgacattttctcttagcagcatgaaacttattgatgctgacaatgaaaaatggatctgtctggctgctttccctctttccttgcactttaattatgttgctagagctaacagactaataaattccacctgctggctcttaagactcagtgaaagagctagcattggtaatgcaccatagaggtagagaatgtacactttctgcacggtaagtgccatctctgtatgtaactatatagtgaaatatcaactaagtaaaagaaaatataatatttgaagaccattcccaaaatattttcaatagttcatattagccaacagtgtagcactcaacccaaggagggttccttatggatgctttctttttcttttttaaagttgcttgtttgttctctttagtttcaaataagaggttgacgcatcttgatgcatgatgagaagcatgggctgtttggatcctaacaacgcataacttgtgatttatttctcagtgctccagaaactgagggtttgaaataatatgtatcagttgcaccaaacacctcaaggtcttgcagaagaaaagtaaaggttagctttcatggctcaaaagcatagtcctgaagggtgaactaaaaccgggacaaatctgtgagaggaccacacacatactagtttcgggccaaacaacacgtggaaaggtgcatgcattctactctgccttggagttgccagagtccttcagagggaaagggatggttctgtgtgcactttttctggaagttcggactcatttctttgacccaaatgttccagagacactgcagccattcttattaacaaaaaataagacaggagtttccaaatgctccttcccttttggatcgcagcttttcttcaactagtgacaaagcttttgcgcctatttcctgcaggatgttggaactgccccgcactggtcatattaggcactgtcaattgctatgctgacttttagggggtttttgtttgtttgaaaaacagggtctcaccatgttgcccaggctggtctcgaactcctggactcaagcaatcttcctgcctcagcctctcaagcagctgggactgcaggggtgtgccactcactagcctttcgcatttttgtttgagaattacaccactttctggagtctgcagccttcctggagctgcaagagggcaagagagagagctccacctctgagggagtgtctgttgatgacctgcactattcgtgtgccagctgggagaggaatgcacattttaaaatcccttcaatttggtcaaattaaaaatccccaagagcaatttgcagtgttttttctggtcgttaaagtacccatcctcttctgcctacacacaaagcatgcattcccagctgcatctgcctctagtccattatggagacccatttctaagaggagatgggaggtcaacctctaacagccaagtagcgaacatgtatactgtaaaattaacctagaaaatcagaagaaaaatccaatttcatgctttcgaatgaatgcccacattttgtactgtcaacgaaattatcttggagcttttaggggatgccttttcgttattaactgagacatctagttttgctacagggacaaatctcttacctaatccaatatattatttgacagattcaggcatgaagtaaaacgtcgtcacttttccttagtgcttttctgaaggaatttaaagacggaattttaaacggccattgcaatattttcaagtggctctcataccaagtcccattactgtttgttaaatttcagtacgtcttaaagtactacttataaacaaatgaaactcagagaaactgaatcacctggaagagaaaaatccattatggtcccatgtggagtgaataatgatggatcagcaccctttctctcatgttattgtataagacgagacttttgggccagcagcgattgggcagcttttaaattcttaactgaaaagagtaatgcaatacagggattattcccaataaaattaacttttatttaaaagcaagagattttacttagcttttttttttcaaagtttgattttatccccttgaaaaaaaatctcttcactttaaagtataaaggtttttaaaaatccaattgcaaaatgtattatttttacaactatcgaaaaggcataaaagagaacatactatttatggctgaagggtatagccaggctaatgtgcacagagggaatcaataaataaaactctttttcatttcagtaagaaatcagattgtaagtttaatggctccattatagataccaccgtgtaatagaagacttaagtcaatgaaatctaatcagtgtgtcatttctcagcggccattggtgacttaaaattaagatgaggcagagccaaaatggaaaacagtcattttgttgtaggtataaacacatgaacgattcagaaaattattcatctcagctgccatgcagcatgacattaacattaggattgatagcactagtctgatctgctcaaggaaaataatagttctattatacttaatgatgttggtttttacacagctcatttcatttttcactagaaagccagttatgaaagagagctggcctaggcatcccggccctgagtcctaggcccagtctccaactggaaaaccttaggctggtgtttacacatccctgagcctcagtttcctcatctgcaaaacggtgtgaatagtaatccctgtgctgcttatctcacagggctattgtgaggaccaaatggattagactgtaaactgcaaagtgctgtccgcacatgaggtcatctgattactgtcctcagatctcttttgtagaggatttcaatgtatttctttatcatttgagtgtgtgtgtgatggacgaatatgtgtgtgagtttgagaagcatatcgttcgtgtccagttactttgcaaatttgtggacatttgtgattggacagaggggtttgtgctgtggcctaacacttgccaagtgaggtgtaggttatgcctatatgcaaattaaacttcacctttcttgaatattcag

SEQ ID NO: 4363 - protein, 1237 aa, Homo sapiens; identical to SEQ ID NO: 529

SEQ ID NO: 4364 - DNA, 2829 bp, Homo sapiens
ctgaggaattctcttggttggcttggaccagccccaaggctctgaagttcccgttacagttgccattttcctaaggatgtctgtgagtctggggtgccatgtggtttggaagactacaggccaatggccagaaccaggggctctgagctgagtgtcactgcatgtggggaccacaggacattgcaggcagccaccttcaggcgaggggatggacatatcactggactcctgacaaggtcttggcgggctcaccactggcagctggggctgagttttgggccaacatttctgctagcccagatccccggtcacactttacacagtcacttcttataaacactttcattggtgataccatgcttggggtaaagttcatgtttcccccatctcagcaccaaaggaagagagtgtgcataaaaagtgggtgtttcctgaggatctcattggaccacctttgtaggcagagcttcctgtgtgtatggctataatccagcatttcccaaatcatgaaatggaccaactttgtgttccagattattgctcttaataaaaccaaagaacgaatgcgaccttaccaaagcaaccaagaagacgaagatccagacatcaagaagattaaaaaggttcagagcttcatgcgaggatggttgtgcagaaggaaatggaagaccatcgtgcaggattacatttgttctcctcatgctgaaagtatgaggaagagaaaccagattgtgttcaccatggtggaggcagagtcagagtacgttcaccagctctacatcctggtcaatggctttctccggcccctgcgtatggccgccagctccaagaagccccccatcagccacgacgacgtcagcagtatttttcttaacagtgaaacaatcatgtttcttcatgaaatatttcatcaaggactaaaggcaaggatagcaaactggcccactttaattttagctgatctgtttgatattttgctccccatgctgaacatttatcaagaatttgtgcgtaatcaccagtacagcctgcaagttctcgccaattgtaagcaaaacagagattttgacaaactcttaaaacagtatgaagccaatccagcctgtgaggggaggatgctggagacattcttgacctatcccatgtttcagatccccagatatatcatcacactccatgagctccttgctcacacaccccatgagcatgtggaaaggaaaagcctggagtttgccaaatcaaagctagaggaactatccagagtaatgcacgatgaagtcagcgacactgaaaacataaggaaaaaccttgccatcgaaagaatgatcgtggagggctgtgacatcttgctggacaccagccaaacgttcatccgccaagggaccatgaaaaacagcaacacaatcatagtaaagcacgagtggggcaggcagttacattctgactggacgctcctcctcagcggcccggacattctctgcagctccaaggaggaccggtcggcctggcccacggccgtggcagtgccaagtgctgacgatacccaggccaaggcccaggagaaacttgcgttgctcaaagccctttcacataagactggggaccatgtccgaagtgaaaacagctgtctgttgttcccatttttcatcagcacttccggatccgccccacacgatataatttgattcaactggtaactcccgttgccagatgaaatgtctctgatggacacttgccacgctttggtaatgcagaagctgtcgtgtttgcgaagtgtgctttgggggcatcactcgataaattaagcttttgaagagttgaagatatttgtgccggaaactgtggagaagcaacagcctgacagtgcctatttctcctcggctgttatttcaaaatgcaagacgtaaaccacatcccaagttatttttttagtgcttaggtcctctgggggaggggagaatgccccaggcaattgatttgagacaatatattgcacacatttataattttgaatttggtgaggagtggaatataaatttggaactcaaattaatcgttaatgtagtttctgtttataatgtgccaatacatttgaagatatttgtgttgccattgcctaccataatgtactgcttaaaatctctttttacctcatcaagaacaagacaatgttttgtgcacattaatttttgcacagactactttaaaagtttaatgcatgccattctattttccattatttatttacaaggagaaaccacacatatgttaaagtttgggagtgtattttaggaaatgattccttttctcatttttggctttagatattcttttttctttaaataagggtggaatataatgctgacaacatcaggcccttgtaatgcctcctctattcctctgcacagactgtgtccccacattggcttcctgcctgccagcctctgtgcctttccttgtgctgtccccagcctgggggctgggaatgtccttatccatttcttttgtgcctgttgaagttctgcttgtcccaccaggctcagatcagatacctcgaaggagccttttataatttcctcttcttcctcctcccctctcctccagttagaatggatttaccttccacttgtttccaaggcactttactcctggtgcgtgtatttcatcctcttgcttgtatacctctctctcctggttactgtaaactctgaagggcagcacttaaggaattctctctgccttaccttgtctagtatgatgctttttgttacagatacctggaaaatgggcgttgaattaaattatttactgaattgcaattatgactgt

SEQ ID NO: 4365 - protein, 392 aa, Homo sapiens
MKWTNFVFQIIALNKTKERMRPYQSNQEDEDPDIKKIKKVQSFMRGWLCRRKWKTIVQDYICSPHAESMRKRNQIVFTMVEAESEYVHQLYILVNGFLRPLRMAASSKKPPISHDDVSSIFLNSETIMFLHEIFHQGLKARIANWPTLILADLFDILLPMLNIYQEFVRNHQYSLQVLANCKQNRDFDKLLKQYEANPACEGRMLETFLTYPMFQIPRYIITLHELLAHTPHEHVERKSLEFAKSKLEELSRVMHDEVSDTENIRKNLAIERMIVEGCDILLDTSQTFIRQGTMKNSNTIIVKHEWGRQLHSDWTLLLSGPDILCSSKEDRSAWPTAVAVPSADDTQAKAQEKLALLKALSHKTGDHVRSENSCLLFPFFISTSGSAPHDII

SEQ ID NO: 4366 - DNA, 555 bp, Homo sapiens
actacttgtcaggcactggccaagacactgagggtatggagcttgttacacagatccacgcgtgggttatcgacattctcttctaccgttcccgggctttgctctggagaagagaggcctctgctgagatccagtggtatctgaccagtgtgtggtggtggagacgcagcgggactctgggtggtggtggtgggactgctggaagttgtcaggtccaatgctcctatctttgagttcaagggagaagtcaaagacagctttctggccctcactggggaagatgttctggacacagccagtggtggcggggaagagaatttgcgacacagacgtggggatttgccatccaccaaatgttcacctctgttgttctggctggtagcaaaaaacaattccaatgacctaaaaatgagagcaaaagtggctaagagattgtagccaagtgaaatgaattcccagatgtcattcaagaacatgttcccttcatttataggtcacaatctcattgcacttctattgctggacttccgttaatctaaatgctacatgtatacc

SEQ ID NO: 4367 - protein, 65 aa, Homo sapiens
MELVTQIHAWVIDILFYRSRALLWRREASAEIQWYLTSVWWWRRSGTLGGGGGTAGSCQVQCSYL

SEQ ID NO: 4368 - DNA, 1080 bp, Homo sapiens
cgctatcggggagctattgcacgcaagcgaattcgcctaggcagaaaatatgttatttcccacaaagaagaggttccactttgcatacactgggatatcagcaagcagataaaaatatatactctggaagagcatgatgttttatctgtttgggttgaaaagcacgtgggaagtccagcacatttggcttatcgtctcttgtctgactttacaaagcgacctttgtgggacccccattttgtgtcctgtgaagtcatagactgggtgagtgaagatgatcagctgtatcacatcacctgtcctatactgaatgatgacaaacccaaagacttggtagtactcgtatcacgaagaaaacccctcaaagatggtaacacttacacagtggcagtgaagtcggtcattttgccatcggtccccccgtctccacagtacatcagaagtgaaatcatatgtgccggatttctcatccatgctattgacagcaattcatgcatcgtatcttactttaaccatatgtctgctagcatccttccttactttgctggaaatcttggtggctggtcaaaatccattgaagaaacagcagcctcttgtatacagttcttagagaatcctcctgatgatgggtttgtaagcacattttaaaggtcaactttcaattactggtaatttaatttcccacttttaattccaagcacccttagccctgacatctgtcaagctttggggccacaaaataatttaatataaccctaagcaaaatgcagtgacggagttaaaaaacaaaatgcatcttaagtcaaataccagtgatttggattagcattaaaagagctttagaattctgttgtaagtcatctgtggctctgcctcttccaggggcacagatagtggaaaattgcctgtatgcagtactatgtgttctataaaatggcatgaatttagtttaaattatcgtaaacatttttaggttacagaggtgaaacatgcattctgtgtgaaattccaaaaaaaaaattataaaatctaaaatgatttgctaagttgactcgttgattaatgtatggcattcttcct

SEQ ID NO: 4369 - protein, 45 aa, Homo sapiens
MLLTAIHASYLTLTICLLASFLTLLEILVAGQNPLKKQQPLVYSS

SEQ ID NO: 4370 - DNA, 2123 bp, Homo sapiens
ggcgtagcgctctcgccctggccatggagcggccggcgcccggcgaggtggtcatgagccaagccatccagccggcgcacgccactgcgcgcggcgagctgagcgcggggcagctgctcaagtggatcgacaccaccgcctgcctggcggctgagaaacatgctggagtttcctgcgttacagcctcagtggatgacatacagtttgaggagacagctagagttggacaagttataaccatcaaagcaaaagttactagagcattcagcacaagcatggagatcagtatcaaggtcatggtacaggatatgctcactggcattgagaagcttgttagtgtggctttctccacatttgtagccaaaccagttggaaaagaaaagattcatttaaaaccagtcacacttctaactgaacaagatcatgtggaacataatctggctgctgagagaaggaaagttcgattacaacatgaagatacctttaacaatttaatgaaggaaagtagcaaatttgatgatctcatttttgatgaagaggaaggagcggtttccacaaggggcacctccgttcagagcattgaactggtcctcccaccccatgcaaaccatcacggaaatacatttggtggccagattatggcgtggatggagacagtggctactatttctgcaagccgcctgtgttgggctcatccctttctgaagtccgtagatatgtttaagttccggggaccatctacagttggagatcgtcttgtcttcactgccattgtcaacaatacatttcagacctgtgttgaagttggagttcgcgtggaggcctttgactgtcaggaatgggccgagggccgagggcgtcacatcaacagtgcttttctcatttacaatgctgctgatgataaggaaaatctcatcacgtttcccagaatccaacccatttcaaaggatgatttcagacgctatcggggagctattgcacgcaagcgaattcgcctaggcagaaaatatgttatttcccacaaagaagaggttccactttgcatacactgggatatcagcaagcaggcatccctgagtgacagcaatgtggaggccctcaaaaaactggcagccaaaaggggttgggaggttaccagcactgtggaaaagataaaaatatatactctggaagagcatgatgttttatctgtttgggttgaaaagcacgtgggaagtccagcacatttggcttatcgtctcttgtctgactttacaaagcgacctttgtgggacccccattttgtgtcctgtgaagtcatagactgggtgagtgaagatgatcagctgtatcacatcacctgtcctatactgaatgatgacaaacccaaagacttggtagtactcgtatcacgaagaaaacccctcaaagatggtaacacttacacagtggcagtgaagtcggtcattttgccatcggtccccccgtctccacagtacatcagaagtgaaatcatatgtgccggatttctcatccatgctattgacagcaattcatgcatcgtatcttactttaaccatatgtctgctagcatccttccttactttgctggaaatcttggtggctggtcaaaatccattgaagaaacagcagcctcttgtatacagttcttagagaatcctcctgatgatgggtttgtaagcacattttaaaggtcaactttcaattactggtaatttaatttcccacttttaattccaagcacccttagccctgacatctgtcaagctttggggccacaaaataatttaatataaccctaagcaaaatgcagtgacggagttaaaaaacaaaatgcatcttaagtcaaataccagtgatttggattagcattaaaagagctttagaattctgttgtaagtcatctgtggctctgcctcttccaggggcacagatagtggaaaattgcctgtatgcagtactatgtgttctataaaatggcatgaatttagtttaaattatcgtaaacatttttaggttacagaggtgaaacatgcattctgtgtgaaattccaaaaaaaaaattataaaatctaaaatgatttgctaagttgactcgttgattaatgtatggcattcttcct

SEQ ID NO: 4371 - protein, 555 aa, Homo sapiens; identical to SEQ ID NO: 531

SEQ ID NO: 4372 - DNA, 602 bp, Homo sapiens
ggagcgggcatggtggggtgtcgggggccgcaggcgtagcgctctcgccctggccatggagcggccggcgcccggcgaggtggtcatgagccaagccatccagccggcgcacgccactgcgcgcggcgagctgagcgcggggcagctgctcaagtggatcgacaccaccgcctgcctggcggctgagaaacatgctggagtttcctgcgttacagcctcagtggatgacatacagtttgaggagacagctagagttggacaagttataaccatcaaagcaaaagttactagagcattcagcacaagcatggagatcagtatcaaggtcatggtacaggatatgctcactggcattgagaagcttgttagtgtggctttctccacatttgtagccaaaccagttggaaaagaaaagattcatttaaaaccagtcacacttctaactgaacaagatcatgtggaacataatctggctgctgagagaaggaaagttcgattacaacatgaagatacctttaacaatttaatgaaggaaagtagcaaatttgatggtcagtaaatccacttataagaattttaattctataactgtgacaggcaaa

SEQ ID NO: 4373 - protein, 167 aa, Homo sapiens
MERPAPGEVVMSQAIQPAHATARGELSAGQLLKWIDTTACLAAEKHAGVSCVTASVDDIQFEETARVGQVITIKAKVTRAFSTSMEISIKVMVQDMLTGIEKLVSVAFSTFVAKPVGKEKIHLKPVTLLTEQDHVEHNLAAERRKVRLQHEDTFNNLMKESSKFDGQ

SEQ ID NO: 4374 - DNA, 1817 bp, Homo sapiens
tatatagaattattgaagaattaattcaccttcgtaagcagctactagcttaaaaagaattaatgtggctctcgaaacacctactttattcgttaaggagtaacttaggcactggttaagaacagagtccaattgtctttggaaccttattaagacaaaaagactccaggaaaacgtaggtaactaaaagccaagtcaatacatgtcttaaactactgtggcaagtggtaatggcatctcacaattactttcatctttcctgtaatgaatgattacatttgataagaaagaattccatttttccattaaacaatcttatgagatgttttgctttagggtaaccacatacctcatctctaccacaagacctggtgttcgcattcaagccagttgacagcaatctttctcaatttattccttctcctatctctacccattgatccctggagtcctttcacaggagcaatgtcagtaaacacttatcactgaataggcagcaggtggttcctcaagtctatatagcacacagtagcagttcgttagaatgaaagaatgaaccaccaccacgcctcccctgcagcaatccccttgccgctgttggtttctatagagacccatgaaacttttagctattgcaaattttattttcaacttgtaattctttatcaacatattattaggaattgtatactttgtgttctcagcttttctttaaaatttttttacttgtcgctacagcctttttatgctataataccataacaaatgtctattaatattttttatatcagctttaatggaatattataaatgtgtagtgacatttttagtcaaatgcttttgaatatttaatgtttggtaacaataggggaaagcaggggaggaagagagcatgccccttcatccttaattactggtcctttgcatgcaggaaatatggcttgattgttttattgtccacctcttcaatcaacaattcttaaatatggtgcatagtaagtgtatctaggcttctaagacttgcacaaatctgtaaacataagcaatataaagctatgttagcttgcatgctcatcccatctattgtaccatttatgtgaacttgattcatccaaacatgtcaccacagtattttttcatccaaacacatttatcgtgttatttcaacatctgatgcaggcgctgggggtcatggattggtggagaggcgcccatacccaattataactgattaattgtatggctttcaaaaattgaaatagcagaaaataataattgaggaaaataattaaatcatagtccaacatatttcagaaacctatgtatttgatggattgcttacaataattaacagcttagagctctgaaataagacttgcttctttgcaaggaggcaagtaaaattgaccagtgagtatgctgattaaatactgtgatttcactctgtgtcccaagtgatttacgtgtacatcaacgcaaaagctaagactgaagagtgaggcagaaggtgaccaggttagcaggctgggctgtgccgcagggcagcagaatgaatatatgcacattgttctctggagtgagccttcctttccctgaagctgagggtctgtgggagcctaaggggctccataaatctcagcactagtatattccaggggatgatcgccagcagcattaagagctatgtttagcctttatgccatactgtatctttattaacccttcagatgcaaattctgaaacaaaacattaaaatgtgactcactccaaacagaaagatggaaatgtattcctactaagaaatatgtgtaacttct

SEQ ID NO: 4375 - protein, 69 aa, Homo sapiens [sequence omitted]

SEQ ID NO: 4376 - DNA, 3390 bp, Homo sapiens
ggggcatgaagaagtcccacatctgtctatatcttttcttcatcatattgtccctaggaatgtatagcaaagcattcagaactgctcctttggctggggaagttttccaccgtccttaatactatgaagtcttgattacttcttccgtggctttatccttgcctccctcccaatccctgcatcttccaggagaaataaaataccaactgaacactgttaccttctcagcccttaccattttcatctgcatatagtgtatagtactaagagtagttttcccaggagaaataattgcaattttcatttcttgattatcactgctaattcgaaggagtgccacaaatcatagccacttgattttgattttggaatgcattttagtgttttgacactggttttccttttttttaaatttttttttcttttttttttttgagacagtcttgctctgtcacccaggctggagtgcagtggcacaatcttggctcactgccgtctccgcctcccaggttccagagattctcctgcctcagcctccagatgttgggattacaggcatgagccaccgtacctggcccaggttttcctttttttttatgtcttctgtacaatagagttggccctccatatccacaggttccacatccctgattcaatcaactcctgataaaaaatattggaaaaaatttttataacaataaaaaccaataatacaacaataattacaaataatacattgtaacaatgatttccatggcatttataatacattgtattaggtattataagtaaacgagatgatttgaagtatattggaggatgtgcataggttatactatgccgttttatataaaggacttaagcgtctgtggattttggtatctgcagaggtcctggaaccggtctcccttggatacggagggacaactgtagttctctgtctttgaaaacattaatcgatacaagtggccagtgaatgtatagtatgggagggagtaatccagtatgggggacaaggttgccatatatttgccaaaagtagttgaatcttctttctgtttttccctcctggtggaataagtttattgtttgctatgaggagccagaggctgtgtttgtttaaagcaatggtacccaatcttaagcatgtgtaaaggtctccctgggtctgtgaaccataccttgagaaataactagaaaagtaaaagaatggtgaaccactattaataatacttccattttgcatactaaatatgttgcgtgtacctgtgtgtgtgtgttgggaatagtaatatgaagtttgctcacaaaacactcccactgtgattcacattattttatagcacaaccaataatgattaaacataattatttcctttgactacttttcatttcagtggtaaaacagctgatgaaagttatttgggatggaaagagtaatacaagacatacgcagatggagtctcctgtgcgtaggtttagcacacccatgttagcttgtccacattaggccttcttttgaaggtactgtatctaaagataagggcataagtgatcatttaattctcagccacttcactgatactacaaggtgttacacagtaattatagtggtttgatacagacatttgtttacaagaaactgaattggcattattaacttatttcacacaaaaaaagttagctttacccatgaactgtaattcagattgataaggtgacctacccatgaaaaagacacctgagacctgtttacttttttaaactatgaagtgaaatcctcagttcaataagtgtcccaaggagaatttcctctgttaaattttccctgttaacttagtataattggttttcttgaatagaagaataatgatttctgtaagatattttaatgtgaatatttttgctgtcttcatctttaaaaattaaatacagtactatatatagatattaaaattttaaagtgggactaggtgtttttatgtatacaattacagtttgtctcctctctttgcaaatttactggctattatcagaataaaggttggactcattttgcttatcccagtcattaaaatgttgtgatctgtttctaacatatttagcatttcatttttaaaatgagatgtgccattatcataacaaaggcaactattaatgttcctagaaaaaatgatgtaaaggacttactcctagtcaatattaacacttaatcccactttcttttttccaccaaatggcctcagtacattgccaagagagtgaaatttggattcctcacagtactcagaacacaatatgatatttgtcagctaactttccatcatgtcttggtaaaattgctcagttaaatataattggccatctacttattaaaaaacaattcaaataatctgtacagttaccataatttgacaacaaattactttaaatttagcaccatcttagaaatcttcttaatataaactactgattgaaatgtgtttatactttctatcatatttcaaactgttttactttccttgcattaagacaattaaaacacaaactacatgttagaatgaataatttaaaggacatgctgctgtttcagcataaaaaatggtaaagtctttataaatagaatacttatgatagccattaacgtattgaattgtttaattaacctagttgtgattttccgaatttaagacgttttcttactacatgtgttaaattgttacctataatatcttcctggaaaaatagaagtatttgtaaggtttttataaatgcacaatttatgtataaatataattggaatctgggatgactcttagtaatctactattcttaattcaacgatggccaccagctacctgacacattttgtaaatttagcatctgtgtatgtgtgttcgtgtatgtgtgtgtgcgtgcatgtgcacattactgcatttattctcaaatggatttataatttagtgtttttgtacaagtacttgagctattcatgtaatgggataagttgccataaagatgtacataaatgacccttaatttggcacgttttcacatttaattttttaaaatacagcttttcatatacagttcctaccctttcatttctagcctgtacttcattacttgttgaaaaagtcaagtttgtatgaagccagcataaacatcaaaatataactaatgtggacatctgtgtatataattgaattagacattatgccttatataaaattcaggaggttctaatatcaaaggatctatatgcatggaagaagaggctacaatgcatatatcaatggctggctctatgtggtcagataactaaacatggaatgccaaaaaaaaactaatgttattagcaaatagatatgttaatgaattaaactttgg

SEQ ID NO: 4377 - protein, 62 aa, Homo sapiens
MATSYLTHFVNLASVYVCSCMCVCVHVHITAFILKWIYNLVFLYKYLSYSCNGISCHKDVHK

SEQ ID NO: 4378 - DNA, 2816 bp, Homo sapiens
caaaaaatatatgtagatatctctatatatgttatatatacatttttaaatttttaattgggtagggtatataaaatggtctttctaaaatttcacatttaggaatctatgataacaacagttttcttcatgcttccataaaaaaaaaacgattgggaactaaggatagaactccttgcattttccatcagatggtactgattcactatactgtataaaagaagaggaattttttcagatttaaaaactcaggagctatatgctggaaaatacatatagtatacttcacttatttaaattaaaggagtgtttaatttataaatgaaatcttacctaataaaggctttctttttatattttgtttcaggctcaggagatatggacagtatttccaagaattctcccaataatatgagcctgagtaatcaaccgggcactccaagggatgatggcgaaatggggggaaatttcttaaatccttttcagagtgagagttactcccctagcatgacaatgagcgtgtgatccattaccaagtctcctcatgaaaaccacagtgagtcagcccttcacagaactactacggaagaaaattattcatcacagtgtacagttaaacaaaggaatctcagtcacaccaaaccaacctttttatttcctgctctctcccctcttttgtgaagaaagcgggtccaaatgtgattcaaacaactgtacggagtggcatattagaattgccctaaactgaactgcaaataattatgtgtgtatgtatatgtgtgggaaagagaatgtactgtatatgtgtatgttatacagacatatacacatacatacattgacccacaggacattgtaaaatattatcacatgacatcttaagtagaaataagtagggacttttattccatcctttttttcacgtttacattttaattattacaagttgctcctgccccctccctgaactattttgtgctgtgtatatcactgctttatataagttattttttaaggtgaactcagatgttatggttttgtaaatgtctgcaatcatggataggaataaaatcgcttatttgagagctttcattaaattgcgtctgatgcaagttatcctgtgaatcacaaagtgtactgtctcaaaaaatagaagaaaatgtgtcttcgtctttatgttgaatcaaacaatttctcagttaccttcagtgaaaagtatttttttaatttttatttgagaaaaacacttcaaatcagtaaaagcttaactggggcctcacacagtatatttctgcaataactgctttaaacggagttcttgatttgtttgtcttagatgatacagaaatcattaaatagcccaaatcatttagaccatagcaataaagtgaccggggttgtcatatatttagcaacatcttttctctttaacatgatgaagcccaaaagtgataacaaaagcatttgcttgaatttgtcacttctcaccaggagtactagaggtaaatttttaataacatactaatgtgaaatggtatctggtttttattcagactttttgtgagcatattcttatagacactagaaataaatacatagaaggagactttgagcacaagggagaagagagttattagcactcctgaggcctctggaatgctgcttttctatccaggtatcttgcttgctaccagcagaattgactggtattggttctcactggccagggagcctctgctctgttcctggaatataaggcttttattcaggagcaaatcattgatagtaactttgctttatctagccattgacttcagcaggctaaaactacattgtgtaactgactgttcaaaaaagaataagtaaattttttttaatctaattcccttatggaaagcaccttgctctatggcactttccagatcttttgggattttgtgcttaattatacatacatacaccaaaatcacaatagaaagatatgaagactttaattttagactctgaaagataactgggtgatcctttgtgttaaaattgtgatacaaacaaccattgataaataccaactatgaatccaaactctagagactttgaaaagcattgtttaattgcaggtaagaggaatcttctctttcctttaggcttatagtctctaaagtgaaaatttggcaggatatagtcatgcagctcataatgacattccaatcaaccacagactgcatatacagcagtggtcctataagattataataccatatttttagcatatcttttctatgcttagatacacaaataccattgtattacagttgcctttggtattcagtacagtaacatgctgtacaggtttgtagcctaggagcaatagtttatattatatagcctaggtgtgtaggagcctataccatctaggtttgtgtaagtacactctatgatgttcagacaaggacaatattgcctgacaatgcatttctcagaatgtatacttatcattaagtaacatatgactgtatgtactagttcctgatgacttacttctctcaaattcataatgatttagtccttgtaaaaataaagattttgcctgtgcctaaacagggatactaggcagaactgttgagaaaaaaaagctgaattaaatttatgttgcagatttaaactatcataaaatgagcctcagttaatcacacacagtattcaggtgcctaggagtgcacaccggagaacagcctcatgctgtcaagctgcagaaacctttcatgcaaattcagatgaaaaggtctttacctcaagccagggtaacctgaatgaag

SEQ ID NO: 4379 - protein, 67 aa, Homo sapiens
MKSYLIKAFFLYFVSGSGDMDSISKNSPNNMSLSNQPGTPRDDGEMGGNFLNPFQSESYSPSMTMSV

SEQ ID NO: 4380 - DNA, 3447 bp, Homo sapiens
aataaaacaaaagaggcctactacattatatttaagaaaactgtataatgtggaaaaatagaaaaccataatttatcatttatattttctcaatgtaaaatatttagcctttcactctaggttttatattataaaaacatgtatgctcagagacttaattagaattagctaacagacatgaaatataaattttttaaatactgcacaatgttacatatatttatatggatatgcagtacagatatttttattataataaatcaaaaataaagtgagtaaaaacatttcatcagaagttgtgctggaagaagctggcttttagttcaaacaggagaattacattattctaattgtatactcttactctaatctttttctttcggaattaagccaggatagtccaccagctttcactaattattaagtaaaaagactatttttaaaatttgtatattggaaacttaaggaaataaaactgaaaagcaactgaatctgaattttaagagatattatatattacatatacacacatacacacacatagaattgcttgaagtaaaaaagtatcttttttaaaaagaaaaactttactataattttttaaatttctaataatccttttacctgaattattgaagtgattcctcatacctaatttatgacctcagaatgacaattttggggtcagaaaatgactgtgggtatttatttttagtaatgacaatttcaagtgttgcagcttatatagagagaggtatctgtatgcaaaccatctttgatcattactttgtgatgaattgggtatagactctaaagaaatattttaattaagtaatattttgtttcagattcaaccaactctggtgataacatgtatactttaatgaatgcagtacctcctggacctaacagacctaattttccaatgggtcctgggtcagatggtcccatgggtggattaggaggaatggagtcacatcacatgaatggctctttaggctcaggagatatggacagtatttccaagaattctcccaataatatgagcctgagtaatcaaccgggcactccaagggatgatggcgaaatggggggaaatttcttaaatccttttcagagtgagagttactcccctagcatgacaatgagcgtgtgatccattaccaagtctcctcatgaaaaccacagtgagtcagcccttcacagaactactacggaagaaaattattcatcacagtgtacagttaaacaaaggaatctcagtcacaccaaaccaacctttttatttcctgctctctcccctcttttgtgaagaaagcgggtccaaatgtgattcaaacaactgtacggagtggcatattagaattgccctaaactgaactgcaaataattatgtgtgtatgtatatgtgtgggaaagagaatgtactgtatatgtgtatgttatacagacatatacacatacatacattgacccacaggacattgtaaaatattatcacatgacatcttaagtagaaataagtagggacttttattccatcctttttttcacgtttacattttaattattacaagttgctcctgccccctccctgaactattttgtgctgtgtatatcactgctttatataagttattttttaaggtgaactcagatgttatggttttgtaaatgtctgcaatcatggataggaataaaatcgcttatttgagagctttcattaaattgcgtctgatgcaagttatcctgtgaatcacaaagtgtactgtctcaaaaaatagaagaaaatgtgtcttcgtctttatgttgaatcaaacaatttctcagttaccttcagtgaaaagtatttttttaatttttatttgagaaaaacacttcaaatcagtaaaagcttaactggggcctcacacagtatatttctgcaataactgctttaaacggagttcttgatttgtttgtcttagatgatacagaaatcattaaatagcccaaatcatttagaccatagcaataaagtgaccggggttgtcatatatttagcaacatcttttctctttaacatgatgaagcccaaaagtgataacaaaagcatttgcttgaatttgtcacttctcaccaggagtactagaggtaaatttttaataacatactaatgtgaaatggtatctggtttttattcagactttttgtgagcatattcttatagacactagaaataaatacatagaaggagactttgagcacaagggagaagagagttattagcactcctgaggcctctggaatgctgcttttctatccaggtatcttgcttgctaccagcagaattgactggtattggttctcactggccagggagcctctgctctgttcctggaatataaggcttttattcaggagcaaatcattgatagtaactttgctttatctagccattgacttcagcaggctaaaactacattgtgtaactgactgttcaaaaaagaataagtaaattttttttaatctaattcccttatggaaagcaccttgctctatggcactttccagatcttttgggattttgtgcttaattatacatacatacaccaaaatcacaatagaaagatatgaagactttaattttagactctgaaagataactgggtgatcctttgtgttaaaattgtgatacaaacaaccattgataaataccaactatgaatccaaactctagagactttgaaaagcattgtttaattgcaggtaagaggaatcttctctttcctttaggcttatagtctctaaagtgaaaatttggcaggatatagtcatgcagctcataatgacattccaatcaaccacagactgcatatacagcagtggtcctataagattataataccatatttttagcatatcttttctatgcttagatacacaaataccattgtattacagttgcctttggtattcagtacagtaacatgctgtacaggtttgtagcctaggagcaatagtttatattatatagcctaggtgtgtaggagcctataccatctaggtttgtgtaagtacactctatgatgttcagacaaggacaatattgcctgacaatgcatttctcagaatgtatacttatcattaagtaacatatgactgtatgtactagttcctgatgacttacttctctcaaattcataatgatttagtccttgtaaaaataaagattttgcctgtgcctaaacagggatactaggcagaactgttgagaaaaaaaagctgaattaaatttatgttgcagatttaaactatcataaaatgagcctcagttaatcacacacagtattcaggtgcctaggagtgcacaccggagaacagcctcatgctgtcaagctgcagaaacctttcatgcaaattcagatgaaaaggtctttacctcaagccagggtaacctgaatgaag

SEQ ID NO: 4381 - protein, 94 aa, Homo sapiens
MYTLMNAVPPGPNRPNFPMGPGSDGPMGGLGGMESHHMNGSLGSGDMDSISKNSPNNMSLSNQPGTPRDDGEMGGNFLNPFQSESYSPSMTMSV

SEQ ID NO: 4382 - DNA, 3080 bp, Homo sapiens
ttgttctttgaaattgagaacacttatttttatcattattactatttagtacacattagaattttccaaaaattcatgtcaatgtgaagtcaaattaataagttttatatgacctcctgagcttacaagtgaccttttaatcatcatcatcacattatgatcctagctacatctcaaagtcaacacagaggaaaatacgttacaccatttagagggaaacacctaacagagaaacaaggataaaatggtaacaagggaaatctttcccacagaaatgttcagaggtggtggctagctggaggggaaaaaaagaacgcataagaagaaaatcagtgagcatttcactctccatggaaatagtattttattaacatagtgaaaagcacacactgctttggacctgtgaacttagtgttcagtgttcatggtcctccaggaggtggagggccaccaggaacacccatcatgcctagtccagcagattcaaccaactctggtgataacatgtatactttaatgaatgcagtacctcctggacctaacagacctaattttccaatgggtcctgggtcagatggtcccatgggtggattaggaggaatggagtcacatcacatgaatggctctttaggctcaggagatatggacagtatttccaagaattctcccaataatatgagcctgagtaatcaaccgggcactccaagggatgatggcgaaatggggggaaatttcttaaatccttttcagagtgagagttactcccctagcatgacaatgagcgtgtgatccattaccaagtctcctcatgaaaaccacagtgagtcagcccttcacagaactactacggaagaaaattattcatcacagtgtacagttaaacaaaggaatctcagtcacaccaaaccaacctttttatttcctgctctctcccctcttttgtgaagaaagcgggtccaaatgtgattcaaacaactgtacggagtggcatattagaattgccctaaactgaactgcaaataattatgtgtgtatgtatatgtgtgggaaagagaatgtactgtatatgtgtatgttatacagacatatacacatacatacattgacccacaggacattgtaaaatattatcacatgacatcttaagtagaaataagtagggacttttattccatcctttttttcacgtttacattttaattattacaagttgctcctgccccctccctgaactattttgtgctgtgtatatcactgctttatataagttattttttaaggtgaactcagatgttatggttttgtaaatgtctgcaatcatggataggaataaaatcgcttatttgagagctttcattaaattgcgtctgatgcaagttatcctgtgaatcacaaagtgtactgtctcaaaaaatagaagaaaatgtgtcttcgtctttatgttgaatcaaacaatttctcagttaccttcagtgaaaagtatttttttaatttttatttgagaaaaacacttcaaatcagtaaaagcttaactggggcctcacacagtatatttctgcaataactgctttaaacggagttcttgatttgtttgtcttagatgatacagaaatcattaaatagcccaaatcatttagaccatagcaataaagtgaccggggttgtcatatatttagcaacatcttttctctttaacatgatgaagcccaaaagtgataacaaaagcatttgcttgaatttgtcacttctcaccaggagtactagaggtaaatttttaataacatactaatgtgaaatggtatctggtttttattcagactttttgtgagcatattcttatagacactagaaataaatacatagaaggagactttgagcacaagggagaagagagttattagcactcctgaggcctctggaatgctgcttttctatccaggtatcttgcttgctaccagcagaattgactggtattggttctcactggccagggagcctctgctctgttcctggaatataaggcttttattcaggagcaaatcattgatagtaactttgctttatctagccattgacttcagcaggctaaaactacattgtgtaactgactgttcaaaaaagaataagtaaattttttttaatctaattcccttatggaaagcaccttgctctatggcactttccagatcttttgggattttgtgcttaattatacatacatacaccaaaatcacaatagaaagatatgaagactttaattttagactctgaaagataactgggtgatcctttgtgttaaaattgtgatacaaacaaccattgataaataccaactatgaatccaaactctagagactttgaaaagcattgtttaattgcaggtaagaggaatcttctctttcctttaggcttatagtctctaaagtgaaaatttggcaggatatagtcatgcagctcataatgacattccaatcaaccacagactgcatatacagcagtggtcctataagattataataccatatttttagcatatcttttctatgcttagatacacaaataccattgtattacagttgcctttggtattcagtacagtaacatgctgtacaggtttgtagcctaggagcaatagtttatattatatagcctaggtgtgtaggagcctataccatctaggtttgtgtaagtacactctatgatgttcagacaaggacaatattgcctgacaatgcatttctcagaatgtatacttatcattaagtaacatatgactgtatgtactagttcctgatgacttacttctctcaaattcataatgatttagtccttgtaaaaataaagattttgcctgtgcctaaacagggatactaggcagaactgttgagaaaaaaaagctgaattaaatttatgttgcagatttaaactatcataaaatgagcctcagttaatcacacacagtattcaggtgcctaggagtgcacaccggagaacagcctcatgctgtcaagctgcagaaacctttcatgcaaattcagatgaaaaggtctttacctcaagccagggtaacctgaatgaag

SEQ ID NO: 4383 - protein, 107 aa, Homo sapiens
MPSPADSTNSGDNMYTLMNAVPPGPNRPNFPMGPGSDGPMGGLGGMESHHMNGSLGSGDMDSISKNSPNNMSLSNQPGTPRDDGEMGGNFLNPFQSESYSPSMTMSV

SEQ ID NO: 4384 - DNA, 2707 bp, Homo sapiens
ttttttagtgtattttgggatctctactgtgcagctccagagagacgtgaaacatgtgaacactcaagtgaagcaaaagccttccatgattacgtaagttaacatataattcaaccaactctggtgataacatgtatactttaatgaatgcagtacctcctggacctaacagacctaattttccaatgggtcctgggtcagatggtcccatgggtggattaggaggaatggagtcacatcacatgaatggctctttaggctcaggagatatggacagtatttccaagaattctcccaataatatgagcctgagtaatcaaccgggcactccaagggatgatggcgaaatggggggaaatttcttaaatccttttcagagtgagagttactcccctagcatgacaatgagcgtgtgatccattaccaagtctcctcatgaaaaccacagtgagtcagcccttcacagaactactacggaagaaaattattcatcacagtgtacagttaaacaaaggaatctcagtcacaccaaaccaacctttttatttcctgctctctcccctcttttgtgaagaaagcgggtccaaatgtgattcaaacaactgtacggagtggcatattagaattgccctaaactgaactgcaaataattatgtgtgtatgtatatgtgtgggaaagagaatgtactgtatatgtgtatgttatacagacatatacacatacatacattgacccacaggacattgtaaaatattatcacatgacatcttaagtagaaataagtagggacttttattccatcctttttttcacgtttacattttaattattacaagttgctcctgccccctccctgaactattttgtgctgtgtatatcactgctttatataagttattttttaaggtgaactcagatgttatggttttgtaaatgtctgcaatcatggataggaataaaatcgcttatttgagagctttcattaaattgcgtctgatgcaagttatcctgtgaatcacaaagtgtactgtctcaaaaaatagaagaaaatgtgtcttcgtctttatgttgaatcaaacaatttctcagttaccttcagtgaaaagtatttttttaatttttatttgagaaaaacacttcaaatcagtaaaagcttaactggggcctcacacagtatatttctgcaataactgctttaaacggagttcttgatttgtttgtcttagatgatacagaaatcattaaatagcccaaatcatttagaccatagcaataaagtgaccggggttgtcatatatttagcaacatcttttctctttaacatgatgaagcccaaaagtgataacaaaagcatttgcttgaatttgtcacttctcaccaggagtactagaggtaaatttttaataacatactaatgtgaaatggtatctggtttttattcagactttttgtgagcatattcttatagacactagaaataaatacatagaaggagactttgagcacaagggagaagagagttattagcactcctgaggcctctggaatgctgcttttctatccaggtatcttgcttgctaccagcagaattgactggtattggttctcactggccagggagcctctgctctgttcctggaatataaggcttttattcaggagcaaatcattgatagtaactttgctttatctagccattgacttcagcaggctaaaactacattgtgtaactgactgttcaaaaaagaataagtaaattttttttaatctaattcccttatggaaagcaccttgctctatggcactttccagatcttttgggattttgtgcttaattatacatacatacaccaaaatcacaatagaaagatatgaagactttaattttagactctgaaagataactgggtgatcctttgtgttaaaattgtgatacaaacaaccattgataaataccaactatgaatccaaactctagagactttgaaaagcattgtttaattgcaggtaagaggaatcttctctttcctttaggcttatagtctctaaagtgaaaatttggcaggatatagtcatgcagctcataatgacattccaatcaaccacagactgcatatacagcagtggtcctataagattataataccatatttttagcatatcttttctatgcttagatacacaaataccattgtattacagttgcctttggtattcagtacagtaacatgctgtacaggtttgtagcctaggagcaatagtttatattatatagcctaggtgtgtaggagcctataccatctaggtttgtgtaagtacactctatgatgttcagacaaggacaatattgcctgacaatgcatttctcagaatgtatacttatcattaagtaacatatgactgtatgtactagttcctgatgacttacttctctcaaattcataatgatttagtccttgtaaaaataaagattttgcctgtgcctaaacagggatactaggcagaactgttgagaaaaaaaagctgaattaaatttatgttgcagatttaaactatcataaaatgagcctcagttaatcacacacagtattcaggtgcctaggagtgcacaccggagaacagcctcatgctgtcaagctgcagaaacctttcatgcaaattcagatgaaaaggtctttacctcaagccagggtaacctgaatgaag

SEQ ID NO: 4385 - protein, 94 aa, Homo sapiens; identical to SEQ ID NO: 4381

SEQ ID NO: 4386 - DNA, 3593 bp, Homo sapiens
gctgaggcttagccgccaccgcgcgcttcggaaggccagagggagggggaggcctgtcagtctcgcgcgttgcctgggcgaagggggcggagctttggcgtggggcggccaatagtgggggtggctgcgtgggtcgccatggggacggggctgttcccggggaggctgtgatgggttgacaggtgcgtgacagtgggagctgctctcggcacaagcatgtacggcaaaggcaagagtaacagcagcgccgtcccgtccgacagccaggcccgggagaagttagcactctacgtatatgaatatctgctccatgtaggagctcagaaatcagctcaaacatttttatcagagataagatgggaaaaaaacatcacattgggggaaccaccaggattcttacattcttggtggtgtgtattttgggatctctactgtgcagctccagagagacgtgaaacatgtgaacactcaagtgaagcaaaagccttccatgattacagtgctgcagcagctcccagtccagtgctaggaaacattcccccaggagatggcatgccagtaggtcctgtaccaccagggttctttcagccttttatgtcacctcggtaccctggaggtccaaggcccccattgaggatacctaatcaggcacttggaggtgtcccaggaagtcagccattactccccagtggaatggatccaactcgacaacaaggacatccaaatatgggtgggccaatgcagagaatgactcctccaagaggaatggtgcccttaggaccacagaactatggaggtgcaatgagacccccactgaatgctttaggtggccctggaatgcctggaatgaacatgggtccaggtggtggtagaccttggccaaacccaacaaatgccaattcaataccatactcctcagcatctcctgggaattatgtaggtcctccaggaggtggagggccaccaggaacacccatcatgcctagtccagcagattcaaccaactctggtgataacatgtatactttaatgaatgcagtacctcctggacctaacagacctaattttccaatgggtcctgggtcagatggtcccatgggtggattaggaggaatggagtcacatcacatgaatggctctttaggctcaggagatatggacagtatttccaagaattctcccaataatatgagcctgagtaatcaaccgggcactccaagggatgatggcgaaatggggggaaatttcttaaatccttttcagagtgagagttactcccctagcatgacaatgagcgtgtgatccattaccaagtctcctcatgaaaaccacagtgagtcagcccttcacagaactactacggaagaaaattattcatcacagtgtacagttaaacaaaggaatctcagtcacaccaaaccaacctttttatttcctgctctctcccctcttttgtgaagaaagcgggtccaaatgtgattcaaacaactgtacggagtggcatattagaattgccctaaactgaactgcaaataattatgtgtgtatgtatatgtgtgggaaagagaatgtactgtatatgtgtatgttatacagacatatacacatacatacattgacccacaggacattgtaaaatattatcacatgacatcttaagtagaaataagtagggacttttattccatcctttttttcacgtttacattttaattattacaagttgctcctgccccctccctgaactattttgtgctgtgtatatcactgctttatataagttattttttaaggtgaactcagatgttatggttttgtaaatgtctgcaatcatggataggaataaaatcgcttatttgagagctttcattaaattgcgtctgatgcaagttatcctgtgaatcacaaagtgtactgtctcaaaaaatagaagaaaatgtgtcttcgtctttatgttgaatcaaacaatttctcagttaccttcagtgaaaagtatttttttaatttttatttgagaaaaacacttcaaatcagtaaaagcttaactggggcctcacacagtatatttctgcaataactgctttaaacggagttcttgatttgtttgtcttagatgatacagaaatcattaaatagcccaaatcatttagaccatagcaataaagtgaccggggttgtcatatatttagcaacatcttttctctttaacatgatgaagcccaaaagtgataacaaaagcatttgcttgaatttgtcacttctcaccaggagtactagaggtaaatttttaataacatactaatgtgaaatggtatctggtttttattcagactttttgtgagcatattcttatagacactagaaataaatacatagaaggagactttgagcacaagggagaagagagttattagcactcctgaggcctctggaatgctgcttttctatccaggtatcttgcttgctaccagcagaattgactggtattggttctcactggccagggagcctctgctctgttcctggaatataaggcttttattcaggagcaaatcattgatagtaactttgctttatctagccattgacttcagcaggctaaaactacattgtgtaactgactgttcaaaaaagaataagtaaattttttttaatctaattcccttatggaaagcaccttgctctatggcactttccagatcttttgggattttgtgcttaattatacatacatacaccaaaatcacaatagaaagatatgaagactttaattttagactctgaaagataactgggtgatcctttgtgttaaaattgtgatacaaacaaccattgataaataccaactatgaatccaaactctagagactttgaaaagcattgtttaattgcaggtaagaggaatcttctctttcctttaggcttatagtctctaaagtgaaaatttggcaggatatagtcatgcagctcataatgacattccaatcaaccacagactgcatatacagcagtggtcctataagattataataccatatttttagcatatcttttctatgcttagatacacaaataccattgtattacagttgcctttggtattcagtacagtaacatgctgtacaggtttgtagcctaggagcaatagtttatattatatagcctaggtgtgtaggagcctataccatctaggtttgtgtaagtacactctatgatgttcagacaaggacaatattgcctgacaatgcatttctcagaatgtatacttatcattaagtaacatatgactgtatgtactagttcctgatgacttacttctctcaaattcataatgatttagtccttgtaaaaataaagattttgcctgtgcctaaacagggatactaggcagaactgttgagaaaaaaaagctgaattaaatttatgttgcagatttaaactatcataaaatgagcctcagttaatcacacacagtattcaggtgcctaggagtgcacaccggagaacagcctcatgctgtcaagctgcagaaacctttcatgcaaattcagatgaaaaggtctttacctcaagccagggtaacctgaatgaag

SEQ ID NO: 4387 - protein, 361 aa, Homo sapiens; identical to SEQ ID NO: 533

SEQ ID NO: 4388 - DNA, 1115 bp, Homo sapiens
caaaaaatatatgtagatatctctatatatgttatatatacatttttaaatttttaattgggtagggtatataaaatggtctttctaaaatttcacatttaggaatctatgataacaacagttttcttcatgcttccataaaaaaaaaacgattgggaactaaggatagaactccttgcattttccatcagatggtactgattcactatactgtataaaagaagaggaattttttcagatttaaaaactcaggagctatatgctggaaaatacatatagtatacttcacttatttaaattaaaggagtgtttaatttataaatgaaatcttacctaataaaggctttctttttatattttgtttcaggctcaggagatatggacagtatttccaagaattctcccaataatatgagcctgagtaatcaaccgggcactccaagggatgatggcgaaatggggggaaatttcttaaatccttttcagagtgagagttactcccctagcatgacaatgagcgtgtgatccattaccaagtctcctcatgaaaaccacagtgagtcagcccttcacagaactactacggaagaaaattattcatcacagtgtacagttaaacaaaggaatctcagtcacaccaaaccaacctttttatttcctgctctctcccctcttttgtgaagaaagcgggtccaaatgtgattcaaacaactgtacggagtggcatattagaattgccctaaactgaactgcaaataattatgtgtgtatgtatatgtgtgggaaagagaatgtactgtatatgtgtatgttatacagacatatacacatacatacattgacccacaggacattgtaaaatattatcacatgacatcttaagtagaaataagtagggacttttattccatcctttttttcacgtttacattttaattattacaagttgctcctgccccctccctgaactattttgtgctgtgtatatcactgctttatataagttattttttaaggtgaactcagatgttatggttttgtaaatgtctgcaatcatggataggaataaaatcgcttatttgagagctttcattaaattgcgtctgatgcaagtt

SEQ ID NO: 4389 - protein, 67 aa, Homo sapiens; identical to SEQ ID NO: 4379

SEQ ID NO: 4390 - DNA, 1746 bp, Homo sapiens
aataaaacaaaagaggcctactacattatatttaagaaaactgtataatgtggaaaaatagaaaaccataatttatcatttatattttctcaatgtaaaatatttagcctttcactctaggttttatattataaaaacatgtatgctcagagacttaattagaattagctaacagacatgaaatataaattttttaaatactgcacaatgttacatatatttatatggatatgcagtacagatatttttattataataaatcaaaaataaagtgagtaaaaacatttcatcagaagttgtgctggaagaagctggcttttagttcaaacaggagaattacattattctaattgtatactcttactctaatctttttctttcggaattaagccaggatagtccaccagctttcactaattattaagtaaaaagactatttttaaaatttgtatattggaaacttaaggaaataaaactgaaaagcaactgaatctgaattttaagagatattatatattacatatacacacatacacacacatagaattgcttgaagtaaaaaagtatcttttttaaaaagaaaaactttactataattttttaaatttctaataatccttttacctgaattattgaagtgattcctcatacctaatttatgacctcagaatgacaattttggggtcagaaaatgactgtgggtatttatttttagtaatgacaatttcaagtgttgcagcttatatagagagaggtatctgtatgcaaaccatctttgatcattactttgtgatgaattgggtatagactctaaagaaatattttaattaagtaatattttgtttcagattcaaccaactctggtgataacatgtatactttaatgaatgcagtacctcctggacctaacagacctaattttccaatgggtcctgggtcagatggtcccatgggtggattaggaggaatggagtcacatcacatgaatggctctttaggctcaggagatatggacagtatttccaagaattctcccaataatatgagcctgagtaatcaaccgggcactccaagggatgatggcgaaatggggggaaatttcttaaatccttttcagagtgagagttactcccctagcatgacaatgagcgtgtgatccattaccaagtctcctcatgaaaaccacagtgagtcagcccttcacagaactactacggaagaaaattattcatcacagtgtacagttaaacaaaggaatctcagtcacaccaaaccaacctttttatttcctgctctctcccctcttttgtgaagaaagcgggtccaaatgtgattcaaacaactgtacggagtggcatattagaattgccctaaactgaactgcaaataattatgtgtgtatgtatatgtgtgggaaagagaatgtactgtatatgtgtatgttatacagacatatacacatacatacattgacccacaggacattgtaaaatattatcacatgacatcttaagtagaaataagtagggacttttattccatcctttttttcacgtttacattttaattattacaagttgctcctgccccctccctgaactattttgtgctgtgtatatcactgctttatataagttattttttaaggtgaactcagatgttatggttttgtaaatgtctgcaatcatggataggaataaaatcgcttatttgagagctttcattaaattgcgtctgatgcaagtt

SEQ ID NO: 4391 - protein, 94 aa, Homo sapiens; identical to SEQ ID NO: 4381

SEQ ID NO: 4392 - DNA, 1379 bp, Homo sapiens
ttgttctttgaaattgagaacacttatttttatcattattactatttagtacacattagaattttccaaaaattcatgtcaatgtgaagtcaaattaataagttttatatgacctcctgagcttacaagtgaccttttaatcatcatcatcacattatgatcctagctacatctcaaagtcaacacagaggaaaatacgttacaccatttagagggaaacacctaacagagaaacaaggataaaatggtaacaagggaaatctttcccacagaaatgttcagaggtggtggctagctggaggggaaaaaaagaacgcataagaagaaaatcagtgagcatttcactctccatggaaatagtattttattaacatagtgaaaagcacacactgctttggacctgtgaacttagtgttcagtgttcatggtcctccaggaggtggagggccaccaggaacacccatcatgcctagtccagcagattcaaccaactctggtgataacatgtatactttaatgaatgcagtacctcctggacctaacagacctaattttccaatgggtcctgggtcagatggtcccatgggtggattaggaggaatggagtcacatcacatgaatggctctttaggctcaggagatatggacagtatttccaagaattctcccaataatatgagcctgagtaatcaaccgggcactccaagggatgatggcgaaatggggggaaatttcttaaatccttttcagagtgagagttactcccctagcatgacaatgagcgtgtgatccattaccaagtctcctcatgaaaaccacagtgagtcagcccttcacagaactactacggaagaaaattattcatcacagtgtacagttaaacaaaggaatctcagtcacaccaaaccaacctttttatttcctgctctctcccctcttttgtgaagaaagcgggtccaaatgtgattcaaacaactgtacggagtggcatattagaattgccctaaactgaactgcaaataattatgtgtgtatgtatatgtgtgggaaagagaatgtactgtatatgtgtatgttatacagacatatacacatacatacattgacccacaggacattgtaaaatattatcacatgacatcttaagtagaaataagtagggacttttattccatcctttttttcacgtttacattttaattattacaagttgctcctgccccctccctgaactattttgtgctgtgtatatcactgctttatataagttattttttaaggtgaactcagatgttatggttttgtaaatgtctgcaatcatggataggaataaaatcgcttatttgagagctttcattaaattgcgtctgatgcaagtt

SEQ ID NO: 4393 - protein, 107 aa, Homo sapiens; identical to SEQ ID NO: 4383

SEQ ID NO: 4394 - DNA, 1006 bp, Homo sapiens
ttttttagtgtattttgggatctctactgtgcagctccagagagacgtgaaacatgtgaacactcaagtgaagcaaaagccttccatgattacgtaagttaacatataattcaaccaactctggtgataacatgtatactttaatgaatgcagtacctcctggacctaacagacctaattttccaatgggtcctgggtcagatggtcccatgggtggattaggaggaatggagtcacatcacatgaatggctctttaggctcaggagatatggacagtatttccaagaattctcccaataatatgagcctgagtaatcaaccgggcactccaagggatgatggcgaaatggggggaaatttcttaaatccttttcagagtgagagttactcccctagcatgacaatgagcgtgtgatccattaccaagtctcctcatgaaaaccacagtgagtcagcccttcacagaactactacggaagaaaattattcatcacagtgtacagttaaacaaaggaatctcagtcacaccaaaccaacctttttatttcctgctctctcccctcttttgtgaagaaagcgggtccaaatgtgattcaaacaactgtacggagtggcatattagaattgccctaaactgaactgcaaataattatgtgtgtatgtatatgtgtgggaaagagaatgtactgtatatgtgtatgttatacagacatatacacatacatacattgacccacaggacattgtaaaatattatcacatgacatcttaagtagaaataagtagggacttttattccatcctttttttcacgtttacattttaattattacaagttgctcctgccccctccctgaactattttgtgctgtgtatatcactgctttatataagttattttttaaggtgaactcagatgttatggttttgtaaatgtctgcaatcatggataggaataaaatcgcttatttgagagctttcattaaattgcgtctgatgcaagtt

SEQ ID NO: 4395 - protein, 94 aa, Homo sapiens; identical to SEQ ID NO: 4381

SEQ ID NO: 4396 - DNA, 1892 bp, Homo sapiens
gctgaggcttagccgccaccgcgcgcttcggaaggccagagggagggggaggcctgtcagtctcgcgcgttgcctgggcgaagggggcggagctttggcgtggggcggccaatagtgggggtggctgcgtgggtcgccatggggacggggctgttcccggggaggctgtgatgggttgacaggtgcgtgacagtgggagctgctctcggcacaagcatgtacggcaaaggcaagagtaacagcagcgccgtcccgtccgacagccaggcccgggagaagttagcactctacgtatatgaatatctgctccatgtaggagctcagaaatcagctcaaacatttttatcagagataagatgggaaaaaaacatcacattgggggaaccaccaggattcttacattcttggtggtgtgtattttgggatctctactgtgcagctccagagagacgtgaaacatgtgaacactcaagtgaagcaaaagccttccatgattacagtgctgcagcagctcccagtccagtgctaggaaacattcccccaggagatggcatgccagtaggtcctgtaccaccagggttctttcagccttttatgtcacctcggtaccctggaggtccaaggcccccattgaggatacctaatcaggcacttggaggtgtcccaggaagtcagccattactccccagtggaatggatccaactcgacaacaaggacatccaaatatgggtgggccaatgcagagaatgactcctccaagaggaatggtgcccttaggaccacagaactatggaggtgcaatgagacccccactgaatgctttaggtggccctggaatgcctggaatgaacatgggtccaggtggtggtagaccttggccaaacccaacaaatgccaattcaataccatactcctcagcatctcctgggaattatgtaggtcctccaggaggtggagggccaccaggaacacccatcatgcctagtccagcagattcaaccaactctggtgataacatgtatactttaatgaatgcagtacctcctggacctaacagacctaattttccaatgggtcctgggtcagatggtcccatgggtggattaggaggaatggagtcacatcacatgaatggctctttaggctcaggagatatggacagtatttccaagaattctcccaataatatgagcctgagtaatcaaccgggcactccaagggatgatggcgaaatggggggaaatttcttaaatccttttcagagtgagagttactcccctagcatgacaatgagcgtgtgatccattaccaagtctcctcatgaaaaccacagtgagtcagcccttcacagaactactacggaagaaaattattcatcacagtgtacagttaaacaaaggaatctcagtcacaccaaaccaacctttttatttcctgctctctcccctcttttgtgaagaaagcgggtccaaatgtgattcaaacaactgtacggagtggcatattagaattgccctaaactgaactgcaaataattatgtgtgtatgtatatgtgtgggaaagagaatgtactgtatatgtgtatgttatacagacatatacacatacatacattgacccacaggacattgtaaaatattatcacatgacatcttaagtagaaataagtagggacttttattccatcctttttttcacgtttacattttaattattacaagttgctcctgccccctccctgaactattttgtgctgtgtatatcactgctttatataagttattttttaaggtgaactcagatgttatggttttgtaaatgtctgcaatcatggataggaataaaatcgcttatttgagagctttcattaaattgcgtctgatgcaagtt

SEQ ID NO: 4397 - protein, 361 aa, Homo sapiens; identical to SEQ ID NO: 533

SEQ ID NO: 4398 - DNA, 1802 bp, Homo sapiens
gctgaggcttagccgccaccgcgcgcttcggaaggccagagggagggggaggcctgtcagtctcgcgcgttgcctgggcgaagggggcggagctttggcgtggggcggccaatagtgggggtggctgcgtgggtcgccatggggacggggctgttcccggggaggctgtgatgggttgacaggtgcgtgacagtgggagctgctctcggcacaagcatgtacggcaaaggcaagagtaacagcagcgccgtcccgtccgacagccaggcccgggagaagttagcactctacgtatatgaatatctgctccatgtaggagctcagaaatcagctcaaacatttttatcagagataagatgggaaaaaaacatcacattgggggaaccaccaggattcttacattcttggtggtgtgtattttgggatctctactgtgcagctccagagagacgtgaaacatgtgaacactcaagtgaagcaaaagccttccatgattacccttttatgtcacctcggtaccctggaggtccaaggcccccattgaggatacctaatcaggcacttggaggtgtcccaggaagtcagccattactccccagtggaatggatccaactcgacaacaaggacatccaaatatgggtgggccaatgcagagaatgactcctccaagaggaatggtgcccttaggaccacagaactatggaggtgcaatgagacccccactgaatgctttaggtggccctggaatgcctggaatgaacatgggtccaggtggtggtagaccttggccaaacccaacaaatgccaattcaataccatactcctcagcatctcctgggaattatgtaggtcctccaggaggtggagggccaccaggaacacccatcatgcctagtccagcagattcaaccaactctggtgataacatgtatactttaatgaatgcagtacctcctggacctaacagacctaattttccaatgggtcctgggtcagatggtcccatgggtggattaggaggaatggagtcacatcacatgaatggctctttaggctcaggagatatggacagtatttccaagaattctcccaataatatgagcctgagtaatcaaccgggcactccaagggatgatggcgaaatggggggaaatttcttaaatccttttcagagtgagagttactcccctagcatgacaatgagcgtgtgatccattaccaagtctcctcatgaaaaccacagtgagtcagcccttcacagaactactacggaagaaaattattcatcacagtgtacagttaaacaaaggaatctcagtcacaccaaaccaacctttttatttcctgctctctcccctcttttgtgaagaaagcgggtccaaatgtgattcaaacaactgtacggagtggcatattagaattgccctaaactgaactgcaaataattatgtgtgtatgtatatgtgtgggaaagagaatgtactgtatatgtgtatgttatacagacatatacacatacatacattgacccacaggacattgtaaaatattatcacatgacatcttaagtagaaataagtagggacttttattccatcctttttttcacgtttacattttaattattacaagttgctcctgccccctccctgaactattttgtgctgtgtatatcactgctttatataagttattttttaaggtgaactcagatgttatggttttgtaaatgtctgcaatcatggataggaataaaatcgcttatttgagagctttcattaaattgcgtctgatgcaagtt

SEQ ID NO: 4399 - protein, 331 aa, Homo sapiens
MYGKGKSNSSAVPSDSQAREKLALYVYEYLLHVGAQKSAQTFLSEIRWEKNITLGEPPGFLHSWWCVFWDLYCAAPERRETCEHSSEAKAFHDYPFMSPRYPGGPRPPLRIPNQALGGVPGSQPLLPSGMDPTRQQGHPNMGGPMQRMTPPRGMVPLGPQNYGGAMRPPLNALGGPGMPGMNMGPGGGRPWPNPTNANSIPYSSASPGNYVGPPGGGGPPGTPIMPSPADSTNSGDNMYTLMNAVPPGPNRPNFPMGPGSDGPMGGLGGMESHHMNGSLGSGDMDSISKNSPNNMSLSNQPGTPRDDGEMGGNFLNPFQSESYSPSMTMSV

SEQ ID NO: 4400 - DNA, 909 bp, Homo sapiens
gaggaagagaaggaggaggaggaggaggaggagaaagtggctctcagcggccggtcggattaaaagtaaccagactcgtccagaaaactgcgtccaggaaggaagtgacagaagacgaatgggaaaaggagaacagctcacagcgtttgaaacatcgcggcaccactttcagataaaaacatagacctgaatggcatcatccagtatccaaggaaaccatgcttgcttgaagagtgagcaggtgagcaaagagacaagattacatgtttaaaccaagaaaagaatcttgaaaaagcattgaaaagaacaactttcaagtcaaaagaatcaaggtgaagagaatggatactcatgcccatgtgaatttgctgccccaagtctactggaggatcaagctgcaggtttcaatagctatagcctgaagaatctctgtaatgaactaaaacaatcagtaaaagatcagttgcagtggaagacattatactctagatttttctagtattattaaatttgaaaatgatttattccaaattttaacttagcttttaattttactagtgtcaaaatgttgtactactttggacaactgatttttccaatagagagtcaatagcatctttgcagggtggtttaaaagccaataatttaatccatattctactaaaacttttaatataagcattttacccagatgtattttttccttgttttagaaaatctgattttaattgctaaaactcgtttttaaatattaattcaatgaaagaaatgctatggttttctactttttcatttcttaaactcaagggaaaacatgggtgaaaaacaaaaaattgttctgcatagagtcttctttaatgtctcactttggtgatgtatgaaataaaaaccaaattgttttaaccagct

SEQ ID NO: 4401 - protein, 57 aa, Homo sapiens
GREGGGGGGGESGSQRPVGLKVTRLVQKTASRKEVTEDEWEKENSSQRLKHRGTTFR

SEQ ID NO: 4402 - DNA, 729 bp, Homo sapiens
aggaaggaagtgacagaagacgaatgggaaaaggagaacagctcacagcgtttgaaacatcgcggcaccactttcagataaaaacatagacctgaatggcatcatccagtatccaaggaaaccatgcagttttgaacatctggaggcctgatttattggagattgcaaatgtacagtgtaacatagctgtggagagcgagaagatcaggattgtcaatgctgtcattgcttttactggaatccccagcacgaattgaaggtttgaccagagacaaagaagcaaatgctatcaattaacattcacatgtggtaggaattctactagtgcatgtggagagaaacatggctgctgcatggagtcataaacctcagaggaagctgagaatgagatgaaatgtatatgtaacccttgtgtatggcaagtttggcaagaaagaaaaagcatacttggcagattaagataaggtttctctctgtttactgatatagtctcaggtttgcattgtgtgatgaataataggttgggggaagatatcctttgtttattcattcatttcatcaacaaatatttaatgagtacctactatatgccatgccacaaagagtataaacctagagacagaatgttgagtcacatagacagtgctcctgatacaattatttgaactgagttaacaatacttcaaggttccatgtctaatttactggctaggttctcaacaaaatttc

SEQ ID NO: 4403 - protein, 53 aa, Homo sapiens
MASSSIQGNHAVLNIWRPDLLEIANVQCNIAVESEKIRIVNAVIAFTGIPSTN

SEQ ID NO: 4404 - DNA, 1754 bp, Homo sapiens
ctgctctcatcacctatatactcttctctctgcccgtctctgcttccccccccttccccccccccttttctcccggccgacggagctgaaggggcgggggttccttccttggagtgtttctagagctcggaggctgctggtaggggggcaccactttcagataaaaacatagacctgaatggcatcatccagtatccaaggaaaccattgtgtctgtaaccagctaatgagctgcaacagagcctggccttcattttcagcaaattaagttcatccctcataggaattgtggtctggctgtggcaccgctcctaggttctctaaacatgaatatgcctttgggggaagacagaagaacatggaagccatgtgaaaaaaacggatcctaaggtataaacaaagtgcagatgattgtcggccatgctgcagggatttcttgtttgtcttctcagtagtgttagctaattttgtcttccaatccgcaattccttataggacttggacgctttgaacctctcaggacccctcagattctagtacataaactcggagccaaattcacagccagctctccttcaaactgccttatctgtttttgagttaattagaagggccttttaacaactttgcatttgagtcctaagaaaagtctagttcattaggcaataaagccactgtgctggcccctaatcaaggtcagtacatatcattatacgactgatccaaatttgagttggttcagttatttcatttgttcattgtccacaatgttccagtcacagtaccaggtgctcagagtgtggtgttagagacaagattcaaagtaagtaattttagaccaatgtcatatgcgccattatagaagtacggctgaaaatggaatttatataaataagcatgtgagtggttcactaaacagggatgggcaagaaagaccttacagaagagatgaatatcttagcgaataacttagcaggatttcaaagaatggacgagagttttgcaggcagatgagataggaagggtgccagagagaaaggaaagcatgggcaagggctcaggaggtggggaaaaatgtgatatagtttgaggtactggagtatgaagttaacaaggggagaatatttagaaggaaggatggagaagtaggcagagagcagattatcaggttaaaatattagaaattagtattgaagtttactagaagccagcagcacgttcaatgcaagcaggtgccatggtcatattagttttagtttagtaatcagtgtagaaggtggatgagagggggtgagtctggaggcaataagcatagttggtagtagcagtctaggtgtcacctgacaggggcctttactagcccagtggtggacatttttaatgcattagtctttcttctagtctgtgaatttcttataacgagggtgtggtcttcctcacacttgtttcttcacacttgttgcctactatcatacctgacatgcagtaaattaccatagcaagacaaaaaatctcttaaacgtgtactctttattactctgttggaccatgatgagagcaacttattgtatggctatttaaaattatttatgaagataatattttttgtgttggaaatgctacaataatttaattgtgagatttataactaagacttattgttcacatttgttttatgttttcatatatgtgatgaaatagacaatttactctgtaagtcttaaatataaaaatgattcattatttctttctga

SEQ ID NO: 4405 - protein, 39 aa, Homo sapiens
MRHYRSTAENGIYINKHVSGSLNRDGQERPYRRDEYLSE

SEQ ID NO: 4406 - DNA, 713 bp, Homo sapiens
gtcttggcccttcatagagtattaatagtatgaatgagggagggtgacccagtgataaggagtaaggctgtgaaatcttaaccacaagagaatagagcatgaaacaaaagcaacatgaccctgccctcaccaagactacagggagtgatggagcatacaactttgtttcagaatgcaattcagatcttccctttcgcttggcttcttaaaacttcttttgaggatggtaaaatttcgtgttatattaaatttcatcctgtaactgatactctgggatgatgttggccaataactagcaagactttaaataatcaactagtttaggcattgcttagcacgctccagctgacttcacaagtaaaaccatgtgaagaaagaaggttttcaggtaacacagatggaggtgatgatctttctcattttgtggaaaatattaatttctcattttttattcactgacaattagtaaaattccttactctacctaatatgtagacttctgaactatgtaagtaaaactttatagtaactgaaaagtttgggtattgtattttcttggagaaaatgttagcttccctctgttacttttaaatgttaaacttttaatgaatttcatcaatgtataataatgggcataatgatccactctgaaatatttactgtcattttgaatttattcttgagtcatcacaaacgtgtacatctcttatacc

SEQ ID NO: 4407 - protein, 54 aa, Homo sapiens
MTLPSPRLQGVMEHTTLFQNAIQIFPFAWLLKTSFEDGKISCYIKFHPVTDTLG

SEQ ID NO: 4408 - DNA, 4816 bp, Homo sapiens
gtggcgatgcgcataccgagaggataaggaagcggttcccgacgagcctcctcggggcttatggggcccctggcggttcggcctcggaggctagcggggctgcccgatttggcactggaaacaatggtggctcggggctggaggcaatggcgcgagtgctggggggcaggggcgactaggggagtttcggtttctcgggcctagcgccgcggagccttgctgcgggccccagtggtagcacccccgggaaccgcaggtgttgatttaaggctcggaacaggcgggccttctgcccacatcctgcggcgcccgcgacccgggccgggcgatccggcgccgggttttgttatccgcccgcacctagaggccgcaaggcagccgccagccccgggactggaccccagggcgccctcggccctgcgaggtccccgccctctcttccgtctcctcctcaccgccctcctgaggcactctgatgcgggcgggcatctctgccgaaaacacctacagcgcccgctccctcggtccttcgagcagtgatccctccgcggccaacctccccagggaaaccagcgattcgcggttcagatagcgaccttcgcccgcaggttcctgctctgccttcagacttcggcttcagtggcacctgctcagcgaggcctcgtctaaccaagccatccgaattaactacccactcactcgccatcacatcaccccgatttaattcgcagcggggcactgactttacactcgtgtgtcttctgtgtttatttatggtctgtttctggaatgtccgctcctgggactgggaccatgattttctggcgcagtgcgggtgtctcggcgtccgggatcgggcgggtcgcagtagggctccacatttgttgagtgactgaacaccgttcccggccggggagagcgccgcagccgggtccacttcaggtaggggctgggctttcccggccccgcctaggccccgcccccagcgcgaacccgctcccacctcgcctgtccacggagcagcagggggtttgactgtgcttttccctcttgcttccctcgctctttctgcagctgccacgaaaacccggaacggcggagcggcgccgcccctcgcggcacctccctggcagcccttggaggccgcgctgggcatgctcagtcagctgggccgcctcagctctcggagtaggaagctcgggcgctccggctgtaaggagccgcggcggggggaaaatggagcccttcaccaatgatcggcttcagctccccaggaatatgattgaaaacagcatgtttgaggaagaaccagatgtggtggatttagccaaagagccttgtttacatcctctagagcctgatgaggtggaatatgagccccggggttcccgactgctggtgcggggtcttggtgagcatgagatggaggaggatgaagaggattatgagtcatcagcaaagctgctgggcatgtccttcatgaatagaagctcaggccttcggaacagtgcaactggttacaggcagagcccagatggggcttgttcagtaccctctgcaaggaccatggtggtctgtgcttttgtcatcgtggttgctgtttctgtaatcatggtgatttacttactgcccagatgtacctttaccaaagaaggctgccataaaaaaaaccagtcaattggactaattcagccatttgcaacaaatgggaaattgtttccatgggcacagatcaggcttcccactgccgttgtgccactacgctatgaactcagcctacacccgaacctaacctcgatgacattcaggggttctgtgacaatttcagttcaggctcttcaggtcacatggaatatcattcttcatagcacaggtcataatatttcaagagtgacctttatgtcagcagtttcaagccaagaaaaacaagctgagatcctggaatatgcatatcatggacagatcgccattgttgcccccgaagcccttctagcagggcacaattatacgttgaagatagagtactcggcaaatatatctagttcttattatgggttttatggcttctcctacacagatgaaagtaatgagaaaaagtactttgcagcaactcagtttgaacccctggcagcaagatctgcttttccttgttttgatgaaccagcatttaaagccacttttatcatcaagatcataagggatgagcaatacaccgctttatcaaatatgcctaagaagtcatcagtcgttctagatgatggacttgttcaggatgagttttctgagagtgtgaagatgagcacttacttggttgctttcattgtgggagagatgaagaacctgagtcaggacgtaaatggaaccctggtttctatatatgctgtaccagaaaagattggtcaagttcattatgccttggaaacaactgtgaagcttcttgagttttttcaaaactactttgaaattcagtacccacttaagaaattggatttggtggctattcctgactttgaagcaggagcaatggaaaattggggtttgctcaccttccgagaggagacacttctgtatgacagtaacacttcttcaatggcggatagaaagctggtgactaaaatcattgctcatgagctggcccaccagtggtttggcaatctggtaacaatgaagtggtggaatgacctatggctaaatgaaggttttgccactttcatggagtatttctctttggaaaaaatattcaaagagctttctagttatgaagatttcttagatgctcgatttaaaaccatgaagaaagattccttaaattcatctcatccaatatcatcatctgttcagtcttcagaacaaattgaagaaatgtttgattctctttcctattttaagggatcttctctcttgttgatgttgaaaacttaccttagtgaagatgtgtttcaacatgctgttgtcctttacctgcataatcacagctatgcatctattcaaagtgatgatctgtgggatagttttaatgaggtcacaaaccaaacactagatgtaaagagaatgatgaaaacctggaccctgcagaaaggatttcctttagtgactgttcaaaagaaaggaaaggaactttttatacaacaagagagattctttttaaatatgaagcctgaaattcagccttcagatacaagctacctgtggcatattccactatcctatgtcactgaaggaagaaattattcaaaatatcaatcggtatcattactggataagaaatcaggtgtcatcaatcttacagaagaagtgctgtgggtcaaagtgaatataaacatgaatggttattatattgtacactatgcagatgatgattgggaagcactaatccatcagttgaaaataaatccttatgttctgagtgacaaagaccgagccaaccttatcaacaacatctttgaacttgcaggcctaggcaaggtacctctcaagagggcctttgatttgattaattatcttggaaatgagaaccatactgcacccatcaccgaagccctgtttcagacagacctcatctataacctccttgaaaaactgggatacatggatctggcctcaagactggtgactagggtatttaaattacttcaaaaccaaattcaacaacaaacttggactgatgagggcactccatctatgcgagagcttcggtcagccctgctagagtttgcttgcacccacaacctggggaactgctctactactgccatgaaactgtttgatgactggatggcatccaatggaactcaaagcctacctactgatgtcatgacaactgtgttcaaagttggagcaaaaactgacaaaggctggtcattccttttgggcaaatacatttctataggctctgaagcagagaagaacaaaatactagaagcacttgccagctcagaggatgtgcggaagctttactggttaatgaaaagtagcctgaatggagataacttccgaacacagaagctgtcttttatcattagaacagtgggtcgacattttcctggacacttactggcatgggattttgtcaaagagaactggaataagcttgtacagaagttccctctggggtcctataccatacaaaatattgttgctggatcaacttacctgttttcaacaaagacacatttatctgaggttcaggcattctttgaaaatcagtcagaggcaaccttccggcttcgttgtgtccaggaggctttggaagtcattcagttgaatatccagtggatggagaagaacctcaaaagtctcacatggtggctgtagcatgcacaaccgcacctcattttgttgcccattcagagagcttgtaagcttgggctctgccgcttttgcaaaagccaaggtaaagccaggatcgctgccaagttgtttgcactctttggagttctagttagctcagggcctgactgtatttttcatccatcttttctgaagtgtctttgggcagtatgtagttatttattacaaaattatattcacctaaatgccaaccatctacaaaaacaatgagtaatttttctactttgaagatacacagatggggacaaaaaccctgttttggaattctgttctattcctcagtatccagaaagttactgacacagtaaaacaaggaaagttctaccctaagagccgccatcacttcaggccgctggtttgtcagccatctgttgcttcttattgatagatggcattggaatgtggtacaaagttagctctgaagaatatggtaacgaagacaataaagcatgcactgtaagaactg

SEQ ID NO: 4409 - protein, 1025 aa, Homo sapiens; identical to SEQ ID NO: 535

SEQ ID NO: 4410 - DNA, 7663 bp, Homo sapiens
gtggcgatgcgcataccgagaggataaggaagcggttcccgacgagcctcctcggggcttatggggcccctggcggttcggcctcggaggctagcggggctgcccgatttggcactggaaacaatggtggctcggggctggaggcaatggcgcgagtgctggggggcaggggcgactaggggagtttcggtttctcgggcctagcgccgcggagccttgctgcgggccccagtggtagcacccccgggaaccgcaggtgttgatttaaggctcggaacaggcgggccttctgcccacatcctgcggcgcccgcgacccgggccgggcgatccggcgccgggttttgttatccgcccgcacctagaggccgcaaggcagccgccagccccgggactggaccccagggcgccctcggccctgcgaggtccccgccctctcttccgtctcctcctcaccgccctcctgaggcactctgatgcgggcgggcatctctgccgaaaacacctacagcgcccgctccctcggtccttcgagcagtgatccctccgcggccaacctccccagggaaaccagcgattcgcggttcagatagcgaccttcgcccgcaggttcctgctctgccttcagacttcggcttcagtggcacctgctcagcgaggcctcgtctaaccaagccatccgaattaactacccactcactcgccatcacatcaccccgatttaattcgcagcggggcactgactttacactcgtgtgtcttctgtgtttatttatggtctgtttctggaatgtccgctcctgggactgggaccatgattttctggcgcagtgcgggtgtctcggcgtccgggatcgggcgggtcgcagtagggctccacatttgttgagtgactgaacaccgttcccggccggggagagcgccgcagccgggtccacttcaggtaggggctgggctttcccggccccgcctaggccccgcccccagcgcgaacccgctcccacctcgcctgtccacggagcagcagggggtttgactgtgcttttccctcttgcttccctcgctctttctgcagctgccacgaaaacccggaacggcggagcggcgccgcccctcgcggcacctccctggcagcccttggaggccgcgctgggcatgctcagtcagctgggccgcctcagctctcggagtaggaagctcgggcgctccggctgtaaggagccgcggcggggggaaaatggagcccttcaccaatgatcggcttcagctccccaggaatatgattgaaaacagcatgtttgaggaagaaccagatgtggtggatttagccaaagagccttgtttacatcctctagagcctgatgaggtggaatatgagccccggggttcccgactgctggtgcggggtcttggtgagcatgagatggaggaggatgaagaggattatgagtcatcagcaaagctgctgggcatgtccttcatgaatagaagctcaggccttcggaacagtgcaactggttacaggcagagcccagatggggcttgttcagtaccctctgcaaggaccatggtggtctgtgcttttgtcatcgtggttgctgtttctgtaatcatggtgatttacttactgcccagatgtacctttaccaaagaaggctgccataaaaaaaaccagtcaattggactaattcagccatttgcaacaaatgggaaattgtttccatgggcacagatcaggcttcccactgccgttgtgccactacgctatgaactcagcctacacccgaacctaacctcgatgacattcaggggttctgtgacaatttcagttcaggctcttcaggtcacatggaatatcattcttcatagcacaggtcataatatttcaagagtgacctttatgtcagcagtttcaagccaagaaaaacaagctgagatcctggaatatgcatatcatggacagatcgccattgttgcccccgaagcccttctagcagggcacaattatacgttgaagatagagtactcggcaaatatatctagttcttattatgggttttatggcttctcctacacagatgaaagtaatgagaaaaagtactttgcagcaactcagtttgaacccctggcagcaagatctgcttttccttgttttgatgaaccagcatttaaagccacttttatcatcaagatcataagggatgagcaatacaccgctttatcaaatatgcctaagaagtcatcagtcgttctagatgatggacttgttcaggatgagttttctgagagtgtgaagatgagcacttacttggttgctttcattgtgggagagatgaagaacctgagtcaggacgtaaatggaaccctggtttctatatatgctgtaccagaaaagattggtcaagttcattatgccttggaaacaactgtgaagcttcttgagttttttcaaaactactttgaaattcagtacccacttaagaaattggatttggtggctattcctgactttgaagcaggagcaatggaaaattggggtttgctcaccttccgagaggagacacttctgtatgacagtaacacttcttcaatggcggatagaaagctggtgactaaaatcattgctcatgagctggcccaccagtggtttggcaatctggtaacaatgaagtggtggaatgacctatggctaaatgaaggttttgccactttcatggagtatttctctttggaaaaaatattcaaagagctttctagttatgaagatttcttagatgctcgatttaaaaccatgaagaaagattccttaaattcatctcatccaatatcatcatctgttcagtcttcagaacaaattgaagaaatgtttgattctctttcctattttaagggatcttctctcttgttgatgttgaaaacttaccttagtgaagatgtgtttcaacatgctgttgtcctttacctgcataatcacagctatgcatctattcaaagtgatgatctgtgggatagttttaatgaggtcacaaaccaaacactagatgtaaagagaatgatgaaaacctggaccctgcagaaaggatttcctttagtgactgttcaaaagaaaggaaaggaactttttatacaacaagagagattctttttaaatatgaagcctgaaattcagccttcagatacaagctacctgtggcatattccactatcctatgtcactgaaggaagaaattattcaaaatatcaatcggtatcattactggataagaaatcaggtgtcatcaatcttacagaagaagtgctgtgggtcaaagtgaatataaacatgaatggttattatattgtacactatgcagatgatgattgggaagcactaatccatcagttgaaaataaatccttatgttctgagtgacaaagaccgagccaaccttatcaacaacatctttgaacttgcaggcctaggcaaggtacctctcaagagggcctttgatttgattaattatcttggaaatgagaaccatactgcacccatcaccgaagccctgtttcagacagacctcatctataacctccttgaaaaactgggatacatggatctggcctcaagactggtgactagggtatttaaattacttcaaaaccaaattcaacaacaaacttggactgatgagggcactccatctatgcgagagcttcggtcagccctgctagagtttgcttgcacccacaacctggggaactgctctactactgccatgaaactgtttgatgactggatggcatccaatggaactcaaagcctacctactgatgtcatgacaactgtgttcaaagttggagcaaaaactgacaaaggctggtcattccttttgggcaaatacatttctataggctctgaagcagagaagaacaaaatactagaagcacttgccagctcagaggatgtgcggaagctttactggttaatgaaaagtagcctgaatggagataacttccgaacacagaagctgtcttttatcattagaacagtgggtcgacattttcctggacacttactggcatgggattttgtcaaagagaactggaataagcttgtacagaagttccctctggggtcctataccatacaaaatattgttgctggatcaacttacctgttttcaacaaagacacatttatctgaggttcaggcattctttgaaaatcagtcagaggcaaccttccggcttcgttgtgtccaggaggctttggaagtcattcagttgaatatccagtggatggagaagaacctcaaaagtctcacatggtggctgtagcatgcacaaccgcacctcattttgttgcccattcagagagcttgtaagcttgggctctgccgcttttgcaaaagccaaggtaaagccaggatcgctgccaagttgtttgcactctttggagttctagttagctcagggcctgactgtatttttcatccatcttttctgaagtgtctttgggcagtatgtagttatttattacaaaattatattcacctaaatgccaaccatctacaaaaacaatgagtaatttttctactttgaagatacacagatggggacaaaaaccctgttttggaattctgttctattcctcagtatccagaaagttactgacacagtaaaacaaggaaagttctaccctaagagccgccatcacttcaggccgctggtttgtcagccatctgttgcttcttattgatagatggcattggaatgtggtacaaagttagctctgaagaatatggtaacgaagacaataaagcatgcactgtaagaactgacctcaggtgtgcagatctactttgatttggggttttgattaattctttatttttctgaaaaaaagtttaaataatgtctgtaactattgtgtttttttcctgccgaatagccaggtgctacagatttttaaaatttttgttgtattgaaaagctaaacaaggccaaaaggttaaattttttgaatatttaagactttctttttcatcttttatagcgttaccataggaaactgttccaaactgagttagctttaattataattattttattcataaatggtgatagtccccagatctgtacacctttatcactccctgccgtagatatactttaggttagtatttctacattcgtggcaagcattttggtaacaccagtggttttcattgtgacttttatcactatcactaagaatgcaatttaagttgccttttggcatcatagatcatagaaactttctctctgaatcatacccatgtgtgaattttcattttatatgatagtgtagcatattagaagcatattttaaaacagagcctttgagaaattgaaaaacaattatttgaagttcaccatagtaccttaaaggaacaaagagaatgtgggataggagtaacttgaattcgtgtttagtatggtgggctttgaatttttttcactatcaaaaatagtgcttttgtttagttaaaaattgtagtttttctttttttgtgtgtccaaactaacataaaaggagtggtcaaagaaggaaagaagaaaaatgagggaggatgtccgaaactgtatggcattttactccttctgaaagagaaatactgtacttgaatttttgagctatgcagacttatacctagattgttgtgtttctttgattcttaggagaaaagctttcttcctaataattcttgagaactttatattttgtttgaaaacagtttctatgtacataaaaagggtatttacccatttgtgagcacttaaaacactccacagagtcagacagtgggaaaggtcaccctttttttattcggcaggtatcaagttagaatgtatggaattgtgaataaaattatattttattttatgaaaatatttttatataataaaatttaaaaggctggtaagctaaaaaaatagtcttctttaatcctagtgtgttttccccaatttagtcttttctaaaatttatctgttttagagtagaaaatattatatcctgagaatcacagaatcatctaaatatgtcttattcaactgaagtgattgtaagtctttattcttgtgctttggttaaatgaatgataatttagttgatagtgaaagttaatgtgtttttatatttttagagtgagggaaaaatactaaacttttgagagttttgttgtcgttgctggttttttaccatgtggtactaaattccactttgatacaaaatttaaattttgtaacttctcaaaatcacttaagattcttcagttttacctgtgcttcttgacatcgctcctataatgtatgttagttaactctgcatatggcaaatcttgtcttgaattatatcatttctctccctctctctctctctctgtgtgtgtgtgtgtgtgtgtgtgtgtgtgtgtgtgtgtgtgtgtgtgtagtgtggggggtattgttatgagtaaaactttatcaaaacttggcctgaaaaagagataactcatgatccattgctatctttattactcaaaggctgttcattcccataataccagatccataatagttgtagtttttttgatgttgttgcccttaccttaattatttgtagttttagtaggccttgcctcagtttttcccacagaattccataattttaatgttgaactaacccatctatataggacttctaaaaactacgtcaggaatgtaaggttaaatgagaggtagaacttgtagtgtaataggtataatggtagctttcaaagttttatcttctcaaaacattgtcttagccagtgtatttctgagaactcagactgaagcacagaagtcacagtatgcttcttttatttaagcacacagattcatgacacaagtacttgttgaacaagtgttctcattgcagagagatctacttgaatataaaagggtcatcatactagattattaaaaaagaattggaaatcttgagttgtggaagaaatgtttatgctttggagatctaaaaaagttatgaatgtaggaattagataagtccagtttgttctgttaatataaaatggttagatatattaaactgcaagtagtatcagcttcaccataagcttgggccttcctccatcttgttttatttaagtctctttaaatgaaattttgttgtcattgtttcagcattcatgaactttcttactatcacaggttctactttaattttccttgccatatgtgtttccattttgtgggacattagccaccacaggaacacaagagttgtcagaagactcctgggtgtacagagcaaatcaagctgcatcagtattataggataccaaacagaatcctttctattaggaaataagaaatcagttaagtgttggctgggcgcggtggcttatgcctgtaatcccagcattttgggatgccaaggtgggcagaccatttgaggccaggagttctaaaccagtttggccgacatggcaaaaccccatctctactaaaaatataaaaattagctgggcatggtggtgcacacctgtaatcccagctacctgggaggcacgagaatcacttgaacccaggaggcggaggttgcagtgagccaaggttgtgccactgcactccagcctgggtgacaaagcgagactgtctc

SEQ ID NO: 4411 - protein, 1025 aa, Homo sapiens; identical to SEQ ID NO: 535

SEQ ID NO: 4412 - DNA, 6734 bp, Homo sapiens
gctcctaactccactaagtacagaagtggagccgtacagccatgaatgtcaggcatgttgtggggactagttgtattagttttctattgccaccataacaaattaccacaaacttaagcaatatagtacaaatttatcttaaagttattggcaggtcagaagcctgatacggatctcattgggctaaaacgaaggagttggcagggctgtgtgttcctttctgtaggctctgggcaggatccatttcctgcacttttttggcttttggaggtcgtccacattccttggctcctggccctgctccttcatcttcaaagctaccaaagatcggcttcagctccccaggaatatgattgaaaacagcatgtttgaggaagaaccagatgtggtggatttagccaaagagccttgtttacatcctctagagcctgatgaggtggaatatgagccccggggttcccgactgctggtgcggggtcttggtgagcatgagatggaggaggatgaagaggattatgagtcatcagcaaagctgctgggcatgtccttcatgaatagaagctcaggccttcggaacagtgcaactggttacaggcagagcccagatggggcttgttcagtaccctctgcaaggaccatggtggtctgtgcttttgtcatcgtggttgctgtttctgtaatcatggtgatttacttactgcccagatgtacctttaccaaagaaggctgccataaaaaaaaccagtcaattggactaattcagccatttgcaacaaatgggaaattgtttccatgggcacagatcaggcttcccactgccgttgtgccactacgctatgaactcagcctacacccgaacctaacctcgatgacattcaggggttctgtgacaatttcagttcaggctcttcaggtcacatggaatatcattcttcatagcacaggtcataatatttcaagagtgacctttatgtcagcagtttcaagccaagaaaaacaagctgagatcctggaatatgcatatcatggacagatcgccattgttgcccccgaagcccttctagcagggcacaattatacgttgaagatagagtactcggcaaatatatctagttcttattatgggttttatggcttctcctacacagatgaaagtaatgagaaaaagtactttgcagcaactcagtttgaacccctggcagcaagatctgcttttccttgttttgatgaaccagcatttaaagccacttttatcatcaagatcataagggatgagcaatacaccgctttatcaaatatgcctaagaagtcatcagtcgttctagatgatggacttgttcaggatgagttttctgagagtgtgaagatgagcacttacttggttgctttcattgtgggagagatgaagaacctgagtcaggacgtaaatggaaccctggtttctatatatgctgtaccagaaaagattggtcaagttcattatgccttggaaacaactgtgaagcttcttgagttttttcaaaactactttgaaattcagtacccacttaagaaattggatttggtggctattcctgactttgaagcaggagcaatggaaaattggggtttgctcaccttccgagaggagacacttctgtatgacagtaacacttcttcaatggcggatagaaagctggtgactaaaatcattgctcatgagctggcccaccagtggtttggcaatctggtaacaatgaagtggtggaatgacctatggctaaatgaaggttttgccactttcatggagtatttctctttggaaaaaatattcaaagagctttctagttatgaagatttcttagatgctcgatttaaaaccatgaagaaagattccttaaattcatctcatccaatatcatcatctgttcagtcttcagaacaaattgaagaaatgtttgattctctttcctattttaagggatcttctctcttgttgatgttgaaaacttaccttagtgaagatgtgtttcaacatgctgttgtcctttacctgcataatcacagctatgcatctattcaaagtgatgatctgtgggatagttttaatgaggtcacaaaccaaacactagatgtaaagagaatgatgaaaacctggaccctgcagaaaggatttcctttagtgactgttcaaaagaaaggaaaggaactttttatacaacaagagagattctttttaaatatgaagcctgaaattcagccttcagatacaagctacctgtggcatattccactatcctatgtcactgaaggaagaaattattcaaaatatcaatcggtatcattactggataagaaatcaggtgtcatcaatcttacagaagaagtgctgtgggtcaaagtgaatataaacatgaatggttattatattgtacactatgcagatgatgattgggaagcactaatccatcagttgaaaataaatccttatgttctgagtgacaaagaccgagccaaccttatcaacaacatctttgaacttgcaggcctaggcaaggtacctctcaagagggcctttgatttgattaattatcttggaaatgagaaccatactgcacccatcaccgaagccctgtttcagacagacctcatctataacctccttgaaaaactgggatacatggatctggcctcaagactggtgactagggtatttaaattacttcaaaaccaaattcaacaacaaacttggactgatgagggcactccatctatgcgagagcttcggtcagccctgctagagtttgcttgcacccacaacctggggaactgctctactactgccatgaaactgtttgatgactggatggcatccaatggaactcaaagcctacctactgatgtcatgacaactgtgttcaaagttggagcaaaaactgacaaaggctggtcattccttttgggcaaatacatttctataggctctgaagcagagaagaacaaaatactagaagcacttgccagctcagaggatgtgcggaagctttactggttaatgaaaagtagcctgaatggagataacttccgaacacagaagctgtcttttatcattagaacagtgggtcgacattttcctggacacttactggcatgggattttgtcaaagagaactggaataagcttgtacagaagttccctctggggtcctataccatacaaaatattgttgctggatcaacttacctgttttcaacaaagacacatttatctgaggttcaggcattctttgaaaatcagtcagaggcaaccttccggcttcgttgtgtccaggaggctttggaagtcattcagttgaatatccagtggatggagaagaacctcaaaagtctcacatggtggctgtagcatgcacaaccgcacctcattttgttgcccattcagagagcttgtaagcttgggctctgccgcttttgcaaaagccaaggtaaagccaggatcgctgccaagttgtttgcactctttggagttctagttagctcagggcctgactgtatttttcatccatcttttctgaagtgtctttgggcagtatgtagttatttattacaaaattatattcacctaaatgccaaccatctacaaaaacaatgagtaatttttctactttgaagatacacagatggggacaaaaaccctgttttggaattctgttctattcctcagtatccagaaagttactgacacagtaaaacaaggaaagttctaccctaagagccgccatcacttcaggccgctggtttgtcagccatctgttgcttcttattgatagatggcattggaatgtggtacaaagttagctctgaagaatatggtaacgaagacaataaagcatgcactgtaagaactgacctcaggtgtgcagatctactttgatttggggttttgattaattctttatttttctgaaaaaaagtttaaataatgtctgtaactattgtgtttttttcctgccgaatagccaggtgctacagatttttaaaatttttgttgtattgaaaagctaaacaaggccaaaaggttaaattttttgaatatttaagactttctttttcatcttttatagcgttaccataggaaactgttccaaactgagttagctttaattataattattttattcataaatggtgatagtccccagatctgtacacctttatcactccctgccgtagatatactttaggttagtatttctacattcgtggcaagcattttggtaacaccagtggttttcattgtgacttttatcactatcactaagaatgcaatttaagttgccttttggcatcatagatcatagaaactttctctctgaatcatacccatgtgtgaattttcattttatatgatagtgtagcatattagaagcatattttaaaacagagcctttgagaaattgaaaaacaattatttgaagttcaccatagtaccttaaaggaacaaagagaatgtgggataggagtaacttgaattcgtgtttagtatggtgggctttgaatttttttcactatcaaaaatagtgcttttgtttagttaaaaattgtagtttttctttttttgtgtgtccaaactaacataaaaggagtggtcaaagaaggaaagaagaaaaatgagggaggatgtccgaaactgtatggcattttactccttctgaaagagaaatactgtacttgaatttttgagctatgcagacttatacctagattgttgtgtttctttgattcttaggagaaaagctttcttcctaataattcttgagaactttatattttgtttgaaaacagtttctatgtacataaaaagggtatttacccatttgtgagcacttaaaacactccacagagtcagacagtgggaaaggtcaccctttttttattcggcaggtatcaagttagaatgtatggaattgtgaataaaattatattttattttatgaaaatatttttatataataaaatttaaaaggctggtaagctaaaaaaatagtcttctttaatcctagtgtgttttccccaatttagtcttttctaaaatttatctgttttagagtagaaaatattatatcctgagaatcacagaatcatctaaatatgtcttattcaactgaagtgattgtaagtctttattcttgtgctttggttaaatgaatgataatttagttgatagtgaaagttaatgtgtttttatatttttagagtgagggaaaaatactaaacttttgagagttttgttgtcgttgctggttttttaccatgtggtactaaattccactttgatacaaaatttaaattttgtaacttctcaaaatcacttaagattcttcagttttacctgtgcttcttgacatcgctcctataatgtatgttagttaactctgcatatggcaaatcttgtcttgaattatatcatttctctccctctctctctctctctgtgtgtgtgtgtgtgtgtgtgtgtgtgtgtgtgtgtgtgtgtgtgtgtagtgtggggggtattgttatgagtaaaactttatcaaaacttggcctgaaaaagagataactcatgatccattgctatctttattactcaaaggctgttcattcccataataccagatccataatagttgtagtttttttgatgttgttgcccttaccttaattatttgtagttttagtaggccttgcctcagtttttcccacagaattccataattttaatgttgaactaacccatctatataggacttctaaaaactacgtcaggaatgtaaggttaaatgagaggtagaacttgtagtgtaataggtataatggtagctttcaaagttttatcttctcaaaacattgtcttagccagtgtatttctgagaactcagactgaagcacagaagtcacagtatgcttcttttatttaagcacacagattcatgacacaagtacttgttgaacaagtgttctcattgcagagagatctacttgaatataaaagggtcatcatactagattattaaaaaagaattggaaatcttgagttgtggaagaaatgtttatgctttggagatctaaaaaagttatgaatgtaggaattagataagtccagtttgttctgttaatataaaatggttagatatattaaactgcaagtagtatcagcttcaccataagcttgggccttcctccatcttgttttatttaagtctctttaaatgaaattttgttgtcattgtttcagcattcatgaactttcttactatcacaggttctactttaattttccttgccatatgtgtttccattttgtgggacattagccaccacaggaacacaagagttgtcagaagactcctgggtgtacagagcaaatcaagctgcatcagtattataggataccaaacagaatcctttctattaggaaataagaaatcagttaagtgttggctgggcgcggtggcttatgcctgtaatcccagcattttgggatgccaaggtgggcagaccatttgaggccaggagttctaaaccagtttggccgacatggcaaaaccccatctctactaaaaatataaaaattagctgggcatggtggtgcacacctgtaatcccagctacctgggaggcacgagaatcacttgaacccaggaggcggaggttgcagtgagccaaggttgtgccactgcactccagcctgggtgacaaagcgagactgtctc

SEQ ID NO: 4413 - protein, 1011 aa, Homo sapiens; identical to SEQ ID NO: 537

SEQ ID NO: 4414 - DNA, 3267 bp, Homo sapiens
caaccttccggcttcgttgtgtccaggaggctttggaagtcattcagttgaatatccagtggatggagaagaacctcaaaagtctcacatggtggctgtagcatgcacaaccgcacctcattttgttgcccattcagagagcttgtaagcttgggctctgccgcttttgcaaaagccaaggtaaagccaggatcgctgccaagttgtttgcactctttggagttctagttagctcagggcctgactgtatttttcatccatcttttctgaagtgtctttgggcagtatgtagttatttattacaaaattatattcacctaaatgccaaccatctacaaaaacaatgagtaatttttctactttgaagatacacagatggggacaaaaaccctgttttggaattctgttctattcctcagtatccagaaagttactgacacagtaaaacaaggaaagttctaccctaagagccgccatcacttcaggccgctggtttgtcagccatctgttgcttcttattgatagatggcattggaatgtggtacaaagttagctctgaagaatatggtaacgaagacaataaagcatgcactgtaagaactgacctcaggtgtgcagatctactttgatttggggttttgattaattctttatttttctgaaaaaaagtttaaataatgtctgtaactattgtgtttttttcctgccgaatagccaggtgctacagatttttaaaatttttgttgtattgaaaagctaaacaaggccaaaaggttaaattttttgaatatttaagactttctttttcatcttttatagcgttaccataggaaactgttccaaactgagttagctttaattataattattttattcataaatggtgatagtccccagatctgtacacctttatcactccctgccgtagatatactttaggttagtatttctacattcgtggcaagcattttggtaacaccagtggttttcattgtgacttttatcactatcactaagaatgcaatttaagttgccttttggcatcatagatcatagaaactttctctctgaatcatacccatgtgtgaattttcattttatatgatagtgtagcatattagaagcatattttaaaacagagctttgaatttttttcactatcaaaaatagtgcttttgtttagttaaaaattgtagtttttctttttttgtgtgtccaaactaacataaaaggagtggtcaaagaaggaaagaagaaaaatgagggaggatgtccgaaactgtatggcattttactccttctgaaagagaaatactgtacttgaatttttgagctatgcagacttatacctagattgttgtgtttctttgattcttaggagaaaagctttcttcctaataattcttgagaactttatattttgtttgaaaacagtttctatgtacataaaaagggtatttacccatttgtgagcacttaaaacactccacagagtcagacagtgggaaaggtcaccctttttttattcggcaggtatcaagttagaatgtatggaattgtgaataaaattatattttattttatgaaaatatttttatataataaaatttaaaaggctggtaagctaaaaaaatagtcttctttaatcctagtgtgttttccccaatttagtcttttctaaaatttatctgttttagagtagaaaatattatatcctgagaatcacagaatcatctaaatatgtcttattcaactgaagtgattgtaagtctttattcttgtgctttggttaaatgaatgataatttagttgatagtgaaagttaatgtgtttttatatttttagagtgagggaaaaatactaaacttttgagagttttgttgtcgttgctggttttttaccatgtggtactaaattccactttgatacaaaatttaaattttgtaacttctcaaaatcacttaagattcttcagttttacctgtgcttcttgacatcgctcctataatgtatgttagttaactctgcatatggcaaatcttgtcttgaattatatcattgggggtattgttatgagtaaaactttatcaaaacttggcctgaaaaagagataactcatgatccattgctatctttattactcaaaggctgttcattcccataataccagatccataatagttgtagtttttttgatgttgttgcccttaccttaattatttgtagttttagtaggccttgcctcagtttttcccacagaattccataattttaatgttgaactaacccatctatataggacttctaaaaactacgtcaggaatgtaaggttaaatgagaggtagaacttgtagtgtaataggtataatggtagctttcaaagttttatcttctcaaaacattgtcttagccagtgtatttctgagaactcagactgaagcacagaagtcacagtatgcttcttttatttaagcacacagattcatgacacaagtacttgttgaacaagtgttctcattgcagagagatctacttgaatataaaagggtcatcatactagattattaaaaaagaattggaaatcttgagttgtggaagaaatgtttatgctttggagatctaaaaaagttatgaatgtaggaattagataagtccagtttgttctgttaatataaaatggttagatatattaaactgcaagtagtatcagcttcaccataagcttgggccttcctccatcttgttttatttaagtctctttaaatgaaattttgttgtcattgtttcagcattcatgaactttcttactatcacaggttctactttaattttccttgccatatgtgtttccattttgtgggacattagccaccacaggaacacaagagttgtcagaagactcctgggtgtacagagcaaatcaagctgcatcagtattataggataccaaacagaatcctttctattaggaaataagaaatcagttaagtgttggctgggcgcggtggcttatgcctgtaatcccagcattttgggatgccaaggtgggcagaccatttgaggccaggagttctaaaccagtttggccgacatggcaaaaccccatctctactaaaaatataaaaattagctgggcatggtggtgcacacctgtaatcccagctacctgggaggcacgagaatcacttgaacccaggaggcggaggttgcagtgagccaaggttgtgccactgcactccagcctgggtgacaaagcgagactgtctc

SEQ ID NO: 4415 - protein, 88 aa, Homo sapiens
MNFLTITGSTLIFLAICVSILWDISHHRNTRVVRRLLGVQSKSSCISIIGYQTESFLLGNKKSVKCWLGAVAYACNPSILGCQGGQTI

SEQ ID NO: 4416 - DNA, 1781 bp, Homo sapiens
ggtagaatagatgtttggtttcttttgggggtgtctgagtgtatatgtgtgtgtatatacacacaagaacacacatatttatatactatacacacacattttaatgtatataaatatttgctacattctgtgtgttatataatgtggtacccagtcctctgctgggacatggatgtacataatgaaacatggaggtccagacgtatgataactctcctgtttcccttccctcattgcctacaggggcaatagtttcatatcttgggttttttattgtttaatttttttttatggggaggggttctttgggtgggtaatagtcagggggaaaggacagtgtctatactttttaaagatgtatataaatgtttcatgttattggttttgtacctagtcctttgcatggatatataggtacctaatgaaaatcgaggatcagtgtatgacaaatctcccatcctcccctttccttattgcctgtgtcggcaataggaagtagaatagttgtgtgttgtttacttacttgtctgttttagagagatttctatttttggtaggggaatattcttaatatgttttcatatctttatttcattttgtagtcttttgcatggctatgtagggacctaatgaaagtcgagtttcataatatgacagctcacttcttttcctacatatttcctcacttagcagtagctagtgtagttattttgtggttattttatttcattctctaggatctattccattaaggatgcaagtgtgtagatgcatatatatcatttgcttctttcttccgccattattttcctttaacacttagtcccttgcaaggggtctgactatacctaacaaaaataaagacctactaaatccctgccatctggctcttagcattgtttgttttcccatttctgatactactactccatgctgaagatttgccatattactattttggaaacattgagtgatagaactcctagaaaatttgcaaagaaatgttacatactgtatatcaaactctcagattctagtgttgaaaaagtagcctatactttgctattacttatacctgctgccatagaaaaaaataagtttattcatgacacatttacatttgatcataaataaaagaaaaaagggcacctttttggagttagtcatggtagtcattagtgatatttctgaacagttcttaatttaaaatacttcaaaggaagtaaaggtcatggcttagctgaaggaaatgctccagaaattggactgtgtaaaccatcagtacaataatacgctgtgtatgtatgtgtatataaaatgagaattatggcataattggagcatttgcattaatcaacaaactcacattgagacaaaacttagttttacagctgtcttgattaaagccaagtgttccatgttgctgtgaagaatagcctctttcaaatactttggaaagtagttacttggaaacttgtaaaggtattacatttttatatttaaacacctatagagatcttcaattccttgagtctgagcttgtgggtggaattctaaatttgtatcataatctgtcttttgtgaaacattttgaaaatatgtatatataatattgtatatgcaaattgtgttgtttcacttgtaaagggaaaaggcttatttttctttatatttctgataacttgttttgcatatgaccagcactgactgaaaggcatgtgtagctgcaaacactgttgctttttttgtgaaatgaaaataaaagtatttaaatacaaaca

SEQ ID NO: 4417 - protein, 67 aa, Homo sapiens [sequence omitted]

SEQ ID NO: 4418 - DNA, 729 bp, Homo sapiens
attctcaagctgctgcagaactcgactgccattgaaatgtgcaaaagaaaaatttcctggcatcttaaaaaaaatgtcgaagtcagttactccacaagccctgtttgtaagagtccttgaaaagagaagcatcagttttccaatatgaagtaaatggagagtctggagttgcttctgttggccatcaatttcctgtggtgcagaggggctacaaatataatacagattaaactccctgcaggaagtctcttatggataagaacaagttcagcttcccattggggatgacagagctggtgctcaggtcatcaacatcctgctgaacctatgagaaagcatttgggacaacttgacaatgcatggtgagtcagaaagtttgctttttgattcaactatttaaaattccctattattttctttgtttttggctgccttttgcttaattgtcttgtcagctgtcctaagcctgacagccatatgaggtcaagcagaaaaactgaactggggaaataatcatagttcttcaatggattgtttctgaaaactgaatatgaggagagaatattcataggtatggcataacttccattttgtagctggaagaaatcatacccccaaattatgacaatttatagaattatgagttgaatgtttgtgtaagtatatgccttcatatttttaaacatgtataggctgcattattttctgccaataaattttatggctttt

SEQ ID NO: 4419 - protein, 44 aa, Homo sapiens
MESLELLLLAINFLWCRGATNIIQIKLPAGSLLWIRTSSASHWG

SEQ ID NO: 4420 - DNA, 666 bp, Homo sapiens
attgttgagagcaattagatggatgaccgtgcgctgtccgtggcagtgtacattgatattattattatgaaaacaaatttggctatatggatcaagacacttaaagatttaatgtctggtaattgtaacaatctgtcctaagcaactatctagagacttgtatgaagaactctgaacagagctgttcatagcagtttaaaataataagaagttttaagtaaccaaactgtcaaaaagttaggaagttattatacaaaaatatagtaacaactgtggaaagaaattttaggcaacgaacaaaaatcaagacatgtttaaatgatgacaatataatattagaggagaaagcaggataaaactgtgtattaaataaaattgaattgtgtctgctttgggtctggatccctcaggtgcccgtttggtgacaggaggatatgactctgatgttaagttttgggattttgctggaatggatgcttcttttaaggcatttcaatcccttcagccctgtgagtggtatgcattcacttacttaatatcttcatatttgacttagtatcttcacattggaagacagtgctattggctttggaatcccatctacaaggatttgtatcaaaatacattatgtttatatgactgtatactgccttcataatttaaatg

SEQ ID NO: 4421 - protein, 40 aa, Homo sapiens [sequence omitted]

SEQ ID NO: 4422 - DNA, 820 bp, Homo sapiens
atggaacacaggtcttgcaggatcacggaaaaccttcttggagttgtcttgacaccactgatgtcgagtgtctgggtgcttcacagccaggtacccgcacaaggcacttgctggcaatggcaggaggcggacgtggggtgtcgtgcaatagggctagtgaattaccagatctccgtcaagtgcagtaaccagttcaagttggaagtgtatcttttgaatgcagaaaacaaggtcgtggacaaccaggctgggacccagggccagctgaaggtgctgggtaccaacctctggtggccgtacctgatgcacgaacaccccgcctacctgtactcgtgggaggtgtggctgactgcacagaagtcactggggcctttgacttctacacactccctgtggggctccgcactgtggccgtcaccgagagccagttcctcatcagtgggaaacctttctatttccacggcgtcaacaagcatgaggatgcggacatccaagggaagggcttcaactgtccgctgctggtgaaggacttcaacctgctttgctggcttggcgccaacaccttctgcaccagccactatccctacacagaggagatgctgcagatatgttaccggtatgggattgtggtcatcgatgagtgtcctgctgtgggcctgatgctgccatgagtccctgctgtgcacccgctctgcctggccagccctcgggccacaccgtgaccctctgtcccttccctcctggcccgctggcaactcttcaacaacgtgtctatgcatcaccatatgtgggtggtggaggaaccggtgctcagagacaa

SEQ ID NO: 4423 - protein, 174 aa, Homo sapiens
MEHRSCRITENLLGVVLTPLMSSVWVLHSQVPAQGTCWQWQEADVGCRAIGLVNYQISVKCSNQFKLEVYLLNAENKVVDNQAGTQGQLKVLGTNLWWPYLMHEHPAYLYSWEVWLTAQKSLGPLTSTHSLWGSALWPSPRASSSSVGNLSISTASTSMRMRTSKGRASTVRCW

SEQ ID NO: 4424 - DNA, 680 bp, Homo sapiens
cttccactttagccttccctgtgtcctgcagttgagggcagctcaaggcaatgaggcaaatggctccaaaccaccccatggtggagccggtgcttgggctggagaggggacctcatggggtggttctccagggtcctggctctcagaggaagtgccgcttcgacagggacaggggtcactcggctctgctgtcccctagatccaagggaagggcttcaactgtccgctgctggtgaaggacttcaacctgctttgctggcttggcgccaacaccttctgcaccagccactatccctacacagaggagatgctgcagatatgttaccggtatgggattgtggtcatcgatgagtgtcctgctgtgggcctgatgctgccatgagtccctgctgtgcacccgctctgcctggccagccctcgggccacaccgtgaccctctgtcccttccctcctggcccgctggcaactcttcaacaacgtgtctatgcatcaccatatgtgggtggtggaggaaccggtgctcagagacaagaaccaccccgccatggtgatgtggtccttggccaaagagcctgcgtccttcctggaatctgccggctactccttcaaatttggagtccagccttccacacctgatcttatacaccagcctcgctttacatcatgctgcaaaatcctca

SEQ ID NO: 4425 - protein, 85 aa, Homo sapiens
MSPCCAPALPGQPSGHTVTLCPFPPGPLATLQQRVYASPYVGGGGTGAQRQEPPRHGDVVLGQRACVLPGICRLLLQIWSPAFHT

SEQ ID NO: 4426 - DNA, 635 bp, Homo sapiens
gtcgactaccaggctgcgttaggagctaccgtcttcagctttttctcgctgctgagagctgttttgttactcagtaaaactcttctccaccgtgctcacccttcagttgaccgtgcaacttcattcttcctggacataaacccgggacccacagaacagcgggtgcaaaaagggctgtaacgctttcctggccggatcgccaagctgcaggggtttagatagctcatggttctgctggttaggaagttcaagcgcaaggccctgacttctggtaagtgctttcatgctgcatcaacacgactaagaaggtcaaagaagaagtggacatctttcaactgatggactgtacagagagaggagcacttttggaataatcctcacagcctaaaggccaatgatgacacagatggtgatgtttttaaggaggtgattgatagaagatatttgatccctttggtttggagtctaccaactgagataaaggagaagagctgagaagccttgtaacattagtattctttgtctctttgtggatgaccctttcacattaatatcgacatcagaaactgaattcaagaaaagaaagggagagtcacacattctttcaataatcctttgtcagtgaacatttgagc

SEQ ID NO: 4427 - protein, 37 aa, Homo sapiens
MVLLVRKFKRKALTSGKCFHAASTRLRRSKKKWTSFN

SEQ ID NO: 4428 - DNA, 464 bp, Homo sapiens
gggatataaaaataatgcattgtatgccggaagggataaatctggggctgagtacaagcaaaacaagaccaaaggaagctacctgagcagtcactggagccctaatgatcgcagccatttcaggaaatgccatcaattacagtgaggagctcattcagaagtgaaagatgagttccattctctgttacttagaggaacacaattatttctggaaagagtattacactcagtattctgcatttcatatggcatttcaaagtcctgagaatgactctccgtagtcttctatgtactaattaaacatgaacatgtggtaaacaacatggactattccagtggacagaaagcgtcaagttaaaatgtttaagtgccccatatttttctaagtattcttatccagttggtctgactggtcattatctgttttgtaaaacttcccaaacaactcatcaatatttaaatag

SEQ ID NO: 4429 - protein, 37 aa, Homo sapiens
MSSILCYLEEHNYFWKEYYTQYSAFHMAFQSPENDSP

SEQ ID NO: 4430 - DNA, 444 bp, Homo sapiens
agtgctcaggggatataaaaataatgcattgtatgccggaagggataaatctggggctgagtacaagcaaaacaagaccaaaggaagctacctgagcaggtattccagatactcatgtcatacaccaaggttgtaccagtgcccctttctctgtgacacatccatccactggaaactttcgtacaactagctgaaagaagagaaacatcctatttcatgtcactggagccctaatgatcgcagccatttcaggaaatgccatcaattacagtgaggagctcattcagaagtgaaagatgagttccattctctgttacttagaggaacacaattatttctggaaagagtattacactcagtattctgcatttcatatggcatttcaaagtcctgagaatgactctccgtagtcttctatgtactaattaaacatgaacatgtggt

SEQ ID NO: 4431 - protein, 37 aa, Homo sapiens; identical to SEQ ID NO: 4429

SEQ ID NO: 4432 - DNA, 621 bp, Homo sapiens
agtgctcaggggatataaaaataatgcattgtatgccggaagggataaatctggggctgagtacaagcaaaacaagaccaaaggaagctacctgagcaggtattccagatactcatgtcatacaccaaggttgtaccagtgcccctttctctgtgacacatccatccactggaaactttcgtacaactagctgaaagaagagaaacatcctatttcatgtcactggagccctaatgatcgcagccatttcaggaaatgccatcaattacagtgaggagctcattcagaagtgaaagatgagttccattctctgttacttagagggtggatatcctcctccactgaatgcaaactattaagtaatgaaaagacagcactccaagcaatatagatttataggccaacctggcaatcaagggtaactgacatgaaaatggattgcttcacattttaattacaaagatactcttcagtaccataaattgaagaaaacactaactttttgtggctactgtaattgtcaaagtataattacctgtgttttctcacctacgtatttgagatagagacaaaaccaagtaagttaatccacttataataaaaatgtcttctgagaatata

SEQ ID NO: 4433 - protein, 44 aa, Homo sapiens
KWIASHFNYKDTLQYHKLKKTLTFCGYCNCQSIITCVFSPTYLR

SEQ ID NO: 4434 - DNA, 643 bp, Homo sapiens
agtgctcaggggatataaaaataatgcattgtatgccggaagggataaatctggggctgagtacaagcaaaacaagaccaaaggaagctacctgagcaggtattccagatactcatgtcatacaccaaggttgtaccagtgcccctttctctgtgacacatccatccactggaaactttcgtacaactagctgaaagaagagaaacatcctatttcatgtcactggagccctaatgatcgcagccatttcaggaaatgccatcaattacagtgaggagctcattcagaagtgaaagatgagttccattctctgttacttagaggtattacaaagctcaaatctgagaaaaccttgtctaccatcaaccctgacctacagaggagaggcacccccaagcttattagtgatcctgtctccgtcttattggcacatcctgatggccttgatctctagttcttcctgtggagcataaccatatggttctttgccaagatgttaagaccaaagtcggagagtgaaccccatgtcaatgaattcttgtttttctgatcttacattccatcactttgatccagtactctcaaaatgcaatcacagttgtacatgtcttctcctgtcaataaacgctaccttagtactgca

SEQ ID NO: 4435 - protein, 58 aa, Homo sapiens
MSSILCYLEVLQSSNLRKPCLPSTLTYRGEAPPSLLVILSPSYWHILMALISSSSCGA

SEQ ID NO: 4436 - DNA, 707 bp, Homo sapiens
cctgaactctacaggctcctaaataaagaacctaaaattctgaataaaagaagtagagttggagcccagagacagagtgagctcagaacgcaagcttgacagcaagacaaacaaattcctcaaatgagactgccagccagtatttgggctataaagcatggccaatttgctttctcaggatggagaatataatccccagaagcattatcgagggcacttttgagtgcctgattccatgtctttgaacaaacaaagtcgccaactacagttcctctctcaagagcaaaacctgaaatttgtcaagaaatagtggacttttgctcttgttgcccaggctggagtgcaatggcgtgatctcggctcaccacaacctccgtttcccagattcaagtgattctcctgtctcagcctcccaagtagccgagattacaggcatgcaccaccacacccggctaattttttttatttttagtagagacagggtttctccacgttggtcatcttggtcttgaactcctgacctcaggtgatccacctgcgtcgggctcccaaagtgctgggattacaggcatgagccaccatgcccagcccttatagttcataattctatagtttggcaattagagctgcccatagctgggtggtccctctggtctggggcaggcttggttgatcttgactgaagcttattcatctgaatttatcaa

SEQ ID NO: 4437 - protein, 32 aa, Homo sapiens
PELYRLLNKEPKILNKRSRVGAQRQSELRTQA

SEQ ID NO: 4438 - DNA, 629 bp, Homo sapiens
aggctggaagtccaagatcaaggtgctatcagggttggtttcggctgtggcctctcttcctggcttgtagacagctatcttctcgcagtgtcctcacgtggcctctttgtgtgaagttaaaaatgaacagatcaaccttttactcttctctgaaaaatatagtgaaattaataatcaagaacgattttctgaaatgaaaacatccgaacagcatactgcaaagacattcaggggaaaataaaataggttttggcaaacgtctaatgacacagagccaccattgccaatttcaccactgtctttcaccaagttgattcattttgaactggctccagcaatctactcagagttgacctcagagcaaaaaattgaagtgggaagctgctaaagaatgtgcttgactaaaacaaggcaataagcaaaaggaagtcatagcatccagaaaatgggatccatcatgcgcacaaagaaaaggtgaagaaaatttccaggatgttcagaacccaccaaaaacgaaagattctggtccagatcagaagagagggaaacactctgaaaaagtccctcaaatacaaaattaaacagagtttaaatgatgtgcttgaccacaataaaaggcttcttgctct

SEQ ID NO: 4439 - protein, 44 aa, Homo sapiens
MFRTHQKRKILVQIRREGNTLKKSLKYKIKQSLNDVLDHNKRLL

SEQ ID NO: 4440 - DNA, 778 bp, Homo sapiens
tttggcaaacgtctaatgacacagagccaccattgccaatttcaccactgtctttcaccaagttgattcattttgaactggctccagcaatctactcagagttgacctcagagcaaaaaattgaacaacagctccatatgttgatgtgaactgtgactccaggagaacggtggaaaagtgtcttgatccaggaaggaaggggtatagagaaaatatgagtctcaccacactagaagcaacatatgcaaaatccatcaaacacaccataaaatcaatgtgggagtaacaacaccttggcctactgctccctgaaaagtttttctctcgtcaagtgatgacaggcgtacatttgtaaataaattaccaagttgcttttgatttgatggagaaggaagaaaaggattgtctcctggaagtatttttattgtcttaataggtaggataatatctctgttcagcaaactgagatcttttgagaatcttaacaaatgtatacccctccctctcaccttttcctctctggtgtatttcataggcagctttgctaactgactgcactactacaaatagattctgtcactttagaaataggatttttccttttataggcagattgatggactaagtgtcaaggttttagaacagtagcatgactggggcagacactataaaccataaatccagtattgacaaatgttctagccaatccagattttctatttgttaaattgcctttatgaagtcatacttgtgcagcacagaatatggaaaataattg

SEQ ID NO: 4441 - protein, 57 aa, Homo sapiens
FDGEGRKGLSPGSIFIVLIGRIISLFSKLRSFENLNKCIPLPLTFSSLVYFIGSFAN

SEQ ID NO: 4442 - DNA, 1202 bp, Homo sapiens
gaggagcgtctctgcccggccgcccatcgtctgagatgtggggagctcctctgccccgccgccctgtctgggatgtgaggagcgcctctgcccggccgcgaccccgtctgggaactgatgagtgtctctgcccgatcgccaccccatctgggagaggaaaggccatgtaaggacagagcaaacaggcaactgtctgcaaaccaggaagagaggcctcaccagatatcaaccttcatggcaccttgatcttgatctttccagactgtgagaaaattaacttctgttgttgtttaagctgccctccaactccgtctgtagtattttgttacggcagcccaaacagactaatacatcaagtaaccacacaaatgcatgtacaattaaaactgacctaactgttaagaagaggagatagggcaagagtatatttatcgagggtattctatctggtcagagatgagagagaaagatttttctgggtaaagttaacaaggtatatagggtggggtgaatatggagtggggaatggtcccagatagggccaattgcttgtgcaaaggccctggggtgagacagagcacagtttattagagaaaccaagtggcagctgtgtgattggggtgctaagagtgaagaggaaggtgatacaggtgagggtggagaagagggtgaggcctaacttcccaggaccatgcaggattttcactgctaacttgggccacttgcacaccagactggagctggaaatggtgggtatgggagacagagatcaaaataacctctagatgtccacttgcatagctggtaggtcacgggaccattcatgatagggaagcccaggagagaaccagatttcaaagagaaagtcatgaatttgcacgtgtcaagcttgttgtgcttttgagtcacttagaaagagacatttgtttgcggacctatctacaagtctagactcagacagagacctgagtcatgtcattacactgacaaggtgggagaggtgattcgggacagtcattctcagactttgagtttcaagacccctttacactcttaaaaaccatcaaggacctcaaagagcttctgtttatgtgggttatatctgtccatatttactgtattagaaatgtaaactgaaatattaatattaatttataataaacctgttttaccttaacataaaaaaaagaaataaaacatgc

SEQ ID NO: 4443 - protein, 44 aa, Homo sapiens
MWGAPLPRRPVWDVRSASARPRPRLGTDECLCPIATPSGRGKAM

SEQ ID NO: 4444 - DNA, 3190 bp, Homo sapiens
attgggaggggttgcctctccctgtgtccacacatatgccttgagttgctcttcagtgaatatcacttttcctttcatgttttttctacatgctattatctgtatgaaatgaagaccaagaaaggatgggaagaaggagaagaaaaattttgatttatctcagaaactatactccgaagtgagagtcctggttgcagcatccttcaccgaagcacgaagcagaatcaagctgttgccatgaagcttgtttcaagagctcagaaatactccagggactcctttactactgcttttcaaagaggcctttttttctctcttctccttttcctgcaaagagggttatatccagtgctcaaggacatgggattatcagcctaaggcatgagtacatgctgtggaaacagaaatatgtatgaagggatgtatgaaaccacagaataaatggaatccacattcttgaagtagctacaactctacttgagggtaagtaattaagtattttaaaatgcaaaaaagtatatattatgaggtagaaactaaatctttatttttaggataaaacatttgaattcaaagggactttcagcatgtcgggaagcaagtctgacacaggaataatgtcctctgaagcaaaggctttttcagtggcaaagcttaagaatgctgatctgcatgatgggaaaatttagtgttggcacaagaaattaactaatatgtttttctgttgtctgaaaaggaaaataatgcttggcttcaggtatttggaaatactgcacattcgggctaagaatgagatgaccattttctcattttcaactaattatttcaagataccaaaacaaaacaaacaaatgccattggtgagtacctgctatatacaaaatgagctgtatgtagtgaagtggccaggaaaggcagagttcacagccataggtagggcaggccctggccaccctttaggggagcaagaaaggtaaaccaggtggatgaaacatatcctatagcatattgtaattggtaagtggatgcaagtggtttcttagcaagtcagaggcatcgggctgtctaaaagaggtaagaagattatactgacagagaggtggagcaaacaatgaggtgtctgggaggaagcatttgaagagctgcaaggaggtctgatttatggtagaaaaactgagtccccaggaactggggaagtgactggcaagaagaggacagggcttctagtctagaggaatcaaggcataggacatattgcttacctagagattcagtcaggggtatgggatccagcctgggtatagtttttggaaggctgcttacttgattgggttggagtgggactaacagcaagtgtgatttgatgctgacccttcagtactggcctgcgtagcttacaacagttaccctgtctaagaaggagattgattccagaacccagaataaagcagagaatgcagatggtggtcacatgggttcaggtaaggagtaaggaaagtcactggcccttctccaagtgctgtgcaggtgcaaaagttatttaattttctgtttctctcttgaatgaatatgctacctatttggtggtataacacgtaaactcattcatattaaatgtcaatacatgctttaatgttttaatcaataaatgtactaaataatttaaatttacaagggattttggaaacagatccaactttaagcatggcaggaaattgatatttggacaaggaatgttagcacattcttagatcatactcagatttaaggtaagactactctatttttcaaaccaatctaggtatataaaaccaaatctagttagaatgagaatactaaattaaacataagtttgttattcagatattccatgtagaactgtgggatgaagtgcaatcagctgtgactggttggaataaggacctgccttatcccatggagagttagagaatctgttccaacaaggacagaaggtccaggtgggaagagctctggaaaacaaaactctctgacagcgctcttgaaagctctgctggcatcccaaggcacgtagatagtacctatacatctcatcaggaacatggatggttctctgctatcagctgaagtgctgtgaccacaaaactgaaaattcccattctgtgtccttgccaataaagaatgtccatcagagcacgcccagtatcctagctccttatccagactgtgcttctcaatgtgacaaggaagactgcaaccctatttgcttctgataaccttcctatgactaagcctattcagtggaacgatgaggataaaggcctttctgatgatccccttccatttaatatcttctctggttgagattcctggggaggacactcatgacaattgtggtttttggaggatctatctttaggcagctaaaaggaagttcagagaaagccccttcctatacttcgcaggagaaaaaagagcaaaggacaatctaactggctgaatgagaggagcgggaagaagaaagggccaaaagatgacagaaaattgccctttcagatgttctaaaatggccaaaatagcagtgactcctattttgtaacttggtgattcttaatacagcttccatttaatggtctaagattaggagaccacaagtccctggagcaacaggagcaaatgtgtgctacaacaacatgaccccagcaagcaagattatttctgtgcactgataggaaaaggaagcaagccatgagtgcctgttgaagctggaaaagcaagattgatgttgaggcttgattgaaggagtgcaaggtcactcacagaagaagtcatggtgcaagagtacatctcaatcctgccctagcctggaaacagcatgctctgctgcatttgcatgcccaaggcactgcttgtcctaagccccatcctagaaactctctatagctttatttcccttaagaaggtagaaaaacatcaacaacctatccgtactagctgaatggcctctaggcctattgggcaagtacacccagatgagcatcactcttaagtggctgcttcaggtcaaggtcttttgtgttggggcagctgcaaactggcctctttggctatcccaagaccctctaagtccaaggagctttcaacctctagtgatgttcaatctctgtaaagctgtgtaatgggggataaacattaaagttgtttcacattt

SEQ ID NO: 4445 - protein, 55 aa, Homo sapiens
MVLCYQLKCCDHKTENSHSVSLPIKNVHQSTPSILAPYPDCASQCDKEDCNPICF

SEQ ID NO: 4446 - DNA, 5126 bp, Homo sapiens
tgattgggaaatcggggttggaaatttaataattgatttggacgctgatttggagaaggacagacagaaatttgagatgaataattccaccaccaccactagtagcagcaactccaaggattgtggaggtccggcctccagtggggctggtgctaccgcagccttagctgatggcctaaaatttgcttctgttcaggcctctgctccccaggggaattcacacaaagagaccagcaaatcaaaagtgaaaaggagtaaaacttctaaggatgctaataaatctctgccttctgctgccttgtatgggattcccgagatcagcagcactggcaagaggcaggaagtccaagggcgccctggagaggcaactggcatgaattcagcgctgggtcaaagtgtgagcagcggcggcagcggcaacccaaacagcaatagtaccagcaccagcacctctgccgccaccgcgggggcaggctcctgtgggaaaagcaaagaggagaagccaggttgaccccctgtttacagtgccagcgccaccaccgccgatttccagcagtctcacgcctcagattctaccctcctacttttccccatcttcatccaatattgcagcaccggttgaacagcttttggttcggactcgttctgtgggtgtcaatacatgtgaagttggagtagtgacagagccagagtgtcttgggccctgtgaacctgggaccagtgtgaatttggaagggatcgtgtggcatgaaacagaagaaggtgtcctagtggtcaatgtcacgtggaggaacaaaacgtacgtgggaaccctactggactgcaccaagcacgactgggcccctcccaggttttgtgagtcaccgacaagtgacctggagatgagagggggccggggcagagggaagagagcgaggtctgctgctgctgccccgggctccgaggccagcttcacagagtccagagggctgcagaataagaacagagggggggccaatgggaaagggaggcggggcagcctcaatgccagcggacgaaggacacccccaaattgtgctgctgaggatatcaaagccagcccttcctccaccaacaaaaggaaaaacaagcctccaatggagctggacctgaactccagctctgaggacaataagcctggaaagcgtgtccgcacaaattccagaagcactcccactacccctcaagggaaaccagagactacttttttggaccaaggctgctcttctccagtgttaatcgactgtccccacccaaactgcaacaaaaagtacaagcacattaacggcctgaggtaccaccaggctcatgcacacttagacccagaaaacaagctggagttcgagcctgacagtgaggacaagatctcggactgtgaggaaggattgagtaatgtggcacttgaatgcagtgagccaagcacaagtgtatctgcttatgaccagttgaaggcaccggcatcccctggtgctggaaacccacctgggaccccaaagggaaagagagagctgatgagcaatggcccaggttccattattggtgctaaagctgggaagaattctggcaaaaagaagggccttaacaatgaactgaacaaccttccagtaatctccaacatgacggctgcgttagacagttgctcggcagcagacggcagtttggctgctgagatgcctaaactggaagcagaaggattaattgacaagaaaaatttaggagataaagaaaagggcaaaaaagctaccaactgcaaaacggacaaaaacctctctaaactgaaaagtgcccggcccattgcccctgccccagcccccactcccccgcagctaatcgctatacccactgcaacctttacaacgaccaccactgggacaatacccggactgccctccctcacaacaactgttgttcaggctacaccaaagagtcctccgttaaaacccattcaaccaaagcccacaattatgggagagcccatcaccgtgaacccagctctggtgtcactcaaagacaaaaagaaaaaggagaagcgaaagctaaaggacaaagaagggaaagagacgggaagcccaaaaatggatgccaagctggggaaactagaggactccaagggggccagcaaagatttacctgggcattttttaaaggatcatctcaacaagaatgaagggctggcaaatggactgtcggagtctcaggagagccgcatggccagtatcaaagctgaggccgataaggtttacactttcacagacaacgctcccagcccttccatagggagcgcctcgaggctggaatgcagcactttggtgaacgggcaggcaccaatggcacctctgcatgtgttgacccagaatggggcagagagttcagctgcaaagacaagcagcccggcctattcagacatatctgatgctgctgacgatggtggttctgacagcaggtcggagggtatgagatcaaaggccagttccccatcagatattatttctagtaaggacagtgttgtaaaagggcattcttcaactacagcacaatcatctcaactgaaagagtcccattctccctattaccacagctatgatccttattattctccaagttacatgcaccctgggcaggtcggtgcccctgcagctggaaatagtgggagcacgcagggaatgaagatcaagaaggagtctgaggaagatgctgaaaagaaagacaaggcagagcagttagattctaagaaagtggaccacaattctgcatccttacagcctcagcaccagtcggtgatcacacaaagacatcctgccctggctcagtcactttattatggccagtatgcatatgggctctatatggaccagaagtctctgatggccaccagccctgcctatagacagcagtatgagaagtactatgaggaccagaggctggcagagcagaaaatggcccagactgggagaggagactgtgaaaggaaaagtgagctccccttgaaagagctgggcaaggaggaaactaaacagaaaaatatgccatcggccacaatctcaaaagctccctctactccggagcctaacaaaaaccattctaaactagggccatcagtgcctaataaaactgaggagacaggtaaatcgcagcttctctccaatcaccagcagcagcttcaggccgacagcttcaaagctaagcagatggaaaaccaccagcttattaaggaggctgtagaaatgaagtctgtcatggactctatgaagcagacaggtgtagacccaacctcgagatttaaacaagacccagattcaagaacatggcatcattatgtataccagcccaaatatctggatcagcaaaagtcagaagaacttgatagagagaagaaattaaaagaggatagtccgaggaaaactcctaataaagagagtggtgtgcccagccttcctgtatcgttaacaagcattaaagaggagcccaaagaggccaagcatcctgattctcaatcaatggaggagagcaagctgaaaaatgatgatcgaaagactcctgtgaactggaaggactctcggggaacaagagtggctgtctcctcacccatgagtcagcatcagtcatacatacagtacttgcatgcttatccttacccacagatgtacgaccccagccatcctgcataccgggctgtttctcccgtcctaatgcacagttatcctggggcatatctctctccaggatttcattatcctgtttatgggaagatgtcagggagagaagagacagagaaagtcaataccagccctagcgtcaacacgaaaacaaccactgaatctaaagcactggatttgctccagcagcatgctaaccaataccgcagcaagtctcctgctcctgtggaaaaggctacagctgagcgggaacgggaggcagaaagggaaagggatcgccactcccccttcggccagcggcacctgcacacgcaccaccacacccacgttggcatgggttacccgctaatcccgggtcaatatgacccttttcaaggcttgacctctgctgcccttgttgcctctcagcaggtggctgcccaggcatctgcatctggaatgtttcctggacaaagaagagaataacaagattggacatgtacattgtcatgtgactggatcacatggggaagcgctttatacagacatcagttccatggtgttaatttgaaatgccttaatggcaggcaaaaaccagtcatttcatttttgtaaattacagattttatcacagagtaacaaatgttgctgtaattaaacttctgttttatatatatatacgtatacatatctgtatatatacatatatatatatataaatataaatatattctttactttttgtatcagtaaccaggctcgcacacacagggtctgctgccacgtcgcaaaccactcagtaaaggaaattaaaaatgtatttgtcatgttaaaaagtgttagccacaaaaggctacttactttcttttccttttcctttaaaattgtaaataaataatgttatgtatcagtgtgcctgaaccttgcatatccttcacatatttcccataagcccctcagaaaggctaactgtgatgatgacactttggtacaatttagatgtctatttggtggctcctgttaaagacgcaccagtgtaaaatgttcctgtagtcactgtttgtacttgtgtattgtggaaaaagtacttttggaaggcatggggttgccagtaccacaaaaactgtgttgtatataatgtaaagattaaaatggggaaataatgagcatctgtgaataatgaggtgtcattttttgataatcttgaatggcaaataacccaatagcctgcgtaccagagacatctgtgattgttctattacttgaatagttctacagtctttttttttttttaatgtttacaattatccagttttagaagagagagactttaacgccattgcctggttacttgttttatgctgtaatctagtttattttatgtaaaatgtatattgaatgctttccttttttatacctgccttaaataatttggcaatcagaattaaaaagtttttttttttttaaataatg

SEQ ID NO: 4447 - protein, 1085 aa, Homo sapiens
MRGGRGRGKRARSAAAAPGSEASFTESRGLQNKNRGGANGKGRRGSLNASGRRTPPNCAAEDIKASPSSTNKRKNKPPMELDLNSSSEDNKPGKRVRTNSRSTPTTPQGKPETTFLDQGCSSPVLIDCPHPNCNKKYKHINGLRYHQAHAHLDPENKLEFEPDSEDKISDCEEGLSNVALECSEPSTSVSAYDQLKAPASPGAGNPPGTPKGKRELMSNGPGSIIGAKAGKNSGKKKGLNNELNNLPVISNMTAALDSCSAADGSLAAEMPKLEAEGLIDKKNLGDKEKGKKATNCKTDKNLSKLKSARPIAPAPAPTPPQLIAIPTATFTTTTTGTIPGLPSLTTTVVQATPKSPPLKPIQPKPTIMGEPITVNPALVSLKDKKKKEKRKLKDKEGKETGSPKMDAKLGKLEDSKGASKDLPGHFLKDHLNKNEGLANGLSESQESRMASIKAEADKVYTFTDNAPSPSIGSASRLECSTLVNGQAPMAPLHVLTQNGAESSAAKTSSPAYSDISDAADDGGSDSRSEGMRSKASSPSDIISSKDSVVKGHSSTTAQSSQLKESHSPYYHSYDPYYSPSYMHPGQVGAPAAGNSGSTQGMKIKKESEEDAEKKDKAEQLDSKKVDHNSASLQPQHQSVITQRHPALAQSLYYGQYAYGLYMDQKSLMATSPAYRQQYEKYYEDQRLAEQKMAQTGRGDCERKSELPLKELGKEETKQKNMPSATISKAPSTPEPNKNHSKLGPSVPNKTEETGKSQLLSNHQQQLQADSFKAKQMENHQLIKEAVEMKSVMDSMKQTGVDPTSRFKQDPDSRTWHHYVYQPKYLDQQKSEELDREKKLKEDSPRKTPNKESGVPSLPVSLTSIKEEPKEAKHPDSQSMEESKLKNDDRKTPVNWKDSRGTRVAVSSPMSQHQSYIQYLHAYPYPQMYDPSHPAYRAVSPVLMHSYPGAYLSPGFHYPVYGKMSGREETEKVNTSPSVNTKTTTESKALDLLQQHANQYRSKSPAPVEKATAEREREAERERDRHSPFGQRHLHTHHHTHVGMGYPLIPGQYDPFQGLTSAALVASQQVAAQASASGMFPGQRRE

SEQ ID NO: 4448 - DNA, 5762 bp, Homo sapiens
aaacacactcatttgcggtcattgaggccaccttggcgcagatcacttaaagtgaaaaggtggacctggactgagggtgtaaaatccctggacacattcgtggggcaggaaaaagaagaggaagattagaagattttttttttctttgagagaaagcccagcggagataaacgaatgtcccctcatctccaaagaaaagttcatcggatttttattctagagagctcatcttcaggatgtcagtgaacatttctactgcaggaaaaggtgtggatccaaatacagttgatacttatgacagtggcgatgattgggaaatcggggttggaaatttaataattgatttggacgctgatttggagaaggacagacagaaatttgagatgaataattccaccaccaccactagtagcagcaactccaaggattgtggaggtccggcctccagtggggctggtgctaccgcagccttagctgatggcctaaaatttgcttctgttcaggcctctgctccccaggggaattcacacaaagagaccagcaaatcaaaagtgaaaaggagtaaaacttctaaggatgctaataaatctctgccttctgctgccttgtatgggattcccgagatcagcagcactggcaagaggcaggaagtccaagggcgccctggagaggcaactggcatgaattcagcgctgggtcaaagtgtgagcagcggcggcagcggcaacccaaacagcaatagtaccagcaccagcacctctgccgccaccgcgggggcaggctcctgtgggaaaagcaaagaggagaagccaggtaaaagccagagcagccgaggcgccaagcgggataaggatgcggggaaatccaggaaggacaagcacgacctgcttcagggccaccagaatggcagtggcagccaggccccttccggggggcacctctatggctttggggccaagagcaatggaggtggcgcgagccccttccactgcgggggcactgggagtggcagcgtcgccgctgcaggggaagttagcaaaagtgccccggattcagggctcatgggaaactctatgttggtaaagaaggaagaggaggaggaggagagccacaggcgaatcaagaaactgaaaactgagaaggttgaccccctgtttacagtgccagcgccaccaccgccgatttccagcagtctcacgcctcagattctaccctcctacttttccccatcttcatccaatattgcagcaccggttgaacagcttttggttcggactcgttctgtgggtgtcaatacatgtgaagttggagtagtgacagagccagagtgtcttgggccctgtgaacctgggaccagtgtgaatttggaagggatcgtgtggcatgaaacagaagaaggtgtcctagtggtcaatgtcacgtggaggaacaaaacgtacgtgggaaccctactggactgcaccaagcacgactgggcccctcccaggttttgtgagtcaccgacaagtgacctggagatgagagggggccggggcagagggaagagagcgaggtctgctgctgctgccccgggctccgaggccagcttcacagagtccagagggctgcagaataagaacagagggggggccaatgggaaagggaggcggggcagcctcaatgccagcggacgaaggacacccccaaattgtgctgctgaggatatcaaagccagcccttcctccaccaacaaaaggaaaaacaagcctccaatggagctggacctgaactccagctctgaggacaataagcctggaaagcgtgtccgcacaaattccagaagcactcccactacccctcaagggaaaccagagactacttttttggaccaaggctgctcttctccagtgttaatcgactgtccccacccaaactgcaacaaaaagtacaagcacattaacggcctgaggtaccaccaggctcatgcacacttagacccagaaaacaagctggagttcgagcctgacagtgaggacaagatctcggactgtgaggaaggattgagtaatgtggcacttgaatgcagtgagccaagcacaagtgtatctgcttatgaccagttgaaggcaccggcatcccctggtgctggaaacccacctgggaccccaaagggaaagagagagctgatgagcaatggcccaggttccattattggtgctaaagctgggaagaattctggcaaaaagaagggccttaacaatgaactgaacaaccttccagtaatctccaacatgacggctgcgttagacagttgctcggcagcagacggcagtttggctgctgagatgcctaaactggaagcagaaggattaattgacaagaaaaatttaggagataaagaaaagggcaaaaaagctaccaactgcaaaacggacaaaaacctctctaaactgaaaagtgcccggcccattgcccctgccccagcccccactcccccgcagctaatcgctatacccactgcaacctttacaacgaccaccactgggacaatacccggactgccctccctcacaacaactgttgttcaggctacaccaaagagtcctccgttaaaacccattcaaccaaagcccacaattatgggagagcccatcaccgtgaacccagctctggtgtcactcaaagacaaaaagaaaaaggagaagcgaaagctaaaggacaaagaagggaaagagacgggaagcccaaaaatggatgccaagctggggaaactagaggactccaagggggccagcaaagatttacctgggcattttttaaaggatcatctcaacaagaatgaagggctggcaaatggactgtcggagtctcaggagagccgcatggccagtatcaaagctgaggccgataaggtttacactttcacagacaacgctcccagcccttccatagggagcgcctcgaggctggaatgcagcactttggtgaacgggcaggcaccaatggcacctctgcatgtgttgacccagaatggggcagagagttcagctgcaaagacaagcagcccggcctattcagacatatctgatgctgctgacgatggtggttctgacagcaggtcggagggtatgagatcaaaggccagttccccatcagatattatttctagtaaggacagtgttgtaaaagggcattcttcaactacagcacaatcatctcaactgaaagagtcccattctccctattaccacagctatgatccttattattctccaagttacatgcaccctgggcaggtcggtgcccctgcagctggaaatagtgggagcacgcagggaatgaagatcaagaaggagtctgaggaagatgctgaaaagaaagacaaggcagagcagttagattctaagaaagtggaccacaattctgcatccttacagcctcagcaccagtcggtgatcacacaaagacatcctgccctggctcagtcactttattatggccagtatgcatatgggctctatatggaccagaagtctctgatggccaccagccctgcctatagacagcagtatgagaagtactatgaggaccagaggctggcagagcagaaaatggcccagactgggagaggagactgtgaaaggaaaagtgagctccccttgaaagagctgggcaaggaggaaactaaacagaaaaatatgccatcggccacaatctcaaaagctccctctactccggagcctaacaaaaaccattctaaactagggccatcagtgcctaataaaactgaggagacaggtaaatcgcagcttctctccaatcaccagcagcagcttcaggccgacagcttcaaagctaagcagatggaaaaccaccagcttattaaggaggctgtagaaatgaagtctgtcatggactctatgaagcagacaggtgtagacccaacctcgagatttaaacaagacccagattcaagaacatggcatcattatgtataccagcccaaatatctggatcagcaaaagtcagaagaacttgatagagagaagaaattaaaagaggatagtccgaggaaaactcctaataaagagagtggtgtgcccagccttcctgtatcgttaacaagcattaaagaggagcccaaagaggccaagcatcctgattctcaatcaatggaggagagcaagctgaaaaatgatgatcgaaagactcctgtgaactggaaggactctcggggaacaagagtggctgtctcctcacccatgagtcagcatcagtcatacatacagtacttgcatgcttatccttacccacagatgtacgaccccagccatcctgcataccgggctgtttctcccgtcctaatgcacagttatcctggggcatatctctctccaggatttcattatcctgtttatgggaagatgtcagggagagaagagacagagaaagtcaataccagccctagcgtcaacacgaaaacaaccactgaatctaaagcactggatttgctccagcagcatgctaaccaataccgcagcaagtctcctgctcctgtggaaaaggctacagctgagcgggaacgggaggcagaaagggaaagggatcgccactcccccttcggccagcggcacctgcacacgcaccaccacacccacgttggcatgggttacccgctaatcccgggtcaatatgacccttttcaaggcttgacctctgctgcccttgttgcctctcagcaggtggctgcccaggcatctgcatctggaatgtttcctggacaaagaagagaataacaagattggacatgtacattgtcatgtgactggatcacatggggaagcgctttatacagacatcagttccatggtgttaatttgaaatgccttaatggcaggcaaaaaccagtcatttcatttttgtaaattacagattttatcacagagtaacaaatgttgctgtaattaaacttctgttttatatatatatacgtatacatatctgtatatatacatatatatatatataaatataaatatattctttactttttgtatcagtaaccaggctcgcacacacagggtctgctgccacgtcgcaaaccactcagtaaaggaaattaaaaatgtatttgtcatgttaaaaagtgttagccacaaaaggctacttactttcttttccttttcctttaaaattgtaaataaataatgttatgtatcagtgtgcctgaaccttgcatatccttcacatatttcccataagcccctcagaaaggctaactgtgatgatgacactttggtacaatttagatgtctatttggtggctcctgttaaagacgcaccagtgtaaaatgttcctgtagtcactgtttgtacttgtgtattgtggaaaaagtacttttggaaggcatggggttgccagtaccacaaaaactgtgttgtatataatgtaaagattaaaatggggaaataatgagcatctgtgaataatgaggtgtcattttttgataatcttgaatggcaaataacccaatagcctgcgtaccagagacatctgtgattgttctattacttgaatagttctacagtctttttttttttttaatgtttacaattatccagttttagaagagagagactttaacgccattgcctggttacttgttttatgctgtaatctagtttattttatgtaaaatgtatattgaatgctttccttttttatacctgccttaaataatttggcaatcagaattaaaaagtttttttttttttaaataatg

SEQ ID NO: 4449 - protein, 1512 aa, Homo sapiens; identical to SEQ ID NO: 544

SEQ ID NO: 4450 - DNA, 6421 bp, Homo sapiens
tcactgaatcatctgctgtctcctcctccacacctttctttttctcctcttgcccagtttctcatcccaccctttcttctcctcctcctccctctactccccccctccttttctcttaagttagttcaagaaatcaaatctgtcaggacgggcggaaaaatgccacttcccgactaacaggcggaatccagcccagattttcagtcctttcttcttattctttcttccctttcactaatttatcccgatgttagcacattctgtctcgttactagcggacgcctgtaggtttgctacatgggatcattactgatcacggtgactctgaagtctggaactgaaggcggaatgagaagttgggaaaacttttttctctaaactctctgttttttaaaaaactattattctcgatgcttgttaagaggaaaaaaaaacctttggtgcttctgttgtgaatgtgaaacattattttccagctgtacagtgacacattttttttaaggagaaaaggactgattcgtttgccaaaaggggggtggggaggtggaataatgttatcgagtgattattctggctgagatgtgttatttggtttcttccttcttgatcatttggtgtttaagtaaaatgaggcacaggcttgtttgccgagtggagtgggaaaggcattttgatttgctggcctaattaaaaaatgataaaggattaaaaggaaaaggtggacctggactgagggtgtaaaatccctggacacattcgtggggcaggaaaaagaagaggaagattagaagattttttttttctttgagagaaagcccagcggagataaacgaatgtcccctcatctccaaagaaaagttcatcggatttttattctagagagctcatcttcaggatgtcagtgaacatttctactgcaggaaaaggtgtggatccaaatacagttgatacttatgacagtggcgatgattgggaaatcggggttggaaatttaataattgatttggacgctgatttggagaaggacagacagaaatttgagatgaataattccaccaccaccactagtagcagcaactccaaggattgtggaggtccggcctccagtggggctggtgctaccgcagccttagctgatggcctaaaatttgcttctgttcaggcctctgctccccaggggaattcacacaaagagaccagcaaatcaaaagtgaaaaggagtaaaacttctaaggatgctaataaatctctgccttctgctgccttgtatgggattcccgagatcagcagcactggcaagaggcaggaagtccaagggcgccctggagaggcaactggcatgaattcagcgctgggtcaaagtgtgagcagcggcggcagcggcaacccaaacagcaatagtaccagcaccagcacctctgccgccaccgcgggggcaggctcctgtgggaaaagcaaagaggagaagccaggtaaaagccagagcagccgaggcgccaagcgggataaggatgcggggaaatccaggaaggacaagcacgacctgcttcagggccaccagaatggcagtggcagccaggccccttccggggggcacctctatggctttggggccaagagcaatggaggtggcgcgagccccttccactgcgggggcactgggagtggcagcgtcgccgctgcaggggaagttagcaaaagtgccccggattcagggctcatgggaaactctatgttggtaaagaaggaagaggaggaggaggagagccacaggcgaatcaagaaactgaaaactgagaaggttgaccccctgtttacagtgccagcgccaccaccgccgatttccagcagtctcacgcctcagattctaccctcctacttttccccatcttcatccaatattgcagcaccggttgaacagcttttggttcggactcgttctgtgggtgtcaatacatgtgaagttggagtagtgacagagccagagtgtcttgggccctgtgaacctgggaccagtgtgaatttggaagggatcgtgtggcatgaaacagaagaaggtgtcctagtggtcaatgtcacgtggaggaacaaaacgtacgtgggaaccctactggactgcaccaagcacgactgggcccctcccaggttttgtgagtcaccgacaagtgacctggagatgagagggggccggggcagagggaagagagcgaggtctgctgctgctgccccgggctccgaggccagcttcacagagtccagagggctgcagaataagaacagagggggggccaatgggaaagggaggcggggcagcctcaatgccagcggacgaaggacacccccaaattgtgctgctgaggatatcaaagccagcccttcctccaccaacaaaaggaaaaacaagcctccaatggagctggacctgaactccagctctgaggacaataagcctggaaagcgtgtccgcacaaattccagaagcactcccactacccctcaagggaaaccagagactacttttttggaccaaggctgctcttctccagtgttaatcgactgtccccacccaaactgcaacaaaaagtacaagcacattaacggcctgaggtaccaccaggctcatgcacacttagacccagaaaacaagctggagttcgagcctgacagtgaggacaagatctcggactgtgaggaaggattgagtaatgtggcacttgaatgcagtgagccaagcacaagtgtatctgcttatgaccagttgaaggcaccggcatcccctggtgctggaaacccacctgggaccccaaagggaaagagagagctgatgagcaatggcccaggttccattattggtgctaaagctgggaagaattctggcaaaaagaagggccttaacaatgaactgaacaaccttccagtaatctccaacatgacggctgcgttagacagttgctcggcagcagacggcagtttggctgctgagatgcctaaactggaagcagaaggattaattgacaagaaaaatttaggagataaagaaaagggcaaaaaagctaccaactgcaaaacggacaaaaacctctctaaactgaaaagtgcccggcccattgcccctgccccagcccccactcccccgcagctaatcgctatacccactgcaacctttacaacgaccaccactgggacaatacccggactgccctccctcacaacaactgttgttcaggctacaccaaagagtcctccgttaaaacccattcaaccaaagcccacaattatgggagagcccatcaccgtgaacccagctctggtgtcactcaaagacaaaaagaaaaaggagaagcgaaagctaaaggacaaagaagggaaagagacgggaagcccaaaaatggatgccaagctggggaaactagaggactccaagggggccagcaaagatttacctgggcattttttaaaggatcatctcaacaagaatgaagggctggcaaatggactgtcggagtctcaggagagccgcatggccagtatcaaagctgaggccgataaggtttacactttcacagacaacgctcccagcccttccatagggagcgcctcgaggctggaatgcagcactttggtgaacgggcaggcaccaatggcacctctgcatgtgttgacccagaatggggcagagagttcagctgcaaagacaagcagcccggcctattcagacatatctgatgctgctgacgatggtggttctgacagcaggtcggagggtatgagatcaaaggccagttccccatcagatattatttctagtaaggacagtgttgtaaaagggcattcttcaactacagcacaatcatctcaactgaaagagtcccattctccctattaccacagctatgatccttattattctccaagttacatgcaccctgggcaggtcggtgcccctgcagctggaaatagtgggagcacgcagggaatgaagatcaagaaggagtctgaggaagatgctgaaaagaaagacaaggcagagcagttagattctaagaaagtggaccacaattctgcatccttacagcctcagcaccagtcggtgatcacacaaagacatcctgccctggctcagtcactttattatggccagtatgcatatgggctctatatggaccagaagtctctgatggccaccagccctgcctatagacagcagtatgagaagtactatgaggaccagaggctggcagagcagaaaatggcccagactgggagaggagactgtgaaaggaaaagtgagctccccttgaaagagctgggcaaggaggaaactaaacagaaaaatatgccatcggccacaatctcaaaagctccctctactccggagcctaacaaaaaccattctaaactagggccatcagtgcctaataaaactgaggagacaggtaaatcgcagcttctctccaatcaccagcagcagcttcaggccgacagcttcaaagctaagcagatggaaaaccaccagcttattaaggaggctgtagaaatgaagtctgtcatggactctatgaagcagacaggtgtagacccaacctcgagatttaaacaagacccagattcaagaacatggcatcattatgtataccagcccaaatatctggatcagcaaaagtcagaagaacttgatagagagaagaaattaaaagaggatagtccgaggaaaactcctaataaagagagtggtgtgcccagccttcctgtatcgttaacaagcattaaagaggagcccaaagaggccaagcatcctgattctcaatcaatggaggagagcaagctgaaaaatgatgatcgaaagactcctgtgaactggaaggactctcggggaacaagagtggctgtctcctcacccatgagtcagcatcagtcatacatacagtacttgcatgcttatccttacccacagatgtacgaccccagccatcctgcataccgggctgtttctcccgtcctaatgcacagttatcctggggcatatctctctccaggatttcattatcctgtttatgggaagatgtcagggagagaagagacagagaaagtcaataccagccctagcgtcaacacgaaaacaaccactgaatctaaagcactggatttgctccagcagcatgctaaccaataccgcagcaagtctcctgctcctgtggaaaaggctacagctgagcgggaacgggaggcagaaagggaaagggatcgccactcccccttcggccagcggcacctgcacacgcaccaccacacccacgttggcatgggttacccgctaatcccgggtcaatatgacccttttcaaggcttgacctctgctgcccttgttgcctctcagcaggtggctgcccaggcatctgcatctggaatgtttcctggacaaagaagagaataacaagattggacatgtacattgtcatgtgactggatcacatggggaagcgctttatacagacatcagttccatggtgttaatttgaaatgccttaatggcaggcaaaaaccagtcatttcatttttgtaaattacagattttatcacagagtaacaaatgttgctgtaattaaacttctgttttatatatatatacgtatacatatctgtatatatacatatatatatatataaatataaatatattctttactttttgtatcagtaaccaggctcgcacacacagggtctgctgccacgtcgcaaaccactcagtaaaggaaattaaaaatgtatttgtcatgttaaaaagtgttagccacaaaaggctacttactttcttttccttttcctttaaaattgtaaataaataatgttatgtatcagtgtgcctgaaccttgcatatccttcacatatttcccataagcccctcagaaaggctaactgtgatgatgacactttggtacaatttagatgtctatttggtggctcctgttaaagacgcaccagtgtaaaatgttcctgtagtcactgtttgtacttgtgtattgtggaaaaagtacttttggaaggcatggggttgccagtaccacaaaaactgtgttgtatataatgtaaagattaaaatggggaaataatgagcatctgtgaataatgaggtgtcattttttgataatcttgaatggcaaataacccaatagcctgcgtaccagagacatctgtgattgttctattacttgaatagttctacagtctttttttttttttaatgtttacaattatccagttttagaagagagagactttaacgccattgcctggttacttgttttatgctgtaatctagtttattttatgtaaaatgtatattgaatgctttccttttttatacctgccttaaataatttggcaatcagaattaaaaagtttttttttttttaaataatg

SEQ ID NO: 4451 - protein, 1512 aa, Homo sapiens; identical to SEQ ID NO: 544

SEQ ID NO: 4452 - DNA, 6001 bp, Homo sapiens
gagagcttcttttgctccactccccctgtgtgtgtgttgtgtttcagtcctgatttagtgttgcagaacaagcttgttgtgtgtgtgcaccagggggatttttgttttgctttttttaaattttaatttttgcttttataaaaaatacacaggacggtctgtgacatttgatggtccatcttctttaataataaatttgttgaagagattataatttccaaaataaagcggctgcaaccaaacacattcaatgcagttagaaggaaaaggtcaactcgatccaatacagaccgaaaaggtggacctggactgagggtgtaaaatccctggacacattcgtggggcaggaaaaagaagaggaagattagaagattttttttttctttgagagaaagcccagcggagataaacgaatgtcccctcatctccaaagaaaagttcatcggatttttattctagagagctcatcttcaggatgtcagtgaacatttctactgcaggaaaaggtgtggatccaaatacagttgatacttatgacagtggcgatgattgggaaatcggggttggaaatttaataattgatttggacgctgatttggagaaggacagacagaaatttgagatgaataattccaccaccaccactagtagcagcaactccaaggattgtggaggtccggcctccagtggggctggtgctaccgcagccttagctgatggcctaaaatttgcttctgttcaggcctctgctccccaggggaattcacacaaagagaccagcaaatcaaaagtgaaaaggagtaaaacttctaaggatgctaataaatctctgccttctgctgccttgtatgggattcccgagatcagcagcactggcaagaggcaggaagtccaagggcgccctggagaggcaactggcatgaattcagcgctgggtcaaagtgtgagcagcggcggcagcggcaacccaaacagcaatagtaccagcaccagcacctctgccgccaccgcgggggcaggctcctgtgggaaaagcaaagaggagaagccaggtaaaagccagagcagccgaggcgccaagcgggataaggatgcggggaaatccaggaaggacaagcacgacctgcttcagggccaccagaatggcagtggcagccaggccccttccggggggcacctctatggctttggggccaagagcaatggaggtggcgcgagccccttccactgcgggggcactgggagtggcagcgtcgccgctgcaggggaagttagcaaaagtgccccggattcagggctcatgggaaactctatgttggtaaagaaggaagaggaggaggaggagagccacaggcgaatcaagaaactgaaaactgagaaggttgaccccctgtttacagtgccagcgccaccaccgccgatttccagcagtctcacgcctcagattctaccctcctacttttccccatcttcatccaatattgcagcaccggttgaacagcttttggttcggactcgttctgtgggtgtcaatacatgtgaagttggagtagtgacagagccagagtgtcttgggccctgtgaacctgggaccagtgtgaatttggaagggatcgtgtggcatgaaacagaagaaggtgtcctagtggtcaatgtcacgtggaggaacaaaacgtacgtgggaaccctactggactgcaccaagcacgactgggcccctcccaggttttgtgagtcaccgacaagtgacctggagatgagagggggccggggcagagggaagagagcgaggtctgctgctgctgccccgggctccgaggccagcttcacagagtccagagggctgcagaataagaacagagggggggccaatgggaaagggaggcggggcagcctcaatgccagcggacgaaggacacccccaaattgtgctgctgaggatatcaaagccagcccttcctccaccaacaaaaggaaaaacaagcctccaatggagctggacctgaactccagctctgaggacaataagcctggaaagcgtgtccgcacaaattccagaagcactcccactacccctcaagggaaaccagagactacttttttggaccaaggctgctcttctccagtgttaatcgactgtccccacccaaactgcaacaaaaagtacaagcacattaacggcctgaggtaccaccaggctcatgcacacttagacccagaaaacaagctggagttcgagcctgacagtgaggacaagatctcggactgtgaggaaggattgagtaatgtggcacttgaatgcagtgagccaagcacaagtgtatctgcttatgaccagttgaaggcaccggcatcccctggtgctggaaacccacctgggaccccaaagggaaagagagagctgatgagcaatggcccaggttccattattggtgctaaagctgggaagaattctggcaaaaagaagggccttaacaatgaactgaacaaccttccagtaatctccaacatgacggctgcgttagacagttgctcggcagcagacggcagtttggctgctgagatgcctaaactggaagcagaaggattaattgacaagaaaaatttaggagataaagaaaagggcaaaaaagctaccaactgcaaaacggacaaaaacctctctaaactgaaaagtgcccggcccattgcccctgccccagcccccactcccccgcagctaatcgctatacccactgcaacctttacaacgaccaccactgggacaatacccggactgccctccctcacaacaactgttgttcaggctacaccaaagagtcctccgttaaaacccattcaaccaaagcccacaattatgggagagcccatcaccgtgaacccagctctggtgtcactcaaagacaaaaagaaaaaggagaagcgaaagctaaaggacaaagaagggaaagagacgggaagcccaaaaatggatgccaagctggggaaactagaggactccaagggggccagcaaagatttacctgggcattttttaaaggatcatctcaacaagaatgaagggctggcaaatggactgtcggagtctcaggagagccgcatggccagtatcaaagctgaggccgataaggtttacactttcacagacaacgctcccagcccttccatagggagcgcctcgaggctggaatgcagcactttggtgaacgggcaggcaccaatggcacctctgcatgtgttgacccagaatggggcagagagttcagctgcaaagacaagcagcccggcctattcagacatatctgatgctgctgacgatggtggttctgacagcaggtcggagggtatgagatcaaaggccagttccccatcagatattatttctagtaaggacagtgttgtaaaagggcattcttcaactacagcacaatcatctcaactgaaagagtcccattctccctattaccacagctatgatccttattattctccaagttacatgcaccctgggcaggtcggtgcccctgcagctggaaatagtgggagcacgcagggaatgaagatcaagaaggagtctgaggaagatgctgaaaagaaagacaaggcagagcagttagattctaagaaagtggaccacaattctgcatccttacagcctcagcaccagtcggtgatcacacaaagacatcctgccctggctcagtcactttattatggccagtatgcatatgggctctatatggaccagaagtctctgatggccaccagccctgcctatagacagcagtatgagaagtactatgaggaccagaggctggcagagcagaaaatggcccagactgggagaggagactgtgaaaggaaaagtgagctccccttgaaagagctgggcaaggaggaaactaaacagaaaaatatgccatcggccacaatctcaaaagctccctctactccggagcctaacaaaaaccattctaaactagggccatcagtgcctaataaaactgaggagacaggtaaatcgcagcttctctccaatcaccagcagcagcttcaggccgacagcttcaaagctaagcagatggaaaaccaccagcttattaaggaggctgtagaaatgaagtctgtcatggactctatgaagcagacaggtgtagacccaacctcgagatttaaacaagacccagattcaagaacatggcatcattatgtataccagcccaaatatctggatcagcaaaagtcagaagaacttgatagagagaagaaattaaaagaggatagtccgaggaaaactcctaataaagagagtggtgtgcccagccttcctgtatcgttaacaagcattaaagaggagcccaaagaggccaagcatcctgattctcaatcaatggaggagagcaagctgaaaaatgatgatcgaaagactcctgtgaactggaaggactctcggggaacaagagtggctgtctcctcacccatgagtcagcatcagtcatacatacagtacttgcatgcttatccttacccacagatgtacgaccccagccatcctgcataccgggctgtttctcccgtcctaatgcacagttatcctggggcatatctctctccaggatttcattatcctgtttatgggaagatgtcagggagagaagagacagagaaagtcaataccagccctagcgtcaacacgaaaacaaccactgaatctaaagcactggatttgctccagcagcatgctaaccaataccgcagcaagtctcctgctcctgtggaaaaggctacagctgagcgggaacgggaggcagaaagggaaagggatcgccactcccccttcggccagcggcacctgcacacgcaccaccacacccacgttggcatgggttacccgctaatcccgggtcaatatgacccttttcaaggcttgacctctgctgcccttgttgcctctcagcaggtggctgcccaggcatctgcatctggaatgtttcctggacaaagaagagaataacaagattggacatgtacattgtcatgtgactggatcacatggggaagcgctttatacagacatcagttccatggtgttaatttgaaatgccttaatggcaggcaaaaaccagtcatttcatttttgtaaattacagattttatcacagagtaacaaatgttgctgtaattaaacttctgttttatatatatatacgtatacatatctgtatatatacatatatatatatataaatataaatatattctttactttttgtatcagtaaccaggctcgcacacacagggtctgctgccacgtcgcaaaccactcagtaaaggaaattaaaaatgtatttgtcatgttaaaaagtgttagccacaaaaggctacttactttcttttccttttcctttaaaattgtaaataaataatgttatgtatcagtgtgcctgaaccttgcatatccttcacatatttcccataagcccctcagaaaggctaactgtgatgatgacactttggtacaatttagatgtctatttggtggctcctgttaaagacgcaccagtgtaaaatgttcctgtagtcactgtttgtacttgtgtattgtggaaaaagtacttttggaaggcatggggttgccagtaccacaaaaactgtgttgtatataatgtaaagattaaaatggggaaataatgagcatctgtgaataatgaggtgtcattttttgataatcttgaatggcaaataacccaatagcctgcgtaccagagacatctgtgattgttctattacttgaatagttctacagtctttttttttttttaatgtttacaattatccagttttagaagagagagactttaacgccattgcctggttacttgttttatgctgtaatctagtttattttatgtaaaatgtatattgaatgctttccttttttatacctgccttaaataatttggcaatcagaattaaaaagtttttttttttttaaataatg

SEQ ID NO: 4453 - protein, 1512 aa, Homo sapiens; identical to SEQ ID NO: 544

SEQ ID NO: 4454 - DNA, 1139 bp, Homo sapiens
aaaaggtgattatccttgtgttgttgataaagggattttctttttagctaccgtaagatgcttactgtcataggtttatttttcgggtttggttattttcctttaaacctgatattggactgtgaggacaatacatgagccaccttactctccatccttccctgtcccctttactgattccccaatactaatcgttttttattctggtaacacccagacaagaaatattcgacttttcccccccccttcacaggaaaaggtggacctggactgagggtgtaaaatccctggacacattcgtggggcaggaaaaagaagaggaagattagaagattttttttttctttgagagaaagcccagcggagataaacgaatgtcccctcatctccaaagaaaagttcatcggatttttattctagagagctcatcttcaggatgtcagtgaacatttctactgcaggaaaaggtgtggatccaaatacagttgatacttatgacagtggcgatgattgggaaatcggggttggaaatttaataattgatttggacgctgatttggagaaggacagacagaaatttgagatgaataattccaccaccaccactagtagcagcaactccaaggattgtggaggtccggcctccagtggggctggtgctaccgcagccttagctgatggcctaaaatttgcttctgttcaggcctctgctccccaggggaattcacacaaagagaccagcaaatcaaaagtgaaaaggagtaaaacttctaaggatgctaataaatctctgccttctgctgccttgtatgggattcccgagatcagcagcactggcaagaggcaggaagtccaagggcgccctggagaggcaactggcatgaattcagcgctgggtcaaagtgtgagcagcggcggcagcggcaacccaaacagcaatagtaccagcaccagcacctctgccgccaccgcgggggcaggctcctgtgggaaaagcaaagaggagaagccaggtaaaagccagagcagccgagcgtgcaccgagggagccgagcagcgcaggcggccctctagccccgcacggccagcgcgccgtgggggatgcgtccctttgcctccgccacgctcacctctacccg

SEQ ID NO: 4455 - protein, 233 aa, Homo sapiens
MSVNISTAGKGVDPNTVDTYDSGDDWEIGVGNLIIDLDADLEKDRQKFEMNNSTTTTSSSNSKDCGGPASSGAGATAALADGLKFASVQASAPQGNSHKETSKSKVKRSKTSKDANKSLPSAALYGIPEISSTGKRQEVQGRPGEATGMNSALGQSVSSGGSGNPNSNSTSTSTSAATAGAGSCGKSKEEKPGKSQSSRACTEGAEQRRRPSSPARPARRGGCVPLPPPRSPL

SEQ ID NO: 4456 - DNA, 4238 bp, Homo sapiens
taataaaaataaaaaaaggctgcatgatatttcactgtattgttataccacatttactaattcatcagatgatgcacatttgggttgctgccaccttttggctattgtgaattatgctactatgaatattggtgtacaaatatctatagagtccctgccttactatgtttggttatatactcagaagtggaattgctcggtcatgtggtaattctcttatttatttatttacttacttgagacagtctcattctgttggccaggctggagtgcagtggtgtgatcatggctcactgttgtctcaaattcctgggcttcacgagtagctgggaccacaggcagacactatcatgcccagctagtttgttttaatttttgtagagacagggtcttgccatgttgcccaggctctgttatttaattttttggggcaattgccatactgttttctacagtggctatcccattttactttatttttcttgagtaatgtcagataagactgggcacgctcagggtggtttggtttggctgtagactttcctgttaatttcaaaccaaaattatatgaccaacataaggaattcctgtaaaccctttaatcagagtcactaattgcttacattttgccccatttgatttctcattttctctctctccagcaacatctgtgcgcgcgtgcacgcacacgtacacacacacacacacacacacacacacactctgtgggtgcatattattgttgaactgtttggagtaagtcaaagatgtgtcccctttattactaaatattttggtgtgtttcctaagaatgtggacattttcttgtataaccacagtagttactaaaatcaggacatttgatattgatacaatagtaatgctactttataaattagaaaataagttgaaaaataattgggatagggtgtaatcaggataggctatatgattgggataggctatataaaaaataattggacaggctatataatttaataattgggattaggctgtgtagcagtgtgcagtaaatatggaagtaggcattaatttttatatataatttttttcttttaagggagaagtctgttggaacttggaggaaacaatgccattattgcctttgaagatgcagacctcagcttagttgttccatcagctctcttcgctgctgtgggaacagctggccagaggtgtaccactgcgaggcgactgtttatacatgaaagcatccatgatgaggttgtaaacagacttaaaaaggcctatgcacagatccgagttgggaacccatgggaccctaatgttctctatgggccactccacaccaagcaggcagtgagcatgtttcttggagcagtggaagaagcaaagaaagaaggtggcacagtggtctatgggggcaaggttatggatcgccctggaaattatgtagaaccgacaattgtgacaggtcttggccacgatgcgtccattgcacacacagagacttttgctccgattctctatgtctttaaattcaagaatgaagaagaggtctttgcatggaataatgaagtaaaacagggactttcaagtagcatctttaccaaagatctgggcagaatctttcgctggcttggacctaaaggatcagactgtggcattgtaaatgtcaacattccaacaagtggggctgagattggaggtgcctttggaggagaaaagcacactggtggtggcagggagtctggcagtgatgcctggaaacagtacatgagaaggtctacttgtactatcaactacagtaaagaccttcctctggcccaaggaatcaagtttcagtaaaggtgttttagatgaacatcccttaatttgaggtgttccagcagctgtttttggagaagacaaagaaaattaaagttttccctgaataaatgcattattatgactgtgacagtgactaatccccctatgaccccaaagccctgattaaatcaagagattccttttttaaaaatcaaaataaaattgttacaacatagccatagttactaaaagatgagttaggtggatttttattatgtcaactagttgtacatggctttttaaaagttaatgattattttgtaattagaaaaaaatagtacgtaccagggtaggaatttgggaaaatacagaaccgaggagaaaacagaagtctttgcagtagatacagggtgtctcctgaccaagtgaaggattcaggggcggggggtgaatattgcttgacattacccacctatggcatgtgttggatgtcgtgtgattgaaagggggatgcattcccctgtatgcttggaccacagttcagtattcatgtggaataacttgcagtgcttaaaatgacaacaggcattcatcacagttatggctcttgcttatgaaggctgtgtcaacttggaagagatttctggggtagacagattttgttcctgtgctggagtctgccacctgctggaggactctgaggccaaaattgcccgtgcagagttgtatagaaaatgcgtctggaggctgggcaaggtggcttacgcctataatcccagcactttgagaggccgaggcgggtggatcagtagaggctaggagtttgagaccagcctggccgatatcgtgaaaccccgtctttaccaaaaaatacaaaaattagcccagtgtggtggcaggcacctgtaatcccagctattagggaggctgaggcaggagaattgtgtgaacccaggaggcagaggttgcagtgagcctagattgtgccactgcctgggcaacagtgagatcctgtctacaaaaaaaaaaaaaaaaaaaagtgcatctggatttttttatacaaccttagaccaccttctttagctttaggcgtctgcggttgcccttggatctgttctcaatcctcagtgtgtgtggcagcatgtggtcatagagagctgggcaaagttcactttctctttgctgacagtctcaccttttctcactgggaagctgcacaggagcctttgggctggttcagcccagaggcccctgttctcctgccttcctggcattctctgctccccttctgcatggcacccctctactcctgccaggttagaatggagcagaggcctttgaacaagatgacatttgtagacaacctgatccatcaggatgtggagagatctggacaaatggcaaataatttggggttgaattatggcccagagaagtaagcaaatgaaaaactaaacaattataaatgtatctgggaagcaaaggtattcataatatgtcccatggccagctgcgagcagtatttaactagacatgctgttgtcaatattgaacatgaatcaagccaaatactgatatagctattgagagaaggttggcaggaagaaatcatgggtgagggtatgtgggagtgataatcttagctatagattttaggtaaaactgattctgaaagctttctttgaaacaaatttataatttttcttctacatgtttctagcacaaggactcaattttttttggttataatgttcattaaaacatatgccttcaatttgttcctctttgttcttttttgctgatttagcagatataaatcacttgttagtatttttaactatccaagttaaaatgtacatttgtaagtgttattactggtcttatatttgaaggtgcaaggggtcttgtgctgctcattactggttatcttgagcatttcataactgctgcctcctcctaaatcctgtgttccaaccgctactgctggcaatgcccagcctccattgtggatgcggggaattgtgttcagcatgcttgcttctgccacggcactaaagcctaacttgcttaggatcttgctgtacttggagagagcatccattcgctgagcctagcagccaggctcttgtgactccctgggaagtgggtgaagacctggctcctggctgcagcagtgaggaggcaggccctccaggtgaagacttctcacaatggagggaaggcagttttctcaaaggaaattgagtgctattatgtactctgcttcctactttctctttcagggtgggaatctgttaagcctcctctctctcttgctctgcaaccacagaacacttctttttttttggtgtctcagttttgcccacactggagtgcagtggtgcaatagtggctcactgcagcctccaactcctgggctcaatctatccttccacctcatgctcccc

SEQ ID NO: 4457 - protein, 160 aa, Homo sapiens [sequence omitted]

SEQ ID NO: 4458 - DNA, 4187 bp, Homo sapiens
cgcaggctcctccggaagaccaggggcagacggggcggtggcggggtcgtgcccagtgggaggggtcgggtctgcccaatgggttctcccgggcggggggcggggctctatttcagcagctctcagggccttgggctcatcccgagtcccgggctcagtatgtggcgccttcctcgcgcgctgtgtgtgcacgctgcaaagaccagcaagctctctggaccttggagcaggcctgccgccttcatgtccactctcctcatcaatcagccccagtatgcgtggctgaaagagctggggctccgcgaggaaaacgagggcgtgtataatggaagctggggaggccggggagaggttattacgacctattgccctgctaacaacgagccaatagcaagagtccgacaggccagtgtggcagactatgaagaaactgtaaagaaagcaagagaagcatggaaaatctgggcagatattcctgctccaaaacgaggagaaatagtaagacagattggcgatgccttgcgggagaagatccaagtactaggaagcttggtgtctttggagatggggaaaatcttagtggaaggtgtgggtgaagttcaggagtatgtggatatctgtgactatgctgttggtttatcaaggatgattggaggacctatcttgccttctgaaagatctggccatgcactgattgagcagtggaatcccgtaggcctggttggaatcatcacggcattcaatttccctgtggcagtgtatggttggaacaacgccatcgccatgatctgtggaaatgtctgcctctggaaaggagctccaaccacttccctcattagtgtggctgtcacaaagataatagccaaggttctggaggacaacaagctgcctggtgcaatttgttccttgacttgtggtggagcagatattggcacagcaatggccaaagatgaacgagtgaacctgctgtccttcactgggagcactcaggtgggaaaacaggtgggcctgatggtgcaggagaggtttgggagaagtctgttggaacttggaggaaacaatgccattattgcctttgaagatgcagacctcagcttagttgttccatcagctctcttcgctgctgtgggaacagctggccagaggtgtaccactgcgaggcgactgtttatacatgaaagcatccatgatgaggttgtaaacagacttaaaaaggcctatgcacagatccgagttgggaacccatgggaccctaatgttctctatgggccactccacaccaagcaggcagtgagcatgtttcttggagcagtggaagaagcaaagaaagaaggtggcacagtggtctatgggggcaaggttatggatcgccctggaaattatgtagaaccgacaattgtgacaggtcttggccacgatgcgtccattgcacacacagagacttttgctccgattctctatgtctttaaattcaagaatgaagaagaggtctttgcatggaataatgaagtaaaacagggactttcaagtagcatctttaccaaagatctgggcagaatctttcgctggcttggacctaaaggatcagactgtggcattgtaaatgtcaacattccaacaagtggggctgagattggaggtgcctttggaggagaaaagcacactggtggtggcagggagtctggcagtgatgcctggaaacagtacatgagaaggtctacttgtactatcaactacagtaaagaccttcctctggcccaaggaatcaagtttcagtaaaggtgttttagatgaacatcccttaatttgaggtgttccagcagctgtttttggagaagacaaagaaaattaaagttttccctgaataaatgcattattatgactgtgacagtgactaatccccctatgaccccaaagccctgattaaatcaagagattccttttttaaaaatcaaaataaaattgttacaacatagccatagttactaaaagatgagttaggtggatttttattatgtcaactagttgtacatggctttttaaaagttaatgattattttgtaattagaaaaaaatagtacgtaccagggtaggaatttgggaaaatacagaaccgaggagaaaacagaagtctttgcagtagatacagggtgtctcctgaccaagtgaaggattcaggggcggggggtgaatattgcttgacattacccacctatggcatgtgttggatgtcgtgtgattgaaagggggatgcattcccctgtatgcttggaccacagttcagtattcatgtggaataacttgcagtgcttaaaatgacaacaggcattcatcacagttatggctcttgcttatgaaggctgtgtcaacttggaagagatttctggggtagacagattttgttcctgtgctggagtctgccacctgctggaggactctgaggccaaaattgcccgtgcagagttgtatagaaaatgcgtctggaggctgggcaaggtggcttacgcctataatcccagcactttgagaggccgaggcgggtggatcagtagaggctaggagtttgagaccagcctggccgatatcgtgaaaccccgtctttaccaaaaaatacaaaaattagcccagtgtggtggcaggcacctgtaatcccagctattagggaggctgaggcaggagaattgtgtgaacccaggaggcagaggttgcagtgagcctagattgtgccactgcctgggcaacagtgagatcctgtctacaaaaaaaaaaaaaaaaaaaagtgcatctggatttttttatacaaccttagaccaccttctttagctttaggcgtctgcggttgcccttggatctgttctcaatcctcagtgtgtgtggcagcatgtggtcatagagagctgggcaaagttcactttctctttgctgacagtctcaccttttctcactgggaagctgcacaggagcctttgggctggttcagcccagaggcccctgttctcctgccttcctggcattctctgctccccttctgcatggcacccctctactcctgccaggttagaatggagcagaggcctttgaacaagatgacatttgtagacaacctgatccatcaggatgtggagagatctggacaaatggcaaataatttggggttgaattatggcccagagaagtaagcaaatgaaaaactaaacaattataaatgtatctgggaagcaaaggtattcataatatgtcccatggccagctgcgagcagtatttaactagacatgctgttgtcaatattgaacatgaatcaagccaaatactgatatagctattgagagaaggttggcaggaagaaatcatgggtgagggtatgtgggagtgataatcttagctatagattttaggtaaaactgattctgaaagctttctttgaaacaaatttataatttttcttctacatgtttctagcacaaggactcaattttttttggttataatgttcattaaaacatatgccttcaatttgttcctctttgttcttttttgctgatttagcagatataaatcacttgttagtatttttaactatccaagttaaaatgtacatttgtaagtgttattactggtcttatatttgaaggtgcaaggggtcttgtgctgctcattactggttatcttgagcatttcataactgctgcctcctcctaaatcctgtgttccaaccgctactgctggcaatgcccagcctccattgtggatgcggggaattgtgttcagcatgcttgcttctgccacggcactaaagcctaacttgcttaggatcttgctgtacttggagagagcatccattcgctgagcctagcagccaggctcttgtgactccctgggaagtgggtgaagacctggctcctggctgcagcagtgaggaggcaggccctccaggtgaagacttctcacaatggagggaaggcagttttctcaaaggaaattgagtgctattatgtactctgcttcctactttctctttcagggtgggaatctgttaagcctcctctctctcttgctctgcaaccacagaacacttctttttttttggtgtctcagttttgcccacactggagtgcagtggtgcaatagtggctcactgcagcctccaactcctgggctcaatctatccttccacctcatgctcccc

SEQ ID NO: 4459 - protein, 566 aa, Homo sapiens
MGSPGRGAGLYFSSSQGLGLIPSPGLSMWRLPRALCVHAAKTSKLSGPWSRPAAFMSTLLINQPQYAWLKELGLREENEGVYNGSWGGRGEVITTYCPANNEPIARVRQASVADYEETVKKAREAWKIWADIPAPKRGEIVRQIGDALREKIQVLGSLVSLEMGKILVEGVGEVQEYVDICDYAVGLSRMIGGPILPSERSGHALIEQWNPVGLVGIITAFNFPVAVYGWNNAIAMICGNVCLWKGAPTTSLISVAVTKIIAKVLEDNKLPGAICSLTCGGADIGTAMAKDERVNLLSFTGSTQVGKQVGLMVQERFGRSLLELGGNNAIIAFEDADLSLVVPSALFAAVGTAGQRCTTARRLFIHESIHDEVVNRLKKAYAQIRVGNPWDPNVLYGPLHTKQAVSMFLGAVEEAKKEGGTVVYGGKVMDRPGNYVEPTIVTGLGHDASIAHTETFAPILYVFKFKNEEEVFAWNNEVKQGLSSSIFTKDLGRIFRWLGPKGSDCGIVNVNIPTSGAEIGGAFGGEKHTGGGRESGSDAWKQYMRRSTCTINYSKDLPLAQGIKFQ

SEQ ID NO: 4460 - DNA, 3569 bp, Homo sapiens
taataaaaataaaaaaaggctgcatgatatttcactgtattgttataccacatttactaattcatcagatgatgcacatttgggttgctgccaccttttggctattgtgaattatgctactatgaatattggtgtacaaatatctatagagtccctgccttactatgtttggttatatactcagaagtggaattgctcggtcatgtggtaattctcttatttatttatttacttacttgagacagtctcattctgttggccaggctggagtgcagtggtgtgatcatggctcactgttgtctcaaattcctgggcttcacgagtagctgggaccacaggcagacactatcatgcccagctagtttgttttaatttttgtagagacagggtcttgccatgttgcccaggctctgttatttaattttttggggcaattgccatactgttttctacagtggctatcccattttactttatttttcttgagtaatgtcagataagactgggcacgctcagggtggtttggtttggctgtagactttcctgttaatttcaaaccaaaattatatgaccaacataaggaattcctgtaaaccctttaatcagagtcactaattgcttacattttgccccatttgatttctcattttctctctctccagcaacatctgtgcgcgcgtgcacgcacacgtacacacacacacacacacacacacacacactctgtgggtgcatattattgttgaactgtttggagtaagtcaaagatgtgtcccctttattactaaatattttggtgtgtttcctaagaatgtggacattttcttgtataaccacagtagttactaaaatcaggacatttgatattgatacaatagtaatgctactttataaattagaaaataagttgaaaaataattgggatagggtgtaatcaggataggctatatgattgggataggctatataaaaaataattggacaggctatataatttaataattgggattaggctgtgtagcagtgtgcagtaaatatggaagtaggcattaatttttatatataatttttttcttttaagggagaagtctgttggaacttggaggaaacaatgccattattgcctttgaagatgcagacctcagcttagttgttccatcagctctcttcgctgctgtgggaacagctggccagaggtgtaccactgcgaggcgactgtttatacatgaaagcatccatgatgaggttgtaaacagacttaaaaaggcctatgcacagatccgagttgggaacccatgggaccctaatgttctctatgggccactccacaccaagcaggcagtgagcatgtttcttggagcagtggaagaagcaaagaaagaaggtggcacagtggtctatgggggcaaggttatggatcgccctggaaattatgtagaaccgacaattgtgacaggtcttggccacgatgcgtccattgcacacacagagacttttgctccgattctctatgtctttaaattcaagaatgaagaagaggtctttgcatggaataatgaagtaaaacagggactttcaagtagcatctttaccaaagatctgggcagaatctttcgctggcttggacctaaaggatcagactgtggcattgtaaatgtcaacattccaacaagtggggctgagattggaggtgcctttggaggagaaaagcacactggtggtggcagggagtctggcagtgatgcctggaaacagtacatgagaaggtctacttgtactatcaactacagtaaagaccttcctctggcccaaggaatcaagtttcagtaaaggtgttttagatgaacatcccttaatttgaggtgttccagcagctgtttttggagaagacaaagaaaattaaagttttccctgaataaatgcattattatgactgtgacagtgactaatccccctatgaccccaaagccctgattaaatcaagagattccttttttaaaaatcaaaataaaattgttacaacatagccatagttactaaaagatgagttaggtggatttttattatgtcaactagttgtacatggctttttaaaagttaatgattattttgtaattagaaaaaaatagtacgtaccagggtaggaatttgggaaaatacagaaccgaggagaaaacagaagtctttgcagtagatacagggtgtctcctgaccaagtgaaggattcaggggcggggggtgaatattgcttgacattacccacctatggcatgtgttggatgtcgtgtgattgaaagggggatgcattcccctgtatgcttggaccacagttcagtattcatgtggaataacttgcagtgcttaaaatgacaacaggcattcatcacagttatggctcttgcttatgaaggctgtgtcaacttggaagagatttctggggtagacagattttgttcctgtgctggagtctgccacctgctggaggactctgaggccaaaattgcccgtgcagagttgtatagaaaatgcgtctggaggctgggcaaggtggcttacgcctataatcccagcactttgagaggccgaggcgggtggatcagtagaggctaggagtttgagaccagcctggccgatatcgtgaaaccccgtctttaccaaaaaatacaaaaattagcccagtgtggtggcaggcacctgtaatcccagctattagggaggctgaggcaggagaattgtgtgaacccaggaggcagaggttgcagtgagcctagattgtgccactgcctgggcaacagtgagatcctgtctacaaaaaaaaaaaaaaaaaaaagtgcatctggatttttttatacaaccttagaccaccttctttagctttaggcgtctgcggttgcccttggatctgttctcaatcctcagtgtgtgtggcagcatgtggtcatagagagctgggcaaagttcactttctctttgctgacagtctcaccttttctcactgggaagctgcacaggagcctttgggctggttcagcccagaggcccctgttctcctgccttcctggcattctctgctccccttctgcatggcacccctctactcctgccaggttagaatggagcagaggcctttgaacaagatgacatttgtagacaacctgatccatcaggatgtggagagatctggacaaatggcaaataatttggggttgaattatggcccagagaagtaagcaaatgaaaaactaaacaattataaatgtatctgggaagcaaaggtattcataatatgtcccatggccagctgcgagcagtatttaactagacatgctgttgtcaatattgaacatgaatcaagccaaatactgatatagctattgagagaaggttggcaggaagaaatcatgggtgagggtatgtgggagtgataatcttagctatagattttaggtaaaactgattctgaaagctttctttgaaacaaatttataatttttcttctacatgtttctagcacaaggactcaattttttttggttataatgttcattaaaacatatgccttcaatttg

SEQ ID NO: 4461 - protein, 160 aa, Homo sapiens [sequence omitted]

SEQ ID NO: 4462 - DNA, 3518 bp, Homo sapiens
cgcaggctcctccggaagaccaggggcagacggggcggtggcggggtcgtgcccagtgggaggggtcgggtctgcccaatgggttctcccgggcggggggcggggctctatttcagcagctctcagggccttgggctcatcccgagtcccgggctcagtatgtggcgccttcctcgcgcgctgtgtgtgcacgctgcaaagaccagcaagctctctggaccttggagcaggcctgccgccttcatgtccactctcctcatcaatcagccccagtatgcgtggctgaaagagctggggctccgcgaggaaaacgagggcgtgtataatggaagctggggaggccggggagaggttattacgacctattgccctgctaacaacgagccaatagcaagagtccgacaggccagtgtggcagactatgaagaaactgtaaagaaagcaagagaagcatggaaaatctgggcagatattcctgctccaaaacgaggagaaatagtaagacagattggcgatgccttgcgggagaagatccaagtactaggaagcttggtgtctttggagatggggaaaatcttagtggaaggtgtgggtgaagttcaggagtatgtggatatctgtgactatgctgttggtttatcaaggatgattggaggacctatcttgccttctgaaagatctggccatgcactgattgagcagtggaatcccgtaggcctggttggaatcatcacggcattcaatttccctgtggcagtgtatggttggaacaacgccatcgccatgatctgtggaaatgtctgcctctggaaaggagctccaaccacttccctcattagtgtggctgtcacaaagataatagccaaggttctggaggacaacaagctgcctggtgcaatttgttccttgacttgtggtggagcagatattggcacagcaatggccaaagatgaacgagtgaacctgctgtccttcactgggagcactcaggtgggaaaacaggtgggcctgatggtgcaggagaggtttgggagaagtctgttggaacttggaggaaacaatgccattattgcctttgaagatgcagacctcagcttagttgttccatcagctctcttcgctgctgtgggaacagctggccagaggtgtaccactgcgaggcgactgtttatacatgaaagcatccatgatgaggttgtaaacagacttaaaaaggcctatgcacagatccgagttgggaacccatgggaccctaatgttctctatgggccactccacaccaagcaggcagtgagcatgtttcttggagcagtggaagaagcaaagaaagaaggtggcacagtggtctatgggggcaaggttatggatcgccctggaaattatgtagaaccgacaattgtgacaggtcttggccacgatgcgtccattgcacacacagagacttttgctccgattctctatgtctttaaattcaagaatgaagaagaggtctttgcatggaataatgaagtaaaacagggactttcaagtagcatctttaccaaagatctgggcagaatctttcgctggcttggacctaaaggatcagactgtggcattgtaaatgtcaacattccaacaagtggggctgagattggaggtgcctttggaggagaaaagcacactggtggtggcagggagtctggcagtgatgcctggaaacagtacatgagaaggtctacttgtactatcaactacagtaaagaccttcctctggcccaaggaatcaagtttcagtaaaggtgttttagatgaacatcccttaatttgaggtgttccagcagctgtttttggagaagacaaagaaaattaaagttttccctgaataaatgcattattatgactgtgacagtgactaatccccctatgaccccaaagccctgattaaatcaagagattccttttttaaaaatcaaaataaaattgttacaacatagccatagttactaaaagatgagttaggtggatttttattatgtcaactagttgtacatggctttttaaaagttaatgattattttgtaattagaaaaaaatagtacgtaccagggtaggaatttgggaaaatacagaaccgaggagaaaacagaagtctttgcagtagatacagggtgtctcctgaccaagtgaaggattcaggggcggggggtgaatattgcttgacattacccacctatggcatgtgttggatgtcgtgtgattgaaagggggatgcattcccctgtatgcttggaccacagttcagtattcatgtggaataacttgcagtgcttaaaatgacaacaggcattcatcacagttatggctcttgcttatgaaggctgtgtcaacttggaagagatttctggggtagacagattttgttcctgtgctggagtctgccacctgctggaggactctgaggccaaaattgcccgtgcagagttgtatagaaaatgcgtctggaggctgggcaaggtggcttacgcctataatcccagcactttgagaggccgaggcgggtggatcagtagaggctaggagtttgagaccagcctggccgatatcgtgaaaccccgtctttaccaaaaaatacaaaaattagcccagtgtggtggcaggcacctgtaatcccagctattagggaggctgaggcaggagaattgtgtgaacccaggaggcagaggttgcagtgagcctagattgtgccactgcctgggcaacagtgagatcctgtctacaaaaaaaaaaaaaaaaaaaagtgcatctggatttttttatacaaccttagaccaccttctttagctttaggcgtctgcggttgcccttggatctgttctcaatcctcagtgtgtgtggcagcatgtggtcatagagagctgggcaaagttcactttctctttgctgacagtctcaccttttctcactgggaagctgcacaggagcctttgggctggttcagcccagaggcccctgttctcctgccttcctggcattctctgctccccttctgcatggcacccctctactcctgccaggttagaatggagcagaggcctttgaacaagatgacatttgtagacaacctgatccatcaggatgtggagagatctggacaaatggcaaataatttggggttgaattatggcccagagaagtaagcaaatgaaaaactaaacaattataaatgtatctgggaagcaaaggtattcataatatgtcccatggccagctgcgagcagtatttaactagacatgctgttgtcaatattgaacatgaatcaagccaaatactgatatagctattgagagaaggttggcaggaagaaatcatgggtgagggtatgtgggagtgataatcttagctatagattttaggtaaaactgattctgaaagctttctttgaaacaaatttataatttttcttctacatgtttctagcacaaggactcaattttttttggttataatgttcattaaaacatatgccttcaatttg

SEQ ID NO: 4463 - protein, 566 aa, Homo sapiens; identical to SEQ ID NO: 4459

SEQ ID NO: 4464 - DNA, 2038 bp, Homo sapiens
taataaaaataaaaaaaggctgcatgatatttcactgtattgttataccacatttactaattcatcagatgatgcacatttgggttgctgccaccttttggctattgtgaattatgctactatgaatattggtgtacaaatatctatagagtccctgccttactatgtttggttatatactcagaagtggaattgctcggtcatgtggtaattctcttatttatttatttacttacttgagacagtctcattctgttggccaggctggagtgcagtggtgtgatcatggctcactgttgtctcaaattcctgggcttcacgagtagctgggaccacaggcagacactatcatgcccagctagtttgttttaatttttgtagagacagggtcttgccatgttgcccaggctctgttatttaattttttggggcaattgccatactgttttctacagtggctatcccattttactttatttttcttgagtaatgtcagataagactgggcacgctcagggtggtttggtttggctgtagactttcctgttaatttcaaaccaaaattatatgaccaacataaggaattcctgtaaaccctttaatcagagtcactaattgcttacattttgccccatttgatttctcattttctctctctccagcaacatctgtgcgcgcgtgcacgcacacgtacacacacacacacacacacacacacacactctgtgggtgcatattattgttgaactgtttggagtaagtcaaagatgtgtcccctttattactaaatattttggtgtgtttcctaagaatgtggacattttcttgtataaccacagtagttactaaaatcaggacatttgatattgatacaatagtaatgctactttataaattagaaaataagttgaaaaataattgggatagggtgtaatcaggataggctatatgattgggataggctatataaaaaataattggacaggctatataatttaataattgggattaggctgtgtagcagtgtgcagtaaatatggaagtaggcattaatttttatatataatttttttcttttaagggagaagtctgttggaacttggaggaaacaatgccattattgcctttgaagatgcagacctcagcttagttgttccatcagctctcttcgctgctgtgggaacagctggccagaggtgtaccactgcgaggcgactgtttatacatgaaagcatccatgatgaggttgtaaacagacttaaaaaggcctatgcacagatccgagttgggaacccatgggaccctaatgttctctatgggccactccacaccaagcaggcagtgagcatgtttcttggagcagtggaagaagcaaagaaagaaggtggcacagtggtctatgggggcaaggttatggatcgccctggaaattatgtagaaccgacaattgtgacaggtcttggccacgatgcgtccattgcacacacagagacttttgctccgattctctatgtctttaaattcaagaatgaagaagaggtctttgcatggaataatgaagtaaaacagggactttcaagtagcatctttaccaaagatctgggcagaatctttcgctggcttggacctaaaggatcagactgtggcattgtaaatgtcaacattccaacaagtggggctgagattggaggtgcctttggaggagaaaagcacactggtggtggcagggagtctggcagtgatgcctggaaacagtacatgagaaggtctacttgtactatcaactacagtaaagaccttcctctggcccaaggaatcaagtttcagtaaaggtgttttagatgaacatcccttaatttgaggtgttccagcagctgtttttggagaagacaaagaaaattaaagttttccctgaataaatgcattattatgactgtgacagtgactaatccccctatgaccccaaagccctgattaaatcaagagattccttttttaaaaatcaaaataaaattgttacaacatagccatagttact

SEQ ID NO: 4465 - protein, 160 aa, Homo sapiens [sequence omitted]

SEQ ID NO: 4466 - DNA, 1987 bp, Homo sapiens
cgcaggctcctccggaagaccaggggcagacggggcggtggcggggtcgtgcccagtgggaggggtcgggtctgcccaatgggttctcccgggcggggggcggggctctatttcagcagctctcagggccttgggctcatcccgagtcccgggctcagtatgtggcgccttcctcgcgcgctgtgtgtgcacgctgcaaagaccagcaagctctctggaccttggagcaggcctgccgccttcatgtccactctcctcatcaatcagccccagtatgcgtggctgaaagagctggggctccgcgaggaaaacgagggcgtgtataatggaagctggggaggccggggagaggttattacgacctattgccctgctaacaacgagccaatagcaagagtccgacaggccagtgtggcagactatgaagaaactgtaaagaaagcaagagaagcatggaaaatctgggcagatattcctgctccaaaacgaggagaaatagtaagacagattggcgatgccttgcgggagaagatccaagtactaggaagcttggtgtctttggagatggggaaaatcttagtggaaggtgtgggtgaagttcaggagtatgtggatatctgtgactatgctgttggtttatcaaggatgattggaggacctatcttgccttctgaaagatctggccatgcactgattgagcagtggaatcccgtaggcctggttggaatcatcacggcattcaatttccctgtggcagtgtatggttggaacaacgccatcgccatgatctgtggaaatgtctgcctctggaaaggagctccaaccacttccctcattagtgtggctgtcacaaagataatagccaaggttctggaggacaacaagctgcctggtgcaatttgttccttgacttgtggtggagcagatattggcacagcaatggccaaagatgaacgagtgaacctgctgtccttcactgggagcactcaggtgggaaaacaggtgggcctgatggtgcaggagaggtttgggagaagtctgttggaacttggaggaaacaatgccattattgcctttgaagatgcagacctcagcttagttgttccatcagctctcttcgctgctgtgggaacagctggccagaggtgtaccactgcgaggcgactgtttatacatgaaagcatccatgatgaggttgtaaacagacttaaaaaggcctatgcacagatccgagttgggaacccatgggaccctaatgttctctatgggccactccacaccaagcaggcagtgagcatgtttcttggagcagtggaagaagcaaagaaagaaggtggcacagtggtctatgggggcaaggttatggatcgccctggaaattatgtagaaccgacaattgtgacaggtcttggccacgatgcgtccattgcacacacagagacttttgctccgattctctatgtctttaaattcaagaatgaagaagaggtctttgcatggaataatgaagtaaaacagggactttcaagtagcatctttaccaaagatctgggcagaatctttcgctggcttggacctaaaggatcagactgtggcattgtaaatgtcaacattccaacaagtggggctgagattggaggtgcctttggaggagaaaagcacactggtggtggcagggagtctggcagtgatgcctggaaacagtacatgagaaggtctacttgtactatcaactacagtaaagaccttcctctggcccaaggaatcaagtttcagtaaaggtgttttagatgaacatcccttaatttgaggtgttccagcagctgtttttggagaagacaaagaaaattaaagttttccctgaataaatgcattattatgactgtgacagtgactaatccccctatgaccccaaagccctgattaaatcaagagattccttttttaaaaatcaaaataaaattgttacaacatagccatagttact

SEQ ID NO: 4467 - protein, 566 aa, Homo sapiens; identical to SEQ ID NO: 4459

SEQ ID NO: 4468 - DNA, 1887 bp, Homo sapiens
cgcaggctcctccggaagaccaggggcagacggggcggtggcggggtcgtgcccagtgggaggggtcgggtctgcccaatgggttctcccgggcggggggcggggctctatttcagcagctctcagggccttgggctcatcccgagtcccgggctcagtatgtggcgccttcctcgcgcgctgtgtgtgcacgctgcaaagaccagcaagctctctggaccttggagcaggcctgccgccttcatgtccactctcctcatcaatcagccccagtatgcgtggctgaaagagctggggctccgcgaggaaaacgagggcgtgtataatggaagctggggaggccggggagaggttattacgacctattgccctgctaacaacgagccaatagcaagagtccgacaggccagtgtggcagactatgaagaaactgtaaagaaagcaagagaagcatggaaaatctgggcagatattcctgctccaaaacgaggagaaatagtaagacagattggcgatgccttgcgggagaagatccaagtactaggaagcttggtgtctttggagatggggaaaatcttagtggaaggtgtgggtgaagttcaggagtatgtggatatctgtgactatgctgttggtttatcaaggatgattggaggacctatcttgccttctgaaagatctggccatgcactgattgagcagtggaatcccgtaggcctggttggaatcatcacggcattcaatttccctgtggcagtgtatggttggaacaacgccatcgccatgatctgtggaaatgtctgcctctggaaaggagctccaaccacttccctcattagtgtggctgtcacaaagataatagccaaggttctggaggacaacaagctgcctggtgcaatttgttccttgacttgtggtggagcagatattggcacagcaatggccaaagatgaacgagtgaacctgctgtccttcactgggagcactcaggtgggaaaacaggtgggcctgatggtgcaggagaggtttgggagaagtctgttggaacttggaggaaacaatgccattattgcctttgaagatgcagacctcagcttagttgttccatcagctctcttcgctgctgtgggaacagctggccagaggtgtaccactgcgaggcgactgtttatacatgaaagcatccatgatgaggttgtaaacagacttaaaaaggcctatgcacagatccgagttgggaacccatgggaccctaatgttctctatgggccactccacaccaagcaggcagtgagcatgtttcttggagcagtggaagaagcaaagaaagaaggtggcacagtggtctatgggggcaaggttatggatcgccctggaaattatgtagaaccgacaattgtgacaggtcttggccacgatgcgtccattgcacacacagagacttttgctccgattctctatgtctttaaattcaagaatgaagaagaggtctttgcatggaataatgaagtaaaacagggactttcaagtagcatctttaccaaagatctgggcagaatctttcgctggcttggacctaaaggatcagactgtggcattgtaaatgtcaacattccaacaagtggggctgagattggaggtgcctttggaggagaaaagcacactggtggtggcagggagtctggcagtgatgcctggaaacagtacatgagaaggtctacttgtactatcaactacagtaaagaccttcctctggcccaaggaatcaagtttcagtaaaggtgttttagatgaacatcccttaatttgaggtgttccagcagctgtttttggagaagacaaagaaaattaaagttttccctgaataaatgcattattatgactgtg

SEQ ID NO: 4469 - protein, 566 aa, Homo sapiens; identical to SEQ ID NO: 4459

SEQ ID NO: 4470 - DNA, 547 bp, Homo sapiens
atgtggcgccttcctcgcgcgctgtgtgtgcacgctgcaaagaccagcaagctctctggaccttggagcaggcctgccgccttcatgtccactctcctcatcaatcagccccagtatgcgtggctgaaagagctggggctccgcgaggaaaacgagggcgtgtataatggaagctggggaggccggggagaggttattacgacctattgccctgctaacaacgagccaatagcaagagtccgacagctgggaccacaggcagacactatcatgcccagctagtttgttttaatttttgtagagacagggtcttgccatgttgcccaggctctgttatttaattttttggggcaattgccatactgttttctacagtggctatcccattttactttatttttcttgagtaatgtcagataagactgggcacgctcagggtggtttggtttggctgtagactttcctgttaatttcaaaccaaaattatatgaccaacataaggaattcctgtaaaccctttaatcagagtcactaattgcttacattt

SEQ ID NO: 4471 - protein, 93 aa, Homo sapiens
MWRLPRALCVHAAKTSKLSGPWSRPAAFMSTLLINQPQYAWLKELGLREENEGVYNGSWGGRGEVITTYCPANNEPIARVRQLGPQADTIMPS

SEQ ID NO: 4472 - DNA, 1177 bp, Homo sapiens
cgcaggctcctccggaagaccaggggcagacggggcggtggcggggtcgtgcccagtgggaggggtcgggtctgcccaatgggttctcccgggcggggggcggggctctatttcagcagctctcagggccttgggctcatcccgagtcccgggctcagtatgtggcgccttcctcgcgcgctgtgtgtgcacgctgcaaagaccagcaagctctctggaccttggagcaggcctgccgccttcatgtccactctcctcatcaatcagccccagtatgcgtggctgaaagagctggggctccgcgaggaaaacgagggcgtgtataatggaagctggggaggccggggagaggttattacgacctattgccctgctaacaacgagccaatagcaagagtccgacaggccagtgtggcagactatgaagaaactgtaaagaaagcaagagaagcatggaaaatctgggcagatattcctgctccaaaacgaggagaaatagtaagacagattggcgatgccttgcgggagaagatccaagtactaggaagcttggtgtctttggagatggggaaaatcttagtggaaggtgtgggtgaagttcaggagtatgtggatatctgtgactatgctgttggtttatcaaggatgattggaggacctatcttgccttctgaaagatctggccatgcactgattgagcagtggaatcccgtaggcctggttggaatcatcacggcattcaatttccctgtggcagtgtatggttggaacaacgccatcgccatgatctgtggaaatgtctgcctctggaaaggagctccaaccacttccctcattagtgtggctgtcacaaagataatagccaaggttctggaggacaacaagctgcctggtgcaatttgttccttgacttgtggtggagcagatattggcacagcaatggccaaagatgaacgagtgaacctgctgtccttcactgggagcactcaggtgggaaaacaggtgggcctgatggtgcaggagaggtttgagcaatggaaatgagaagatactctgctgttgtcacatatgctcctgatatcacaaatgaataaaagttattcacatggaagctgattttaaagtgcacttaaggaaatcgatgatcaaaagatcagtaataaatgtatgtctaagg

SEQ ID NO: 4473 - protein, 321 aa, Homo sapiens
MGSPGRGAGLYFSSSQGLGLIPSPGLSMWRLPRALCVHAAKTSKLSGPWSRPAAFMSTLLINQPQYAWLKELGLREENEGVYNGSWGGRGEVITTYCPANNEPIARVRQASVADYEETVKKAREAWKIWADIPAPKRGEIVRQIGDALREKIQVLGSLVSLEMGKILVEGVGEVQEYVDICDYAVGLSRMIGGPILPSERSGHALIEQWNPVGLVGIITAFNFPVAVYGWNNAIAMICGNVCLWKGAPTTSLISVAVTKIIAKVLEDNKLPGAICSLTCGGADIGTAMAKDERVNLLSFTGSTQVGKQVGLMVQERFEQWK

SEQ ID NO: 4474 - DNA, 700 bp, Homo sapiens
cgcaggctcctccggaagaccaggggcagacggggcggtggcggggtcgtgcccagtgggaggggtcgggtctgcccaatgggttctcccgggcggggggcggggctctatttcagcagctctcagggccttgggctcatcccgagtcccgggctcagtatgtggcgccttcctcgcgcgctgtgtgtgcacgctgcaaagaccagcaagctctctggaccttggagcaggcctgccgccttcatgtccactctcctcatcaatcagccccagtatgcgtggctgaaagagctggggctccgcgaggaaaacgagggcgtgtataatggaagctggggaggccggggagaggttattacgacctattgccctgctaacaacgagccaatagcaagagtccgacaggccagtgtggcagactatgaagaaactgtaaagaaagcaagagaagcatggaaaatctgggcagatattcctgctccaaaacgaggagaaatagtaagacagattggcgatgccttgcgggagaagatccaagtactaggaagcttggtgtctttggagatggggaaaatcttagtggaaggtgtgggtgaagttcaggagtatgtggatatctgtgactatgctgttggtttatcaaggatgattggaggacaacaagctgcctggtgcaatttgttccttgacttgtggtgga

SEQ ID NO: 4475 - protein, 206 aa, Homo sapiens
MGSPGRGAGLYFSSSQGLGLIPSPGLSMWRLPRALCVHAAKTSKLSGPWSRPAAFMSTLLINQPQYAWLKELGLREENEGVYNGSWGGRGEVITTYCPANNEPIARVRQASVADYEETVKKAREAWKIWADIPAPKRGEIVRQIGDALREKIQVLGSLVSLEMGKILVEGVGEVQEYVDICDYAVGLSRMIGGQQAAWCNLFLDLW

SEQ ID NO: 4476 - DNA, 748 bp, Homo sapiens
cgcaggctcctccggaagaccaggggcagacggggcggtggcggggtcgtgcccagtgggaggggtcgggtctgcccaatgggttctcccgggcggggggcggggctctatttcagcagctctcagggccttgggctcatcccgagtcccgggctcagtatgtggcgccttcctcgcgcgctgtgtgtgcacgctgcaaagaccagcaagctctctggaccttggagcaggcctgccgccttcatgtccactctcctcatcaatcagccccagtatgcgtggctgaaagagctggggctccgcgaggaaaacgagggcgtgtataatggaagctggggaggccggggagaggttattacgacctattgccctgctaacaacgagccaatagcaagagtccgacaggccagtgtggcagactatgaagaaactgtaaagaaagcaagagaagcatggaaaatctgggcagatattcctgctccaaaacgaggagaaatagtaagacagattggcgatgccttgcgggagaagatccaagtactaggaagcttggtgtctttggagatggggaaaatcttagtggaaggtgtgggtgaagttcaggagtatgtggatatctgtgactatgctgttggtttatcaaggatgattggaggacctatcttgccttctgaaagtaagcaatgaaattagttaagctgagttttgtactctgatatacagagctccaaaaaaaataaaatactct

SEQ ID NO: 4477 - protein, 202 aa, Homo sapiens
MGSPGRGAGLYFSSSQGLGLIPSPGLSMWRLPRALCVHAAKTSKLSGPWSRPAAFMSTLLINQPQYAWLKELGLREENEGVYNGSWGGRGEVITTYCPANNEPIARVRQASVADYEETVKKAREAWKIWADIPAPKRGEIVRQIGDALREKIQVLGSLVSLEMGKILVEGVGEVQEYVDICDYAVGLSRMIGGPILPSESKQ

SEQ ID NO: 4478 - DNA, 1985 bp, Homo sapiens
gctggcgagtgtaccctttctgcagaaagtaaaaatggccttattcagtaagttaaatttatgttgctatttctttacgacaccggaaaacaaacatttcaaacaccatgctgagaactcagtccttgttttggggagggatgcacttggaagattcgagctaaggtacaatcctccctaggtatccgcgggtcattgttttcaggacccccacagataccaacatccgccatgctcaagccccttacattatgtgggggtgcacggtgggtccttcccatccgcaggttcggcatccgtggatggggagtggatacagagggcggactatacagcttgaaaggcttccctggaagcaatatgtagagtggattgtggaggagcaagaacagaagcggggaggcttgtccagagcatacaggggaaggatgtacggccaagggaggaatcccagacgaccgcgatacgtgacatatttatgtttgcacgaaaataaagtttggaagaaaagtgttgggggaacaagggattcattttcccggggtagttggaatgcaatgggacgcctcaggccgctgggacaggctggcctccgcgcgggggcgcccgagcagccgagccgccgggccttccggctgccccgccggaagtgctctcctgacccgccgctgtgcagcgcagcgcaccgcgggaagatggcgttggaggtcggcgatatggaagatgggcagctttccgactcggattccgacatgacggtcgcacccagcgacaggccgctgcaattgccaaaagtgctaggtggcgacagtgctatgagggccttccagaacacggcaactgcatgtgcaccagtatcacattatcgagctgttgaaagtgtggattcaagtgaagaaagtttttctgattcagatgatgatagctgtctttggaaacgcaaacgacagaaatgttttaaccctcctcccaaaccagagccttttcagtttggccagagcagtcagaaaccacctgttgctggaggaaagaagattaacaacatatggggtgctgtgctgcaggaacagaatcaagatgcagtggccactgaacttggtatcttgggaatggagggcactattgacagaagcagacaatccgagacctacaattatttgcttgccaagaaacttaggaaggaatctcaagagcatacaaaagatctagacaaggaactagatgaatatatgcatggtggcaaaaaaatgggatcaaaggaagaggaaaatgggcaaggtcatctcaaaaggaaacgacctgtcaaagacaggctagggaacagaccagaaatgaactataaaggtcgatacgagatcacagcggaagattctcaagagaaagtggctgatgaaatttcattcaggttacaggaaccaaagaaagacctgatagcccgagtagtgaggattattggtaacaaaaaggcaattgaacttctgatggaaaccgctgaagttgaacaaaatggtggtctctttataatgaatggtagtcgaagaagaacaccaggtggagtttttctgaatctcttgaaaaacactcctagtatcagcgaggaacaaattaaggacattttctacattgaaaaccaaaaggaatatgaaaataaaaaagctgctaggaagaggagaacacaagtgttggggaaaaagatgaaacaagctattaaaagtctaaattttcaagaagatgatgatacatcacgagaaacttttgcaagtgacacgaatgaggccttggcctctcttgatgagtcacaggaaggacatgcagaagccaagttggaggcagaggaagccattgaagttgatcattctcatgatttggacatcttttaagtacattttcaacagtttgaggactaagcctttctaaaataacattgtaataaaccatttttactgagattgcaacgttttgcactgataaacatgagaatctgg

SEQ ID NO: 4479 - protein, 542 aa, Homo sapiens
MWGCTVGPSHPQVRHPWMGSGYRGRTIQLERLPWKQYVEWIVEEQEQKRGGLSRAYRGRMYGQGRNPRRPRYVTYLCLHENKVWKKSVGGTRDSFSRGSWNAMGRLRPLGQAGLRAGAPEQPSRRAFRLPRRKCSPDPPLCSAAHRGKMALEVGDMEDGQLSDSDSDMTVAPSDRPLQLPKVLGGDSAMRAFQNTATACAPVSHYRAVESVDSSEESFSDSDDDSCLWKRKRQKCFNPPPKPEPFQFGQSSQKPPVAGGKKINNIWGAVLQEQNQDAVATELGILGMEGTIDRSRQSETYNYLLAKKLRKESQEHTKDLDKELDEYMHGGKKMGSKEEENGQGHLKRKRPVKDRLGNRPEMNYKGRYEITAEDSQEKVADEISFRLQEPKKDLIARVVRIIGNKKAIELLMETAEVEQNGGLFIMNGSRRRTPGGVFLNLLKNTPSISEEQIKDIFYIENQKEYENKKAARKRRTQVLGKKMKQAIKSLNFQEDDDTSRETFASDTNEALASLDESQEGHAEAKLEAEEAIEVDHSHDLDIF

SEQ ID NO: 4480 - DNA, 2287 bp, Homo sapiens
gctggcgagtgtaccctttctgcagaaagtaaaaatggccttattcagtaagttaaatttatgttgctatttctttacgacaccggaaaacaaacatttcaaacaccatgctgagaactcagtccttgttttggggagggatgcacttggaagattcgagctaaggtacaatcctccctaggtatccgcgggtcattgttttcaggacccccacagataccaacatccgccatgctcaagccccttacattatgtgggggtgcacggtgggtccttcccatccgcaggttcggcatccgtggatggggagtggatacagagggcggactatacagcttgaaaggcttccctggaagcaatatgtagagtggattgtggaggagcaagaacagaagcggggaggcttgtccagagcatacaggggaaggatgtacggccaagggaggaatcccagacgaccgcgatacgtgacatatttatgtttgcacgaaaataaagtttggaagaaaagtgttgggggaacaagggattcattttcccggggtagttggaatgcaatgggacgcctcaggccgctgggacaggctggcctccgcgcgggggcgcccgagcagccgagccgccgggccttccggctgccccgccggaagtgctctcctgacccgccgctgtgcagcgcagcgcaccgcgggaagatggcgttggaggtcggcgatatggaagatgggcagctttccgactcggattccgacatgacggtcgcacccagcgacaggccgctgcaattgccaaaagtgctaggtggcgacagtgctatgagggccttccagaacacggcaactgcatgtgcaccagtatcacattatcgagctgttgaaagtgtggattcaagtgaagaaagtttttctgattcagatgatgatagctgtctttggaaacgcaaacgacagaaatgttttaaccctcctcccaaaccagagccttttcagtttggccagagcagtcagaaaccacctgttgctggaggaaagaagattaacaacatatggggtgctgtgctgcaggaacagaatcaagatgcagtggccactgaacttggtatcttgggaatggagggcactattgacagaagcagacaatccgagacctacaattatttgcttgccaagaaacttaggaaggaatctcaagagcatacaaaagatctagacaaggaactagatgaatatatgcatggtggcaaaaaaatgggatcaaaggaagaggaaaatgggcaaggtcatctcaaaaggaaacgacctgtcaaagacaggctagggaacagaccagaaatgaactataaaggtcgatacgagatcacagcggaagattctcaagagaaagtggctgatgaaatttcattcaggttacaggaaccaaagaaagacctgatagcccgagtagtgaggattattggtaacaaaaaggcaattgaacttctgatggaaaccgctgaagttgaacaaaatggtggtctctttataatgaatggtagtcgaagaagaacaccaggtggagtttttctgaatctcttgaaaaacactcctagtatcagcgaggaacaaattaaggacattttctacattgaaaaccaaaaggaatatgaaaataaaaaagctgctaggaagaggagaacacaagtgttggggaaaaagatgaaacaagctattaaaagtctaaattttcaagaagatgatgatacatcacgagaaacttttgcaagtgacacgaatgaggccttggcctctcttgatgagtcacaggaaggacatgcagaagccaagttggaggcagaggaagccattgaagttgatcattctcatgatttggacatcttttaagtacattttcaacagtttgaggactaagcctttctaaaataacattgtaataaaccatttttactgagattgcaacgttttgcactgataaacatgagaatctggaggaaagacaattgttttcttgtttaaaatatgtgtggaaaggaatgcaattgatagaacatttaaagatatatctgacaaaatacttaagagtatatagcacaggatttaatttctcaatctgttgcatgtgctaattatgagtattactagttgataatcagttttgtctaggtcataacataccatttgtaagtttgtttgctttttcaggtttatctttgcagtgaattatgctttgctttaaaacattccgctaaaatcataatgggacatataaattattaagctgttagaaatgc

SEQ ID NO: 4481 - protein, 542 aa, Homo sapiens; identical to SEQ ID NO: 4479

SEQ ID NO: 4482 - DNA, 2536 bp, Homo sapiens
gctggcgagtgtaccctttctgcagaaagtaaaaatggccttattcagtaagttaaatttatgttgctatttctttacgacaccggaaaacaaacatttcaaacaccatgctgagaactcagtccttgttttggggagggatgcacttggaagattcgagctaaggtacaatcctccctaggtatccgcgggtcattgttttcaggacccccacagataccaacatccgccatgctcaagccccttacattatgtgggggtgcacggtgggtccttcccatccgcaggttcggcatccgtggatggggagtggatacagagggcggactatacagcttgaaaggcttccctggaagcaatatgtagagtggattgtggaggagcaagaacagaagcggggaggcttgtccagagcatacaggggaaggatgtacggccaagggaggaatcccagacgaccgcgatacgtgacatatttatgtttgcacgaaaataaagtttggaagaaaagtgttgggggaacaagggattcattttcccggggtagttggaatgcaatgggacgcctcaggccgctgggacaggctggcctccgcgcgggggcgcccgagcagccgagccgccgggccttccggctgccccgccggaagtgctctcctgacccgccgctgtgcagcgcagcgcaccgcgggaagatggcgttggaggtcggcgatatggaagatgggcagctttccgactcggattccgacatgacggtcgcacccagcgacaggccgctgcaattgccaaaagtgctaggtggcgacagtgctatgagggccttccagaacacggcaactgcatgtgcaccagtatcacattatcgagctgttgaaagtgtggattcaagtgaagaaagtttttctgattcagatgatgatagctgtctttggaaacgcaaacgacagaaatgttttaaccctcctcccaaaccagagccttttcagtttggccagagcagtcagaaaccacctgttgctggaggaaagaagattaacaacatatggggtgctgtgctgcaggaacagaatcaagatgcagtggccactgaacttggtatcttgggaatggagggcactattgacagaagcagacaatccgagacctacaattatttgcttgccaagaaacttaggaaggaatctcaagagcatacaaaagatctagacaaggaactagatgaatatatgcatggtggcaaaaaaatgggatcaaaggaagaggaaaatgggcaaggtcatctcaaaaggaaacgacctgtcaaagacaggctagggaacagaccagaaatgaactataaaggtcgatacgagatcacagcggaagattctcaagagaaagtggctgatgaaatttcattcaggttacaggaaccaaagaaagacctgatagcccgagtagtgaggattattggtaacaaaaaggcaattgaacttctgatggaaaccgctgaagttgaacaaaatggtggtctctttataatgaatggtagtcgaagaagaacaccaggtggagtttttctgaatctcttgaaaaacactcctagtatcagcgaggaacaaattaaggacattttctacattgaaaaccaaaaggaatatgaaaataaaaaagctgctaggaagaggagaacacaagtgttggggaaaaagatgaaacaagctattaaaagtctaaattttcaagaagatgatgatacatcacgagaaacttttgcaagtgacacgaatgaggccttggcctctcttgatgagtcacaggaaggacatgcagaagccaagttggaggcagaggaagccattgaagttgatcattctcatgatttggacatcttttaagtacattttcaacagtttgaggactaagcctttctaaaataacattgtaataaaccatttttactgagattgcaacgttttgcactgataaacatgagaatctggaggaaagacaattgttttcttgtttaaaatatgtgtggaaaggaatgcaattgatagaacatttaaagatatatctgacaaaatacttaagagtatatagcacaggatttaatttctcaatctgttgcatgtgctaattatgagtattactagttgataatcagttttgtctaggtcataacataccatttgtaagtttgtttgctttttcaggtttatctttgcagtgaattatgctttgctttaaaacattccgctaaaatcataatgggacatataaattattaagctgttagaaatgcattcaaatttgttttttctgtgttctaagaactcaggcaattttaaggataaaaactaacatttattctgcttaaatttaacgtgttttttgacttcttaattaacttggtcatatactaaatgtgatctcctgtggattaccacatgcattaaaaaatttttcaaaaaaaacattcccagtggcagcctgcctaagactgtcttaccttatgttaaggaagtcaggtatttaaaatgttacatatgcc

SEQ ID NO: 4483 - protein, 542 aa, Homo sapiens; identical to SEQ ID NO: 4479

SEQ ID NO: 4484 - DNA, 4288 bp, Homo sapiens
gctggcgagtgtaccctttctgcagaaagtaaaaatggccttattcagtaagttaaatttatgttgctatttctttacgacaccggaaaacaaacatttcaaacaccatgctgagaactcagtccttgttttggggagggatgcacttggaagattcgagctaaggtacaatcctccctaggtatccgcgggtcattgttttcaggacccccacagataccaacatccgccatgctcaagccccttacattatgtgggggtgcacggtgggtccttcccatccgcaggttcggcatccgtggatggggagtggatacagagggcggactatacagcttgaaaggcttccctggaagcaatatgtagagtggattgtggaggagcaagaacagaagcggggaggcttgtccagagcatacaggggaaggatgtacggccaagggaggaatcccagacgaccgcgatacgtgacatatttatgtttgcacgaaaataaagtttggaagaaaagtgttgggggaacaagggattcattttcccggggtagttggaatgcaatgggacgcctcaggccgctgggacaggctggcctccgcgcgggggcgcccgagcagccgagccgccgggccttccggctgccccgccggaagtgctctcctgacccgccgctgtgcagcgcagcgcaccgcgggaagatggcgttggaggtcggcgatatggaagatgggcagctttccgactcggattccgacatgacggtcgcacccagcgacaggccgctgcaattgccaaaagtgctaggtggcgacagtgctatgagggccttccagaacacggcaactgcatgtgcaccagtatcacattatcgagctgttgaaagtgtggattcaagtgaagaaagtttttctgattcagatgatgatagctgtctttggaaacgcaaacgacagaaatgttttaaccctcctcccaaaccagagccttttcagtttggccagagcagtcagaaaccacctgttgctggaggaaagaagattaacaacatatggggtgctgtgctgcaggaacagaatcaagatgcagtggccactgaacttggtatcttgggaatggagggcactattgacagaagcagacaatccgagacctacaattatttgcttgccaagaaacttaggaaggaatctcaagagcatacaaaagatctagacaaggaactagatgaatatatgcatggtggcaaaaaaatgggatcaaaggaagaggaaaatgggcaaggtcatctcaaaaggaaacgacctgtcaaagacaggctagggaacagaccagaaatgaactataaaggtcgatacgagatcacagcggaagattctcaagagaaagtggctgatgaaatttcattcaggttacaggaaccaaagaaagacctgatagcccgagtagtgaggattattggtaacaaaaaggcaattgaacttctgatggaaaccgctgaagttgaacaaaatggtggtctctttataatgaatggtagtcgaagaagaacaccaggtggagtttttctgaatctcttgaaaaacactcctagtatcagcgaggaacaaattaaggacattttctacattgaaaaccaaaaggaatatgaaaataaaaaagctgctaggaagaggagaacacaagtgttggggaaaaagatgaaacaagctattaaaagtctaaattttcaagaagatgatgatacatcacgagaaacttttgcaagtgacacgaatgaggccttggcctctcttgatgagtcacaggaaggacatgcagaagccaagttggaggcagaggaagccattgaagttgatcattctcatgatttggacatcttttaagtacattttcaacagtttgaggactaagcctttctaaaataacattgtaataaaccatttttactgagattgcaacgttttgcactgataaacatgagaatctggaggaaagacaattgttttcttgtttaaaatatgtgtggaaaggaatgcaattgatagaacatttaaagatatatctgacaaaatacttaagagtatatagcacaggatttaatttctcaatctgttgcatgtgctaattatgagtattactagttgataatcagttttgtctaggtcataacataccatttgtaagtttgtttgctttttcaggtttatctttgcagtgaattatgctttgctttaaaacattccgctaaaatcataatgggacatataaattattaagctgttagaaatgcattcaaatttgttttttctgtgttctaagaactcaggcaattttaaggataaaaactaacattggccaggcacggtggctcacgcctgtaatcccaacactttaggagaccaaggcgggcagatcacttgaggtcagaagtttgagaccagccaggccaacatggtgaaacttcatctctactaaaaatacaaaaactagccaggtgtggttctccatgcctataatcccggctactcgggaggctgaggcaggagaatcacctgaacccgggaggcaaaggttgcagtgagctgagatcgtaccactgtactccagcctgggcgacagagcaagactctgtctcaaaaaaaaaaaaaaatacaattaagaggtgtatactgatgattcttcccactcatttgtttgtccagaagtaaataaatgtcggaagttttccaagtaactatttgttttttggggggttttttagttagagtcttgatctgtcacccaggctggagtacagtggcaggatctcagcttactgcagcttccatctcccaggttcaagcgatcatgtgcctaagcctcctgagtagctgggatcacaggtgtgtaccaccacgcccagctgatttttgtatttttagtaaagactttcgccatgttgtccaggctggtctcgaactcctggcctaatgatctgcccacctctgcctcccaaagtgctgggatcacaggcatgagccaccgaacccagccttattctgcttaaatttaacgtgttttttgacttcttaattaacttggtcatatactaaatgtgatctcctgtggattaccacatgcattaaaaaatttttcaagctgggcctagtggcgcacacctgcaatcccaacactttgggaggccaagagaggaagattgcttgagcccaggagtttgagaccaatctaggcaatgtagtgagaccctgtctctaatttaaaaaagaaaaagaaaaaaacattcccagtggcagcctgcctaagactgtcttaccttatgttaaggaagtcaggtatttaaaatgttacatatgccggcgcagtggctcatgtgtgtaatcccagcactctgggaggctgagacaggtagatcatttgaggtcaggagttcaaaaccaacctggtctacatggtgaaaccccatctcaactaaaaatacaaaaaatacaaaaaattagccgggcgcggtggctcacacctgtaatcccagcactttgggaggtggaggcgggtggatcacaaggtcaagagatcgagaccatcctggccaacatggtgaaaccctgtctctattaaaaatacaaaaattagctgggcgtggtggcgcatgcctgtagtcccaactactagggaggctgaggcaggagaatcacttgaacccaggaggtggaggttgcagtgagccgagatcacgccactgcactccagcctggcgacagagcgagactccctctcaaaaaaaaaaaaaaaaatacaaaaaattagccgggcattgtggtgcatgcctgtaatctcagctatttgggaggccgaggcaggagaatcacttgaacccaggaggcagaggttgcagtgagtcgagatcgtgccactgcactccagcctgggtgacagagcaagactttgtctcaaaaataataatagtaaaatgttacatgtgcatgaagttttaaattactcatttttattaatgaagaaaataaggtagtttagacattccaagagttaactatagtttacaaaaatatattaagcaaaaatatgcttgatatattaagcagaaatgttgtatattaagcaaaaatgtaaaattcagcaattataaactgttccttacagacagtgtacttgaagtcttttggtagttctgagaatgtggtcattgaagttggatctaagaggaaagtggttatcggttgctttttatttataaaggatgcaaaaataaaattagatttttggcagtccttaa

SEQ ID NO: 4485 - protein, 542 aa, Homo sapiens; identical to SEQ ID NO: 4479

SEQ ID NO: 4486 - DNA, 671 bp, Homo sapiens
gtggcgacagtgctatgagggccttccagaacacggcaactgcatgtgcaccagtatcacattatcgagctgttgaaagtgtggattcaagtgaagaaagtttttctgattcagatgatgatagctgtctttggaaacgcaaacgacagaaatgttttaaccctcctcccaaaccagagccttttcagtttggccagagcagtcagaaaccacctgttgctggaggaaagaagattaacaacatatggggtgctgtgctgcaggaacagaatcaagatgcagtggccactgaacttggtatcttgggaatggagggcactattgacagaagcagacaatccgagactaatagtaaaatgttacatgtgcatgaagttttaaattactcatttttattaatgaagaaaataaggtagtttagacattccaagagttaactatagtttacaaaaatatattaagcaaaaatatgcttgatatattaagcagaaatgttgtatattaagcaaaaatgtaaaattcagcaattataaactgttccttacagacagtgtacttgaagtcttttggtagttctgagaatgtggtcattgaagttggatctaagaggaaagtggttatcggttgctttttatttataaaggatgcaaaaataaaattagatttttggc

SEQ ID NO: 4487 - protein, 133 aa, Homo sapiens
MRAFQNTATACAPVSHYRAVESVDSSEESFSDSDDDSCLWKRKRQKCFNPPPKPEPFQFGQSSQKPPVAGGKKINNIWGAVLQEQNQDAVATELGILGMEGTIDRSRQSETNSKMLHVHEVLNYSFLLMKKIR

SEQ ID NO: 4488 - DNA, 2474 bp, Homo sapiens
gtcgcctactgtcacggtgttaacctccctctctgtctctctgagtgcgttctctcgcccgtcacccctcttcctttctcggtctcctcctctcccttcgtccgagccgctccttagcgcccagttgcgcaaatcaaattctttcccgttctatttactcctgatcaagaggggctgtcagtccaaccctccagctgtaggctcgtgcatctgccagtctcttggcgcgtggggaccgcgtggaagtgccttcgcgtgtgcgtgccagctgagatgagacgtggaagctggaggggtccggcatcccagagaggcgtgaggctcccaaaccaccacctgctcaggtccaccctaataacatcagccaaggcctctacagcagcccccaagctgcctctggatagttcagacaaggcctctgtgctgtgatggaaccaggtgacccgcagcctccgggccagctactctggcttggctgaggtcttcctagataatcaacatccctcaacagccttggcggtgagaaggcacgtgaaagctgccagcacatcccaggagccttggctgtggcggcttctccttggaaagctccacgcacccttctgccagggatcctgtcctgcagggatgacagacccagcagcctcggcagagggaatgaggctccagcagcttcatcagcaagtggccaggcccagccctaagtcacagactgtcagaaggggacaatggtaggagagagctgggctcagggtctggagcctgccacatgccacctgcacggctttggatacactccctccttcatctgtggaacggggaatggggataacaccctggcccaagggtcacacagaaccaaaaggaagctacagcctaaggaagaaaccctgctatgggactgtggctgctctggactgcgcaggctgccaggaaggaatggcggaggcagcctccgtgggccttgcacagagtgagagcaccacaattatgggccatgtgtgcgcagagagacacacccatgaccgatacgtaacaagcatgtgcccctacctgccgctgccgatggatggaaatgcaatggatttcagcttcttatcatcagccagggccaagcagtttttcactgtcttttccagaagttcttcacacttgtctgcaccccaaactggactattacagtggatcacaaacttggcaggcaggccatggcctgcgctgacagcagctagtggtgcggggatgaaacagaaacagtgagctctggttcactgcaaagcacaagatgccaaacacagacccactcccctgccacggtatatcttcctgggccctccaatgccctgtgtccgaggagttccacagctgtctgctgcgttgtgattccaacgtgagctggagccaagccacacccttggaaagttggcattatgatgtgtcaccaccaggaattttgaccaagttcgtagtaagcctctctccactctcagaaagcatacacggttctcccagaggcagagccttatccatcaaaactcaactgaacgcaaactcaacgtgtcagaacatttgcagcctcaaaataattgttttgggtttccaacccttcttcttcaagtcgactggtgtgctaattatcgacttgcacaccaatatgatgtatttgtctctactatgatgtattctctaaatctcccaaacccaattcaggacaaagctactaggaaagcaactgctttaaatgatctgctaagcaacctgaccagcatctccactctgccattgtcttctccctgctgaggatggcctcactgtgtgaataacggatcctgtttatttgtggcagaattagattagtttttaaggaactgtgtttttcttttcctagaagaggggcccctttctagctatacatctccaccaaagacttgcctttcccttgccagatctaaggacacaggcctggggtctgccacaaactgcaaagtaccatgtctcccagagcatgttccagaacccctgtccacagatgctctgcaaagaaggtttccagggcactgggtttagctgcatgctacgcttctatacaagagcacaccagagtctccacaccactgctaaagtaaaacatccaaactttttgtatttggttggctatttctgaaactttttttttttttaaggaatatctgtccaaggggtatggtttgttatggtcgtgtcatagatactggagaaggagcgatttgtgggtagtgtctcatggtacagtggaaacagctcagtcacagggtgtgaatttgagtcctggctctgctttgtgactgggcttgagaactctgggctgacctataaaaacctgacattgggggttgaattaaaccagtgggtttgtccccatgagaagtcatggctaaactatgcatagaaaacgactggaaagaaacattaacagtgactatctttgcacagtg

SEQ ID NO: 4489 - protein, 145 aa, Homo sapiens
MGITPWPKGHTEPKGSYSLRKKPCYGTVAALDCAGCQEGMAEAASVGLAQSESTTIMGHVCAERHTHDRYVTSMCPYLPLPMDGNAMDFSFLSSARAKQFFTVFSRSSSHLSAPQTGLLQWITNLAGRPWPALTAASGAGMKQKQ

SEQ ID NO: 4490 - DNA, 541 bp, Homo sapiens
gctccttagcgcccagttgcgcaaatcaaattctttcccgttctatttactcctgatcaagaggggctgtcagtccaaccctccagctgtaggctcgtgcatctgccagtctcttggcgcgtggggaccgcgtggaagtgccttcgcgtgtgcgtgccagctgagatgagacgtggaagctggaggggtccggcatcccagagaggcgtgaggctcccaaacggcatccttagaaacatctcaagacttgctggatgtttgaaggtctctctggattcctagcaggtggtctgatgctcgaaggtttcccacagctggatgggagggaattcagagacggagtcttgctctgttgcccaggctggagtgcagtgacgtgatctcggctcactgaagcatacattttgagagtaccgtaacaggttgcacctctgccttccaagcacctattggctccaattctcttgcttttgtgagattcttcacacacagccacttgcgtcttgaaggttgacccactggaggtgtagcaggctggaat

SEQ ID NO: 4491 - protein, 41 aa, Homo sapiens
MFEGLSGFLAGGLMLEGFPQLDGREFRDGVLLCCPGWSAVT

SEQ ID NO: 4492 - DNA, 561 bp, Homo sapiens
gatcaagaggggctgtcagtccaaccctccagctgtaggctcgtgcatctgccagtctcttggcgcgtggggaccgcgtggaagtgccttcgcgtgtgcgtgccagctgagatgagacgtggaagctggaggggtccggcatcccagagaggcgtgaggctcccaaacggcatccttagaaacatctcaagacttgctggatgtttgaaggtctctctggattcctagcaggtggtctgatgctcgaaggtttcccacagctggatgggagggaattcagcaccacctgctcaggtccaccctaataacatcagccaaggcctctacagcagcccccaagctgcctctggatagttcagacaaggcctctgtgctgtgatggaaccaggtgacccgcagcctccgggccagggagagaagacagatttccctcatgcaggaagacgtctgactctgtggcaagcagctctatgttgcaatctccctgtgaaatcgcctcataagaagagttaaaaggaggaactaaaggaggctgtggagagagacatgtgccctataaca

SEQ ID NO: 4493 - protein, 44 aa, Homo sapiens
MEPGDPQPPGQGEKTDFPHAGRRLTLWQAALCCNLPVKSPHKKS

SEQ ID NO: 4494 - DNA, 531 bp, Homo sapiens
agccgagaggcccacctttgcaagggaattggtgccttccaagaagacactcagctctgtgacagccaggaccccagtcaccaggttcaaagccgcacagagatctaataacatgtatctgaggccagagtaaatgaggaactttttgcaaagaagcataaaaggaaagagatcttggaatacctagctaatctcagttgctgtctctgctctgaagccctgcctttgaaagctctatttctcctcccatcctctgcgaaagccagatgagacttcttgacattaagcaaatgctggtatactgactttggtgtggggtttgtacatgtgcctgttgagagctggatccttcccgtgggtggatgctggcatggtggctcttccatctaaggatccatctggaaaagtggccgatttcatcacttacgtgccaggacctcagatgccgaggcaggggaatgctgcaatctaaacatttacattctaaaaaatgggaaatcatctgcttcgatataaattagccagggcctg

SEQ ID NO: 4495 - protein, 52 aa, Homo sapiens
MLAWWLFHLRIHLEKWPISSLTCQDLRCRGRGMLQSKHLHSKKWEIICFDIN

SEQ ID NO: 4496 - DNA, 541 bp, Homo sapiens
tccaaaccacagagccaccatctctgtctttctctatctggctctcacctgtgattgaagagagggaaggatgacagagtgcccactgggaatgcctttccacccagttctcaacaggagtcacggcccaggtcagctctgggccagcatcccctgagcacctgctgtctgctagcctgtgtgagctgctttacagaaggacacaccaatgggaagcagcagccctgccttcaggaaggcccagcctgggacagaactgtgcctggcacttggacagagaggcccgggaggcatcagatgccggcccagcccgaggctgcacctcacaataagcccccacctgcaaagaatgtctgtaaatcctggggctctgcacagagcagccggattgcagggaacggcagcaaatcccaggataaaagcagaagccatcctgttgacaattcattcgtgtttctcccccaaatccatccacaacagaactgttaagctcatgtttcctctcctgttgcaaacaattgtaaaaatgattggtatctgc

SEQ ID NO: 4497 - protein, 110 aa, Homo sapiens
MGSSSPAFRKAQPGTELCLALGQRGPGGIRCRPSPRLHLTISPHLQRMSVNPGALHRAAGLQGTAANPRIKAEAILLTIHSCFSPKSIHNRTVKLMFPLLLQTIVKMIGI

SEQ ID NO: 4498 - DNA, 474 bp, Homo sapiens
gttggaggctgatggcctagcccattgccccatgcctagtctcatagaacctgggtgggacagtgagctctggtctcttccagcatgccagggagaagtggagacccttggactggaagtgctggcccctcctcactcagcccctttccaagtacctcattgccaagcacagtgtggggaactgaggattcggggaaaatagcacatggcaccacctgctcaggtccaccctaataacatcagccaaggcctctacagcagcccccaagctgcctctggatagttcagacaaggcctctgtgctgtgatggaaccaggtgacccgcagcctccgggccaggttgaaatgaccagtgaagccatctgggcctggagttttatttattggaatgtttcaaactatctgtaacagacaaaggacctactttttcttggctacagcctaaggaagaaaccctgctatgggactgtggc

SEQ ID NO: 4499 - protein, 49 aa, Homo sapiens
MPGRSGDPWTGSAGPSSLSPFPSTSLPSTVWGTEDSGKIAHGTTCSGPP

SEQ ID NO: 4500 - DNA, 284 bp, Homo sapiens
acattgaccaggcatggtggctcattcctgtaattccaacactttgggagaccaaggagtggaggatagcttgagcccaggagttccagaccagcctgagcaacatgctatcatccctcctgttatatttgcatcttctctgcacacctccacctgtgatgtcttcctaggactctccaatgtgtctggccctgaccaagctttttgccctaagtgtggcttatctgcgatgtctttctccctaacatccagttccaacccctttgcggggtccaagggctcct

SEQ ID NO: 4501 - protein, 89 aa, Homo sapiens
MVAHSCNSNTLGDQGVEDSLSPGVPDQPEQHAIIPPVIFASSLHTSTCDVFLGLSNVSGPDQAFCPKCGLSAMSFSLTSSSNPFAGSKG

SEQ ID NO: 4502 - DNA, 377 bp, Homo sapiens
gttccaacccctttgcggggtccaagggctcctggaggaggagatgacttctggggcacagcaaaccaagatgtgtgctccccagagctgacttggaagctgtccggcccctctgcattcaccccagctgcccatgtacaccaggcagcaggagggacagccactgcaggctgccagcctgtcctttgctgtctgtgtctgtgtcaagagtgaatgaagtgataaaaccaggagagcagtgtgctgtgaaaaagttaaagcctgacccaagctcagacagaggaagcaggagccacctgaacaactgaagggtgcagacacccagaagctggttttgtaaataaatcgtgcaccttggcgctggtgcactaattgga

SEQ ID NO: 4503 - protein, 86 aa, Homo sapiens
LLGHSKPRCVLPRADLEAVRPLCIHPSCPCTPGSRRDSHCRLPACPLLSVSVSRVNEVIKPGEQCAVKKLKPDPSSDRGSRSHLNN

SEQ ID NO: 4504 - DNA, 545 bp, Homo sapiens
tgtcctcccaacagcaggccaccagttcaagggacaagaagcccctaagctccctccacctttcacatagggcccaggtggccttggagtacctgcctttcttctgcacctatgggtgcctcctggaagaggaggggttggtcctgcagcccaagacaccgctccaggaggactcagaactgctcagtgggttcttcccttactaccgctctgaggaggagagtttgcccagcctggcccttcctggctggtcacacaggggctcccaagatctgcccactgagaaggaggcacgggctggctgcttctgcaggacaacagtcagggacgaatgctctactctaacaggcccctggacaggcccctctcagggctgctgcggcccttggagcaaggtgtcactggttgggagcacagacactgcaggaagactgtcctgttcaagcccagcttgaccacctgctaggagagcggcctggggaacgtggtttccttataaaagagagaacagcagcagcaacaataaagccattgtgagaattaca

SEQ ID NO: 4505 - protein, 77 aa, Homo sapiens
MGASWKRRGWSCSPRHRSRRTQNCSVGSSLTTALRRRVCPAWPFLAGHTGAPKICPLRRRHGLAASAGQQSGTNALL

SEQ ID NO: 4506 - DNA, 2052 bp, Homo sapiens
aggaagaggataacccggagaagggaggactaagagaatttcacttgatgacccttgcctctttgtgtctgggatgagccgcgcggagcgcacccttatccacccagagtgctgtgcctttaaggtccactgggggcgtgatgtcagccgccctccggcacttggagaggtgagcgcggcagcccgcgcagccggtgactgggggactgggtttggagtaggacctgcggcgtgctcgagactccgacttcggtcttgcggcgcgctcgcgcccgcgggccatgccccactgactctaagtgggcactgccccggctccgggagggcgagaccgagcgccggccatgggaagcttccagctggaagactttgcggcgggctggatcggaggtgcagccagtgtcatcgttggccaccctctggacacagtcaagactcgcctgcaggctggcgttggctacggaaacaccctcagctgcatccgcgtggtgtacaggagggagagtatgttcggcttcttcaagggcatgtccttccccctcgccagcattgccgtctacaactccgtggtgtttggggtcttcagtaacacgcagcggttcctcagccagcaccgctgcggggagccagaggccagtcctccccgcacgctgtcagacctgctcctggccagcatggtggccggcgtggtctctgtcgggctgggagggcccgtggacctcatcaagatccggttgcagatgcagacacaaccgtttcgggacgccaacctcggtttgaagtccagggcagtggctcctgcggagcagccagcataccaggggccagtgcactgcattacaaccattgtgaggaatgagggcctggcggggctataccggggggccagtgccatgctgctgagggatgtcccaggctattgcctctacttcatcccctacgtgttcctgagtgagtggatcacacctgaggcctgcacaggccccagcccctgtgccgtgtggctggcgggcggcatggcaggtaagggcagcagcagctggagccgcacccctgtgcaggccacagcagtgggacagctggggaactgccatgcccttctcagcccagggggagggcaggacacatttaggtactcacccaacaattctttgttaggtacctactctgtccccggccctctcccacctcagtctcatcccttccctatgcagctatgagaatggcagttcccatttgactttcaggcaacagatatattttgaacacatactctgtgtcaggcattactaagctttggaaaggaaatccattatcatggttcagtttattaaatgcaatctttgtaatgtaaggatgccattagttctacaaggtaggaatcggtttccccatttcacagatgagaaaactcaggtccagaaatgttaagtagccaatcccaggtcatacagctggagctgacagtatagcaggactctgcagtcagaaagatttaagttcaaatccacacttcatcattttgtgaccatggacttgttgcttaacctccctgctcagaatcctgcaccacatccttctttcatttaaggtaaaagttgatatctttgcaatggttttccaggccctcagtgatctagctccctgttccccacccacctcacttctactcctctccccttcctcactttctccagtcacactggtctctgctgcaacttgaccatgcctggcccttccctgaccacagggcctttgtacctgctactcaccacctcctgaatttaacaacgtggagaccactggggattttggcaagggccatttgatggagagaagggtgtaaaaacctgatgaagtgggataaagaaagaatgggatgaaggatattggtgcacccaagtatacacaactcttctgagggttctgctatgctgtaatgaggaacagagaaacagagccatagccagaagggcctttggaagccaagagaggatactttttaagaaggctgacatcatgacatgtttgatgtgatgggaaagatctaac

SEQ ID NO: 4507 - protein, 291 aa, Homo sapiens; identical to SEQ ID NO: 552

SEQ ID NO: 4508 - DNA, 1369 bp, Homo sapiens
aggaagaggataacccggagaagggaggactaagagaatttcacttgatgacccttgcctctttgtgtctgggatgagccgcgcggagcgcacccttatccacccagagtgctgtgcctttaaggtccactgggggcgtgatgtcagccgccctccggcacttggagaggtgagcgcggcagcccgcgcagccggtgactgggggactgggtttggagtaggacctgcggcgtgctcgagactccgacttcggtcttgcggcgcgctcgcgcccgcgggccatgccccactgactctaagtgggcactgccccggctccgggagggcgagaccgagcgccggccatgggaagcttccagctggaagactttgcggcgggctggatcggaggtgcagccagtgtcatcgttggccaccctctggacacagtcaagactcgcctgcaggctggcgttggctacggaaacaccctcagctgcatccgcgtggtgtacaggagggagagtatgttcggcttcttcaagggcatgtccttccccctcgccagcattgccgtctacaactccgtggtgtttggggtcttcagtaacacgcagcggttcctcagccagcaccgctgcggggagccagaggccagtcctccccgcacgctgtcagacctgctcctggccagcatggtggccggcgtggtctctgtcgggctgggagggcccgtggacctcatcaagatccggttgcagatgcagacacaaccgtttcgggacggaggtgaacacaggatgactacagtgttccctgggcctcatctctgcatgtgaagccctgagagctgcagatgtttggcctttggacctccaagtggacatcaattagcaagcgtgggctaggatggtgcagacactgacgtggcccttctgatgcctgggatgcctcatgagtcactgattcaagccctccaaggttctgatccccaatgcccactctgctaggctggcatcaaagagctttccaagaaatgtttggtccagctgagaagtcctgaccatgagcaccagggagccagaaaccacccagagaaacgttgcttcactcctctgtctgaggatggggaggggccagtgagctctgggctcagccactccctccagtctcaagtaacacgtccccgtgcctccagtctcctctcagcaccgaccaggtttttccccgctcctgcacccgtggatcctgaggacagcggtagcgccttcctcaccgcacgctgagtccagtgcgtgctcctcactgtgcacttattagtgtctgttgagtgattaaatcacatcctcaggtctgcagcaaataaatgaaagtttctttattttttatt

SEQ ID NO: 4509 - protein, 171 aa, Homo sapiens
MSRAERTLIHPECCAFKVHWGRDVSRPPALGEVSAAARAAGDWGTGFGVGPAACSRLRLRSCGALAPAGHAPLTLSGHCPGSGRARPSAGHGKLPAGRLCGGLDRRCSQCHRWPPSGHSQDSPAGWRWLRKHPQLHPRGVQEGEYVRLLQGHVLPPRQHCRLQLRGVWGLQ

SEQ ID NO: 4510 - DNA, 587 bp, Homo sapiens
gagcttctgatttgctcattaagttaggatccgtgggacttgatgaggtgcagccagtgtcatcgttggccaccctctggacacagtcaagactcgcctgcaggctggcgttggctacggaaacaccctcagctgcatccgcgtggtgtacaggagggagagtatgttcggcttcttcaagggcatgtccttccccctcgccagcattgccgtctacaactccgtggtgtttggggtcttcagtaacacgcagcggttcctcagccagcaccgctgcggggagccagaggccagtcctccccgcacgctgtcagacctgctcctggccagcatggtggccggcgtggtctctgtcgggctgggagggcccgtggacctcatcaagatccggttgcagatgcagacacaaccgtttcgggacgccaacctcggtttgaagtccagggcagtggctcctgcggagcagccagcataccaggggccagtgcactgcattacaaccattgtgaggaatgagggcctggcggggctataccggggggccagtgccatgctgctgagggatgtcccaggctattgcctctact

SEQ ID NO: 4511 - protein, 140 aa, Homo sapiens
MFGFFKGMSFPLASIAVYNSVVFGVFSNTQRFLSQHRCGEPEASPPRTLSDLLLASMVAGVVSVGLGGPVDLIKIRLQMQTQPFRDANLGLKSRAVAPAEQPAYQGPVHCITTIVRNEGLAGLYRGASAMLLRDVPGYCL

SEQ ID NO: 4512 - DNA, 649 bp, Homo sapiens
aatttcttgggggacagcgactcctatggatgtcgtgaaaagtcgactccaagctgatggggtttatttaaacaaatataaaggtgtcctggactgtatctcccagagttaccagaaggaaggtcttaaagtgtttttcagaggcatcactgtgaacgcggtgcggggcttccccatgagtgcggccatgttccttgggtacgagctgtcgctgcaggctatccgcggggaccacgcagtgacgagcccataagcgccagggtctcatcccattaacaggtcaatgctaaaagtgtctgcagaacccatgatgtgaatttactgaagagaaagactctccaccaggtgggctttcagccaggcaggctgtcctcagaacctcttccttccttcacaattacaagcattctcatccccaccccggctggggcagcggagcttctgccttggagggattcaactgaccattggtcaactgatcaccaactattccagctttggacctgcacctggtaacaaacaaacgaacagaacaaaacaaaactggagtaaaatagaccctccccccatggccattgtaaactcactgtgaattcatggaagagctggagttggctctaagtttcaaaataaaagcattaaaaacctc

SEQ ID NO: 4513 - protein, 75 aa, Homo sapiens
MDVVKSRLQADGVYLNKYKGVLDCISQSYQKEGLKVFFRGITVNAVRGFPMSAAMFLGYELSLQAIRGDHAVTSP

SEQ ID NO: 4514 - DNA, 545 bp, Homo sapiens
cgtctctctcacccctaggtctttgctcaggctgtcccctctgcctgacatcctcttctcgctcctttcctacttgtccttggcttcaccagctctttgccatccaggctgtagaagtctcctcctccaggatgccggcttgctttctcagctaggggtctcatcccattaacaggtcaatgctaaaagtgtctgcagaacccatgatgtgaatttactgaagagaaagactctccaccaggtgggctttcagccaggcaggctgtcctcagaacctcttccttccttcacaattacaagcattctcatccccaccccggctggggcagcggagcttctgccttggagggattcaactgaccattggtcaactgatcaccaactattccagctttggacctgcacctggtaacaaacaaacgaacagaacaaaacaaaactggagtaaaatagaccctccccccatggccattgtaaactcactgtgaattcatggaagagctggagttggctctaagtttcaaaataaaagcattaaaaacctc

SEQ ID NO: 4515 - protein, 56 aa, Homo sapiens
VSLTPRSLLRLSPLPDILFSLLSYLSLASPALCHPGCRSLLLQDAGLLSQLGVSSH

SEQ ID NO: 4516 - DNA, 5458 bp, Homo sapiens
aggagagggagtgggggagccagcgctccagctagcatgaggacgggcttcttttcccgtgctcagttaatctggctgtcagttggtgttaacgctgcagtttaagtgttcggattccaagggaaacagacaaacctcacgaaaggaaggaagcaagcaagcaaggaaggaactgcaggaggaaaagaacaggcagaacagcgagaagaataaagggaaagggggggaaacaccaaatctatgattggacctgggcttctttttcgccaatgcaaaaaggaatatgcagcacatttttgccttcttctgcaccggtttcctaggcgcggtagtaggtgccaatttccccaacaatatccagatcgggggattatttccaaaccagcagtcacaggaacatgctgcttttagatttgctttgtcgcaactcacagagcccccgaagctgctcccccagattgatattgtgaacatcagcgacagctttgagatgacctatagattctgttcccagttctccaaaggagtctatgccatctttgggttttatgaacgtaggactgtcaacatgctgacctccttttgtggggccctccacgtctgcttcattacgccgagctttcccgttgatacatccaatcagtttgtccttcagctgcgccctgaactgcaggatgccctcatcagcatcattgaccattacaagtggcagaaatttgtctacatttatgatgccgaccggggcttatccgtcctgcagaaagtcctggatacagctgctgagaagaactggcaggtgacagcagtcaacattttgacaaccacagaggagggataccggatgctctttcaggacctggagaagaaaaaggagcggctggtggtggtggactgtgaatcagaacgcctcaatgctatcttgggccagattataaagctagagaagaatggcatcggctaccactacattcttgcaaatctgggcttcatggacattgacttaaacaaattcaaggagagtggcgccaatgtgacaggtttccagctggtgaactacacagacactattccggccaagatcatgcagcagtggaagaatagtgatgctcgagaccacacacgggtggactggaagagacccaagtacacctctgcgctcacctacgatggggtgaaggtgatggctgaggctttccagagcctgcggaggcagagaattgatatatctcgccgggggaatgctggggattgtctggctaacccagctgttccctggggccaagggatcgacatccagagagctctgcagcaggtgcgatttgaaggtttaacaggaaacgtgcagtttaatgagaaaggacgccggaccaactacacgctccacgtgattgaaatgaaacatgacggcatccgaaagattggttactggaatgaagatgataagtttgtccctgcagccaccgatgcccaagctgggggcgataattcaagtgttcagaacagaacatacatcgtcacaacaatcctagaagatccttatgtgatgctcaagaagaacgccaatcagtttgagggcaatgaccgttacgagggctactgtgtagagctggcggcagagattgccaagcacgtgggctactcctaccgtctggagattgtcagtgatggaaaatacggagcccgagaccctgacacgaaggcctggaatggcatggtgggagagctggtctatggaagagcagatgtggctgtggctcccttaactatcactttggtccgggaagaagttatagatttctccaaaccatttatgagtttggggatctccatcatgattaaaaaaccacagaaatccaagccgggtgtcttctccttccttgatcctttggcttatgagatttggatgtgcattgtttttgcctacattggagtgagtgttgtcctcttcctggtcagccgcttcagtccctatgaatggcacagtgaagagtttgaggaaggacgggaccagacaaccagtgaccagtccaatgagtttgggatattcaacagtttgtggttctccctgggagccttcatgcagcaaggatgtgacatttctcccaggtccctgtctggtcgcatcgttggtggcgtctggtggttcttcaccttaatcatcatctcctcatatacagccaatctggccgccttcctgaccgtggagaggatggtgtctcccattgagagtgcagaggacctagcgaagcagacagaaattgcctacgggacgctggaagcaggatctactaaggagttcttcaggaggtctaaaattgctgtgtttgagaagatgtggacatacatgaagtcagcagagccatcagtttttgtgcggaccacagaggaggggatgattcgagtgaggaaatccaaaggcaaatatgcctacctcctggagtccaccatgaatgagtacattgagcagcggaaaccctgtgacaccatgaaggtgggaggtaacttggattccaaaggctatggcattgcaacacccaaggggtctgccctgagaaatccagtaaacctggcagtgttaaaactgaacgagcaggggcttttggacaaattgaaaaacaaatggtggtacgacaagggcgagtgcggcagcgggggaggtgattccaaggacaagacaagcgctctgagcctcagcaatgtggcaggcgtgttctacatcctgatcggaggacttggactagccatgctggttgccttaatcgagttctgctacaaatcccgtagtgaatccaagcggatgaagggtttttgtttgatcccacagcaatccatcaacgaagccatacggacatcgaccctcccccgcaacagcggggcaggagccagcagcggcggcagtggagagaatggtcgggtggtcagccatgacttccccaagtccatgcaatcgattccttgcatgagccacagttcagggatgcccttgggagccacgggattgtaactggagcagatggagaccccttggggagcaggctcgggctccccagccccatcccaaacccttcagtgccaaaaacaacaacaaaatgaaacgcaaccaccaccaaccactgcgaccacaagaaggatgattcaacaggttttcctgaagaattgaaaaaccattttgctgtcccttttccttttttgatgttctttcacccttttctgtttgctaagtgaggatgaaaaaataacactgtactgcaataaggggagagtaaccctgtctaatgaaacctgtgtctctgagagtagagtcactggaacactaatgaggaaactgcactgttttattttaattcagttgttagtgtgtcttagtgtgtgcaattttttttcttactaatatccatggtttgcaggttctgttaggccctttccttctccttacttcttatccccaactccctacccacccctcttcagttttcagattggagattcaagatttgttccactttacaagcaagaggaaaaaaaagcaaccttcaaactaattctccatgggggctctccatgttaccctccactccttggcccaaacctctgatggagatagacattgttggagaagtgggctgccttccccaagtggggcactgcttaagcacttattcagtggagaacacaggtgaaaagcaactcaggatgagggtggtggagagggcaggggcagatgtgcagtcagagaaggactcctgaagttactgctgctcagaaaaacagttcctttaatgtggaagagccatttcataggtcataggtggtatggtatatttcttcagagtcaaccttggccctgagaagtatgtcctcctggtgtgctcaggctcaacggcagtctggtggctgaaggcacttggcctcctaaaccaagcagaattttgggaagagataacagccagggagatattgcccatgattctcactttttctttgcctggcatctaagcaggaacccattgtggagtagactctcttcttctatggagcctctgacatggggagcaatgctaagcaagctaagtgtaaaagaaaagtgacagaataattttggaagaggaagcctcatcaaaagctcacacaaaatagagcttcccatggtgtgccctatcctaggtttaagaaaacacgtatgaagtttatgctgatgcaaagaacttgggtttttatgttaatataaagtgttgttttagcatgtggccagatgatgctctgtcatctttagaaagtgagataaccaaggaaataattgaaggagtatagggagatggattaagttgataatgacatttagggcaacttaagacctttgatcccaggttctaactcaaagaggctgaccttcccccagctaagatagcatgaggacgttgtattccaatatacgtatgattggggctacaaagctgaactaaagcaagattggtgaagtggcagggtttatagagagaagcccaggctgagttcagcttttgttggaagtgagaatccctgacatatagctttcttggagatcccaactctcattcttggtgcaactggcttccagctctccagcagtcactctcctaggtgcatgattcagtgcgtgccatgtgtcattagcttttactgataaccatattctggcttgttcccttaccccctacttctatccaattttctctgctaggggttatcattagcaattgacatgctaaaggttttggagcccacctaggggtaggtgcagctttattggcttttctgtggattctctcagtggacccacaccatctctatgtctctccactctcctgccttcagccatagcaaagaatccttccaaaatcaaactcttcacttttttgactcaagtgttgttgttcagtctctcgcgtgtcaatgtggtcatggttcatgaaaccggaccctcaagatggatgattgcttttaactactgccagctgatgtctctcagcccctgccctcatacaagatttttctcagccttcagcctaccactgcagaatccgatgtgacccaccattagggagtctgcatcttggaagagttggaaataaccctttaacatcaacatgcttcaaagactttttgcctttggcctagtaagatgcctctccagctactgagcccacaagtaacatgagcggataaaaagagacttgtttgtgctagaaatgagggtctatgctatgagggggtccaagactctggcgaaatgtgctttttcatcaatggagaaatgaaaggaaaacacaagcaagaaaaaagttaacttgtattatgtatttttactacacttttcttaaaaatagagcattgggaaaactctgaaagagactgacatttttctcaacaggaatccatacttaacagttctggctttcattaaattttgctctttggt

SEQ ID NO: 4517 - protein, 906 aa, Homo sapiens; identical to SEQ ID NO: 554

SEQ ID NO: 4518 - DNA, 5647 bp, Homo sapiens
aggagagggagtgggggagccagcgctccagctagcatgaggacgggcttcttttcccgtgctcagttaatctggctgtcagttggtgttaacgctgcagtttaagtgttcggattccaagggaaacagacaaacctcacgaaaggaaggaagcaagcaagcaaggaaggaactgcaggaggaaaagaacaggcagaacagcgagaagaataaagggaaagggggggaaacaccaaatctatgattggacctgggcttctttttcgccaatgcaaaaaggaatatgcagcacatttttgccttcttctgcaccggtttcctaggcgcggtagtaggtgccaatttccccaacaatatccagatcgggggattatttccaaaccagcagtcacaggaacatgctgcttttagatttgctttgtcgcaactcacagagcccccgaagctgctcccccagattgatattgtgaacatcagcgacagctttgagatgacctatagattctgttcccagttctccaaaggagtctatgccatctttgggttttatgaacgtaggactgtcaacatgctgacctccttttgtggggccctccacgtctgcttcattacgccgagctttcccgttgatacatccaatcagtttgtccttcagctgcgccctgaactgcaggatgccctcatcagcatcattgaccattacaagtggcagaaatttgtctacatttatgatgccgaccggggcttatccgtcctgcagaaagtcctggatacagctgctgagaagaactggcaggtgacagcagtcaacattttgacaaccacagaggagggataccggatgctctttcaggacctggagaagaaaaaggagcggctggtggtggtggactgtgaatcagaacgcctcaatgctatcttgggccagattataaagctagagaagaatggcatcggctaccactacattcttgcaaatctgggcttcatggacattgacttaaacaaattcaaggagagtggcgccaatgtgacaggtttccagctggtgaactacacagacactattccggccaagatcatgcagcagtggaagaatagtgatgctcgagaccacacacgggtggactggaagagacccaagtacacctctgcgctcacctacgatggggtgaaggtgatggctgaggctttccagagcctgcggaggcagagaattgatatatctcgccgggggaatgctggggattgtctggctaacccagctgttccctggggccaagggatcgacatccagagagctctgcagcaggtgcgatttgaaggtttaacaggaaacgtgcagtttaatgagaaaggacgccggaccaactacacgctccacgtgattgaaatgaaacatgacggcatccgaaagattggttactggaatgaagatgataagtttgtccctgcagccaccgatgcccaagctgggggcgataattcaagtgttcagaacagaacatacatcgtcacaacaatcctagaagatccttatgtgatgctcaagaagaacgccaatcagtttgagggcaatgaccgttacgagggctactgtgtagagctggcggcagagattgccaagcacgtgggctactcctaccgtctggagattgtcagtgatggaaaatacggagcccgagaccctgacacgaaggcctggaatggcatggtgggagagctggtctatggaagagcagatgtggctgtggctcccttaactatcactttggtccgggaagaagttatagatttctccaaaccatttatgagtttggggatctccatcatgattaaaaaaccacagaaatccaagccgggtgtcttctccttccttgatcctttggcttatgagatttggatgtgcattgtttttgcctacattggagtgagtgttgtcctcttcctggtcagccgcttcagtccctatgaatggcacagtgaagagtttgaggaaggacgggaccagacaaccagtgaccagtccaatgagtttgggatattcaacagtttgtggttctccctgggagccttcatgcagcaaggatgtgacatttctcccaggtccctgtctggtcgcatcgttggtggcgtctggtggttcttcaccttaatcatcatctcctcatatacagccaatctggccgccttcctgaccgtggagaggatggtgtctcccattgagagtgcagaggacctagcgaagcagacagaaattgcctacgggacgctggaagcaggatctactaaggagttcttcaggaggtctaaaattgctgtgtttgagaagatgtggacatacatgaagtcagcagagccatcagtttttgtgcggaccacagaggaggggatgattcgagtgaggaaatccaaaggcaaatatgcctacctcctggagtccaccatgaatgagtacattgagcagcggaaaccctgtgacaccatgaaggtgggaggtaacttggattccaaaggctatggcattgcaacacccaaggggtctgccctgagaaatccagtaaacctggcagtgttaaaactgaacgagcaggggcttttggacaaattgaaaaacaaatggtggtacgacaagggcgagtgcggcagcgggggaggtgattccaaggacaagacaagcgctctgagcctcagcaatgtggcaggcgtgttctacatcctgatcggaggacttggactagccatgctggttgccttaatcgagttctgctacaaatcccgtagtgaatccaagcggatgaagggtttttgtttgatcccacagcaatccatcaacgaagccatacggacatcgaccctcccccgcaacagcggggcaggagccagcagcggcggcagtggagagaatggtcgggtggtcagccatgacttccccaagtccatgcaatcgattccttgcatgagccacagttcagggatgcccttgggagccacgggattgtaactggagcagatggagaccccttggggagcaggctcgggctccccagccccatcccaaacccttcagtgccaaaaacaacaacaaaatgaaacgcaaccaccaccaaccactgcgaccacaagaaggatgattcaacaggttttcctgaagaattgaaaaaccattttgctgtcccttttccttttttgatgttctttcacccttttctgtttgctaagtgaggatgaaaaaataacactgtactgcaataaggggagagtaaccctgtctaatgaaacctgtgtctctgagagtagagtcactggaacactaatgaggaaactgcactgttttattttaattcagttgttagtgtgtcttagtgtgtgcaattttttttcttactaatatccatggtttgcaggttctgttaggccctttccttctccttacttcttatccccaactccctacccacccctcttcagttttcagattggagattcaagatttgttccactttacaagcaagaggaaaaaaaagcaaccttcaaactaattctccatgggggctctccatgttaccctccactccttggcccaaacctctgatggagatagacattgttggagaagtgggctgccttccccaagtggggcactgcttaagcacttattcagtggagaacacaggtgaaaagcaactcaggatgagggtggtggagagggcaggggcagatgtgcagtcagagaaggactcctgaagttactgctgctcagaaaaacagttcctttaatgtggaagagccatttcataggtcataggtggtatggtatatttcttcagagtcaaccttggccctgagaagtatgtcctcctggtgtgctcaggctcaacggcagtctggtggctgaaggcacttggcctcctaaaccaagcagaattttgggaagagataacagccagggagatattgcccatgattctcactttttctttgcctggcatctaagcaggaacccattgtggagtagactctcttcttctatggagcctctgacatggggagcaatgctaagcaagctaagtgtaaaagaaaagtgacagaataattttggaagaggaagcctcatcaaaagctcacacaaaatagagcttcccatggtgtgccctatcctaggtttaagaaaacacgtatgaagtttatgctgatgcaaagaacttgggtttttatgttaatataaagtgttgttttagcatgtggccagatgatgctctgtcatctttagaaagtgagataaccaaggaaataattgaaggagtatagggagatggattaagttgataatgacatttagggcaacttaagacctttgatcccaggttctaactcaaagaggctgaccttcccccagctaagatagcatgaggacgttgtattccaatatacgtatgattggggctacaaagctgaactaaagcaagattggtgaagtggcagggtttatagagagaagcccaggctgagttcagcttttgttggaagtgagaatccctgacatatagctttcttggagatcccaactctcattcttggtgcaactggcttccagctctccagcagtcactctcctaggtgcatgattcagtgcgtgccatgtgtcattagcttttactgataaccatattctggcttgttcccttaccccctacttctatccaattttctctgctaggggttatcattagcaattgacatgctaaaggttttggagcccacctaggggtaggtgcagctttattggcttttctgtggattctctcagtggacccacaccatctctatgtctctccactctcctgccttcagccatagcaaagaatccttccaaaatcaaactcttcacttttttgactcaagtgttgttgttcagtctctcgcgtgtcaatgtggtcatggttcatgaaaccggaccctcaagatggatgattgcttttaactactgccagctgatgtctctcagcccctgccctcatacaagatttttctcagccttcagcctaccactgcagaatccgatgtgacccaccattagggagtctgcatcttggaagagttggaaataaccctttaacatcaacatgcttcaaagactttttgcctttggcctagtaagatgcctctccagctactgagcccacaagtaacatgagcggataaaaagagacttgtttgtgctagaaatgagggtctatgctatgagggggtccaagactctggcgaaatgtgctttttcatcaatggagaaatgaaaggaaaacacaagcaagaaaaaagttaacttgtattatgtatttttactacacttttcttaaaaatagagcattgggaaaactctgaaagagactgacatttttctcaacaggaatccatacttaacagttctggctttcattaaattttgctctttggtacctgggccttttatttaacatctatatttgttttaactctcttggcagatgtgtgaaaggattcttgcttgatcaaacactaagtatttttttggttcttgtttttctttcaaatagccaggtttttttcttttggtatttgcataaaatgaaaatatcaccgaatattaaatcactgtggatccatt

SEQ ID NO: 4519 - protein, 906 aa, Homo sapiens; identical to SEQ ID NO: 554

SEQ ID NO: 4520 - DNA, 5506 bp, Homo sapiens
agtgggggagccagcgctccagctagcatgaggacgggcttcttttcccgtgctcagttaatctggctgtcagttggtgttaacgctgcagtttaagtgttcggattccaagggaaacagacaaacctcacgaaaggaaggaagcaagcaagcaaggaaggaactgcaggaggaaaagaacaggcagaacagcgagaagaataaagggaaagggggggaaacaccaaatctatgattggacctgggcttctttttcgccaatgcaaaaaggaatatgcagcacatttttgccttcttctgcaccggtttcctaggcgcggtagtaggtgccaatttccccaacaatatccagatcgggggattatttccaaaccagcagtcacaggaacatgctgcttttagatttgctttgtcgcaactcacagagcccccgaagctgctcccccagattgatattgtgaacatcagcgacagctttgagatgacctatagatttgtgcagattgaaggagatcaacttggaaagtgcttagcataaggcctggcatagatctgttcccagttctccaaaggagtctatgccatctttgggttttatgaacgtaggactgtcaacatgctgacctccttttgtggggccctccacgtctgcttcattacgccgagctttcccgttgatacatccaatcagtttgtccttcagctgcgccctgaactgcaggatgccctcatcagcatcattgaccattacaagtggcagaaatttgtctacatttatgatgccgaccggggcttatccgtcctgcagaaagtcctggatacagctgctgagaagaactggcaggtgacagcagtcaacattttgacaaccacagaggagggataccggatgctctttcaggacctggagaagaaaaaggagcggctggtggtggtggactgtgaatcagaacgcctcaatgctatcttgggccagattataaagctagagaagaatggcatcggctaccactacattcttgcaaatctgggcttcatggacattgacttaaacaaattcaaggagagtggcgccaatgtgacaggtttccagctggtgaactacacagacactattccggccaagatcatgcagcagtggaagaatagtgatgctcgagaccacacacgggtggactggaagagacccaagtacacctctgcgctcacctacgatggggtgaaggtgatggctgaggctttccagagcctgcggaggcagagaattgatatatctcgccgggggaatgctggggattgtctggctaacccagctgttccctggggccaagggatcgacatccagagagctctgcagcaggtgcgatttgaaggtttaacaggaaacgtgcagtttaatgagaaaggacgccggaccaactacacgctccacgtgattgaaatgaaacatgacggcatccgaaagattggttactggaatgaagatgataagtttgtccctgcagccaccgatgcccaagctgggggcgataattcaagtgttcagaacagaacatacatcgtcacaacaatcctagaagatccttatgtgatgctcaagaagaacgccaatcagtttgagggcaatgaccgttacgagggctactgtgtagagctggcggcagagattgccaagcacgtgggctactcctaccgtctggagattgtcagtgatggaaaatacggagcccgagaccctgacacgaaggcctggaatggcatggtgggagagctggtctatggaagagcagatgtggctgtggctcccttaactatcactttggtccgggaagaagttatagatttctccaaaccatttatgagtttggggatctccatcatgattaaaaaaccacagaaatccaagccgggtgtcttctccttccttgatcctttggcttatgagatttggatgtgcattgtttttgcctacattggagtgagtgttgtcctcttcctggtcagccgcttcagtccctatgaatggcacagtgaagagtttgaggaaggacgggaccagacaaccagtgaccagtccaatgagtttgggatattcaacagtttgtggttctccctgggagccttcatgcagcaaggatgtgacatttctcccaggtccctgtctggtcgcatcgttggtggcgtctggtggttcttcaccttaatcatcatctcctcatatacagccaatctggccgccttcctgaccgtggagaggatggtgtctcccattgagagtgcagaggacctagcgaagcagacagaaattgcctacgggacgctggaagcaggatctactaaggagttcttcaggaggtctaaaattgctgtgtttgagaagatgtggacatacatgaagtcagcagagccatcagtttttgtgcggaccacagaggaggggatgattcgagtgaggaaatccaaaggcaaatatgcctacctcctggagtccaccatgaatgagtacattgagcagcggaaaccctgtgacaccatgaaggtgggaggtaacttggattccaaaggctatggcattgcaacacccaaggggtctgccctgagaggtcccgtaaacctagcggttttgaaactcagtgagcaaggcgtcttagacaagctgaaaagcaaatggtggtacgataaaggggaatgtggaagcaaggactccggaagtaaggacaagacaagcgctctgagcctcagcaatgtggcaggcgtgttctacatcctgatcggaggacttggactagccatgctggttgccttaatcgagttctgctacaaatcccgtagtgaatccaagcggatgaagggtttttgtttgatcccacagcaatccatcaacgaagccatacggacatcgaccctcccccgcaacagcggggcaggagccagcagcggcggcagtggagagaatggtcgggtggtcagccatgacttccccaagtccatgcaatcgattccttgcatgagccacagttcagggatgcccttgggagccacgggattgtaactggagcagatggagaccccttggggagcaggctcgggctccccagccccatcccaaacccttcagtgccaaaaacaacaacaaaatgaaacgcaaccaccaccaaccactgcgaccacaagaaggatgattcaacaggttttcctgaagaattgaaaaaccattttgctgtcccttttccttttttgatgttctttcacccttttctgtttgctaagtgaggatgaaaaaataacactgtactgcaataaggggagagtaaccctgtctaatgaaacctgtgtctctgagagtagagtcactggaacactaatgaggaaactgcactgttttattttaattcagttgttagtgtgtcttagtgtgtgcaattttttttcttactaatatccatggtttgcaggttctgttaggccctttccttctccttacttcttatccccaactccctacccacccctcttcagttttcagattggagattcaagatttgttccactttacaagcaagaggaaaaaaaagcaaccttcaaactaattctccatgggggctctccatgttaccctccactccttggcccaaacctctgatggagatagacattgttggagaagtgggctgccttccccaagtggggcactgcttaagcacttattcagtggagaacacaggtgaaaagcaactcaggatgagggtggtggagagggcaggggcagatgtgcagtcagagaaggactcctgaagttactgctgctcagaaaaacagttcctttaatgtggaagagccatttcataggtcataggtggtatggtatatttcttcagagtcaaccttggccctgagaagtatgtcctcctggtgtgctcaggctcaacggcagtctggtggctgaaggcacttggcctcctaaaccaagcagaattttgggaagagataacagccagggagatattgcccatgattctcactttttctttgcctggcatctaagcaggaacccattgtggagtagactctcttcttctatggagcctctgacatggggagcaatgctaagcaagctaagtgtaaaagaaaagtgacagaataattttggaagaggaagcctcatcaaaagctcacacaaaatagagcttcccatggtgtgccctatcctaggtttaagaaaacacgtatgaagtttatgctgatgcaaagaacttgggtttttatgttaatataaagtgttgttttagcatgtggccagatgatgctctgtcatctttagaaagtgagataaccaaggaaataattgaaggagtatagggagatggattaagttgataatgacatttagggcaacttaagacctttgatcccaggttctaactcaaagaggctgaccttcccccagctaagatagcatgaggacgttgtattccaatatacgtatgattggggctacaaagctgaactaaagcaagattggtgaagtggcagggtttatagagagaagcccaggctgagttcagcttttgttggaagtgagaatccctgacatatagctttcttggagatcccaactctcattcttggtgcaactggcttccagctctccagcagtcactctcctaggtgcatgattcagtgcgtgccatgtgtcattagcttttactgataaccatattctggcttgttcccttaccccctacttctatccaattttctctgctaggggttatcattagcaattgacatgctaaaggttttggagcccacctaggggtaggtgcagctttattggcttttctgtggattctctcagtggacccacaccatctctatgtctctccactctcctgccttcagccatagcaaagaatccttccaaaatcaaactcttcacttttttgactcaagtgttgttgttcagtctctcgcgtgtcaatgtggtcatggttcatgaaaccggaccctcaagatggatgattgcttttaactactgccagctgatgtctctcagcccctgccctcatacaagatttttctcagccttcagcctaccactgcagaatccgatgtgacccaccattagggagtctgcatcttggaagagttggaaataaccctttaacatcaacatgcttcaaagactttttgcctttggcctagtaagatgcctctccagctactgagcccacaagtaacatgagcggataaaaagagacttgtttgtgctagaaatgagggtctatgctatgagggggtccaagactctggcgaaatgtgctttttcatcaatggagaaatgaaaggaaaacacaagcaagaaaaaagttaacttgtattatgtatttttactacacttttcttaaaaatagagcattgggaaaactctgaaagagactgacatttttctcaacaggaatccatacttaacagttctggctttcattaaattttgctctttggt

SEQ ID NO: 4521 - protein, 811 aa, Homo sapiens
MLTSFCGALHVCFITPSFPVDTSNQFVLQLRPELQDALISIIDHYKWQKFVYIYDADRGLSVLQKVLDTAAEKNWQVTAVNILTTTEEGYRMLFQDLEKKKERLVVVDCESERLNAILGQIIKLEKNGIGYHYILANLGFMDIDLNKFKESGANVTGFQLVNYTDTIPAKIMQQWKNSDARDHTRVDWKRPKYTSALTYDGVKVMAEAFQSLRRQRIDISRRGNAGDCLANPAVPWGQGIDIQRALQQVRFEGLTGNVQFNEKGRRTNYTLHVIEMKHDGIRKIGYWNEDDKFVPAATDAQAGGDNSSVQNRTYIVTTILEDPYVMLKKNANQFEGNDRYEGYCVELAAEIAKHVGYSYRLEIVSDGKYGARDPDTKAWNGMVGELVYGRADVAVAPLTITLVREEVIDFSKPFMSLGISIMIKKPQKSKPGVFSFLDPLAYEIWMCIVFAYIGVSVVLFLVSRFSPYEWHSEEFEEGRDQTTSDQSNEFGIFNSLWFSLGAFMQQGCDISPRSLSGRIVGGVWWFFTLIIISSYTANLAAFLTVERMVSPIESAEDLAKQTEIAYGTLEAGSTKEFFRRSKIAVFEKMWTYMKSAEPSVFVRTTEEGMIRVRKSKGKYAYLLESTMNEYIEQRKPCDTMKVGGNLDSKGYGIATPKGSALRGPVNLAVLKLSEQGVLDKLKSKWWYDKGECGSKDSGSKDKTSALSLSNVAGVFYILIGGLGLAMLVALIEFCYKSRSESKRMKGFCLIPQQSINEAIRTSTLPRNSGAGASSGGSGENGRVVSHDFPKSMQSIPCMSHSSGMPLGATGL

SEQ ID NO: 4522 - DNA, 5695 bp, Homo sapiens
agtgggggagccagcgctccagctagcatgaggacgggcttcttttcccgtgctcagttaatctggctgtcagttggtgttaacgctgcagtttaagtgttcggattccaagggaaacagacaaacctcacgaaaggaaggaagcaagcaagcaaggaaggaactgcaggaggaaaagaacaggcagaacagcgagaagaataaagggaaagggggggaaacaccaaatctatgattggacctgggcttctttttcgccaatgcaaaaaggaatatgcagcacatttttgccttcttctgcaccggtttcctaggcgcggtagtaggtgccaatttccccaacaatatccagatcgggggattatttccaaaccagcagtcacaggaacatgctgcttttagatttgctttgtcgcaactcacagagcccccgaagctgctcccccagattgatattgtgaacatcagcgacagctttgagatgacctatagatttgtgcagattgaaggagatcaacttggaaagtgcttagcataaggcctggcatagatctgttcccagttctccaaaggagtctatgccatctttgggttttatgaacgtaggactgtcaacatgctgacctccttttgtggggccctccacgtctgcttcattacgccgagctttcccgttgatacatccaatcagtttgtccttcagctgcgccctgaactgcaggatgccctcatcagcatcattgaccattacaagtggcagaaatttgtctacatttatgatgccgaccggggcttatccgtcctgcagaaagtcctggatacagctgctgagaagaactggcaggtgacagcagtcaacattttgacaaccacagaggagggataccggatgctctttcaggacctggagaagaaaaaggagcggctggtggtggtggactgtgaatcagaacgcctcaatgctatcttgggccagattataaagctagagaagaatggcatcggctaccactacattcttgcaaatctgggcttcatggacattgacttaaacaaattcaaggagagtggcgccaatgtgacaggtttccagctggtgaactacacagacactattccggccaagatcatgcagcagtggaagaatagtgatgctcgagaccacacacgggtggactggaagagacccaagtacacctctgcgctcacctacgatggggtgaaggtgatggctgaggctttccagagcctgcggaggcagagaattgatatatctcgccgggggaatgctggggattgtctggctaacccagctgttccctggggccaagggatcgacatccagagagctctgcagcaggtgcgatttgaaggtttaacaggaaacgtgcagtttaatgagaaaggacgccggaccaactacacgctccacgtgattgaaatgaaacatgacggcatccgaaagattggttactggaatgaagatgataagtttgtccctgcagccaccgatgcccaagctgggggcgataattcaagtgttcagaacagaacatacatcgtcacaacaatcctagaagatccttatgtgatgctcaagaagaacgccaatcagtttgagggcaatgaccgttacgagggctactgtgtagagctggcggcagagattgccaagcacgtgggctactcctaccgtctggagattgtcagtgatggaaaatacggagcccgagaccctgacacgaaggcctggaatggcatggtgggagagctggtctatggaagagcagatgtggctgtggctcccttaactatcactttggtccgggaagaagttatagatttctccaaaccatttatgagtttggggatctccatcatgattaaaaaaccacagaaatccaagccgggtgtcttctccttccttgatcctttggcttatgagatttggatgtgcattgtttttgcctacattggagtgagtgttgtcctcttcctggtcagccgcttcagtccctatgaatggcacagtgaagagtttgaggaaggacgggaccagacaaccagtgaccagtccaatgagtttgggatattcaacagtttgtggttctccctgggagccttcatgcagcaaggatgtgacatttctcccaggtccctgtctggtcgcatcgttggtggcgtctggtggttcttcaccttaatcatcatctcctcatatacagccaatctggccgccttcctgaccgtggagaggatggtgtctcccattgagagtgcagaggacctagcgaagcagacagaaattgcctacgggacgctggaagcaggatctactaaggagttcttcaggaggtctaaaattgctgtgtttgagaagatgtggacatacatgaagtcagcagagccatcagtttttgtgcggaccacagaggaggggatgattcgagtgaggaaatccaaaggcaaatatgcctacctcctggagtccaccatgaatgagtacattgagcagcggaaaccctgtgacaccatgaaggtgggaggtaacttggattccaaaggctatggcattgcaacacccaaggggtctgccctgagaggtcccgtaaacctagcggttttgaaactcagtgagcaaggcgtcttagacaagctgaaaagcaaatggtggtacgataaaggggaatgtggaagcaaggactccggaagtaaggacaagacaagcgctctgagcctcagcaatgtggcaggcgtgttctacatcctgatcggaggacttggactagccatgctggttgccttaatcgagttctgctacaaatcccgtagtgaatccaagcggatgaagggtttttgtttgatcccacagcaatccatcaacgaagccatacggacatcgaccctcccccgcaacagcggggcaggagccagcagcggcggcagtggagagaatggtcgggtggtcagccatgacttccccaagtccatgcaatcgattccttgcatgagccacagttcagggatgcccttgggagccacgggattgtaactggagcagatggagaccccttggggagcaggctcgggctccccagccccatcccaaacccttcagtgccaaaaacaacaacaaaatgaaacgcaaccaccaccaaccactgcgaccacaagaaggatgattcaacaggttttcctgaagaattgaaaaaccattttgctgtcccttttccttttttgatgttctttcacccttttctgtttgctaagtgaggatgaaaaaataacactgtactgcaataaggggagagtaaccctgtctaatgaaacctgtgtctctgagagtagagtcactggaacactaatgaggaaactgcactgttttattttaattcagttgttagtgtgtcttagtgtgtgcaattttttttcttactaatatccatggtttgcaggttctgttaggccctttccttctccttacttcttatccccaactccctacccacccctcttcagttttcagattggagattcaagatttgttccactttacaagcaagaggaaaaaaaagcaaccttcaaactaattctccatgggggctctccatgttaccctccactccttggcccaaacctctgatggagatagacattgttggagaagtgggctgccttccccaagtggggcactgcttaagcacttattcagtggagaacacaggtgaaaagcaactcaggatgagggtggtggagagggcaggggcagatgtgcagtcagagaaggactcctgaagttactgctgctcagaaaaacagttcctttaatgtggaagagccatttcataggtcataggtggtatggtatatttcttcagagtcaaccttggccctgagaagtatgtcctcctggtgtgctcaggctcaacggcagtctggtggctgaaggcacttggcctcctaaaccaagcagaattttgggaagagataacagccagggagatattgcccatgattctcactttttctttgcctggcatctaagcaggaacccattgtggagtagactctcttcttctatggagcctctgacatggggagcaatgctaagcaagctaagtgtaaaagaaaagtgacagaataattttggaagaggaagcctcatcaaaagctcacacaaaatagagcttcccatggtgtgccctatcctaggtttaagaaaacacgtatgaagtttatgctgatgcaaagaacttgggtttttatgttaatataaagtgttgttttagcatgtggccagatgatgctctgtcatctttagaaagtgagataaccaaggaaataattgaaggagtatagggagatggattaagttgataatgacatttagggcaacttaagacctttgatcccaggttctaactcaaagaggctgaccttcccccagctaagatagcatgaggacgttgtattccaatatacgtatgattggggctacaaagctgaactaaagcaagattggtgaagtggcagggtttatagagagaagcccaggctgagttcagcttttgttggaagtgagaatccctgacatatagctttcttggagatcccaactctcattcttggtgcaactggcttccagctctccagcagtcactctcctaggtgcatgattcagtgcgtgccatgtgtcattagcttttactgataaccatattctggcttgttcccttaccccctacttctatccaattttctctgctaggggttatcattagcaattgacatgctaaaggttttggagcccacctaggggtaggtgcagctttattggcttttctgtggattctctcagtggacccacaccatctctatgtctctccactctcctgccttcagccatagcaaagaatccttccaaaatcaaactcttcacttttttgactcaagtgttgttgttcagtctctcgcgtgtcaatgtggtcatggttcatgaaaccggaccctcaagatggatgattgcttttaactactgccagctgatgtctctcagcccctgccctcatacaagatttttctcagccttcagcctaccactgcagaatccgatgtgacccaccattagggagtctgcatcttggaagagttggaaataaccctttaacatcaacatgcttcaaagactttttgcctttggcctagtaagatgcctctccagctactgagcccacaagtaacatgagcggataaaaagagacttgtttgtgctagaaatgagggtctatgctatgagggggtccaagactctggcgaaatgtgctttttcatcaatggagaaatgaaaggaaaacacaagcaagaaaaaagttaacttgtattatgtatttttactacacttttcttaaaaatagagcattgggaaaactctgaaagagactgacatttttctcaacaggaatccatacttaacagttctggctttcattaaattttgctctttggtacctgggccttttatttaacatctatatttgttttaactctcttggcagatgtgtgaaaggattcttgcttgatcaaacactaagtatttttttggttcttgtttttctttcaaatagccaggtttttttcttttggtatttgcataaaatgaaaatatcaccgaatattaaatcactgtggatccatt

SEQ ID NO: 4523 - protein, 811 aa, Homo sapiens; identical to SEQ ID NO: 4521

SEQ ID NO: 4524 - DNA, 2669 bp, Homo sapiens
agttaatctggctgtcagttggtgttaacgctgcagtttaagtgttcggattccaagggaaacagacaaacctcacgaaaggaaggaagcaagcaagcaaggaaggaactgcaggaggaaaagaacaggcagaacagcgagaagaataaagggaaagggggggaaacaccaaatctatgattggacctgggcttctttttcgccaatgcaaaaaggaatatgcaatggagaccccttggggagcaggctcgggctccccagccccatcccaaacccttcagtgccaaaaacaacaacaaaatgaaacgcaaccaccaccaaccactgcgaccacaagaaggatgattcaacaggttttcctgaagaattgaaaaaccattttgctgtcccttttccttttttgatgttctttcacccttttctgtttgctaagtgaggatgaaaaaataacactgtactgcaataaggggagagtaaccctgtctaatgaaacctgtgtctctgagagtagagtcactggaacactaatgaggaaactgcactgttttattttaattcagttgttagtgtgtcttagtgtgtgcaattttttttcttactaatatccatggtttgcaggttctgttaggccctttccttctccttacttcttatccccaactccctacccacccctcttcagttttcagattggagattcaagatttgttccactttacaagcaagaggaaaaaaaagcaaccttcaaactaattctccatgggggctctccatgttaccctccactccttggcccaaacctctgatggagatagacattgttggagaagtgggctgccttccccaagtggggcactgcttaagcacttattcagtggagaacacaggtgaaaagcaactcaggatgagggtggtggagagggcaggggcagatgtgcagtcagagaaggactcctgaagttactgctgctcagaaaaacagttcctttaatgtggaagagccatttcataggtcataggtggtatggtatatttcttcagagtcaaccttggccctgagaagtatgtcctcctggtgtgctcaggctcaacggcagtctggtggctgaaggcacttggcctcctaaaccaagcagaattttgggaagagataacagccagggagatattgcccatgattctcactttttctttgcctggcatctaagcaggaacccattgtggagtagactctcttcttctatggagcctctgacatggggagcaatgctaagcaagctaagtgtaaaagaaaagtgacagaataattttggaagaggaagcctcatcaaaagctcacacaaaatagagcttcccatggtgtgccctatcctaggtttaagaaaacacgtatgaagtttatgctgatgcaaagaacttgggtttttatgttaatataaagtgttgttttagcatgtggccagatgatgctctgtcatctttagaaagtgagataaccaaggaaataattgaaggagtatagggagatggattaagttgataatgacatttagggcaacttaagacctttgatcccaggttctaactcaaagaggctgaccttcccccagctaagatagcatgaggacgttgtattccaatatacgtatgattggggctacaaagctgaactaaagcaagattggtgaagtggcagggtttatagagagaagcccaggctgagttcagcttttgttggaagtgagaatccctgacatatagctttcttggagatcccaactctcattcttggtgcaactggcttccagctctccagcagtcactctcctaggtgcatgattcagtgcgtgccatgtgtcattagcttttactgataaccatattctggcttgttcccttaccccctacttctatccaattttctctgctaggggttatcattagcaattgacatgctaaaggttttggagcccacctaggggtaggtgcagctttattggcttttctgtggattctctcagtggacccacaccatctctatgtctctccactctcctgccttcagccatagcaaagaatccttccaaaatcaaactcttcacttttttgactcaagtgttgttgttcagtctctcgcgtgtcaatgtggtcatggttcatgaaaccggaccctcaagatggatgattgcttttaactactgccagctgatgtctctcagcccctgccctcatacaagatttttctcagccttcagcctaccactgcagaatccgatgtgacccaccattagggagtctgcatcttggaagagttggaaataaccctttaacatcaacatgcttcaaagactttttgcctttggcctagtaagatgcctctccagctactgagcccacaagtaacatgagcggataaaaagagacttgtttgtgctagaaatgagggtctatgctatgagggggtccaagactctggcgaaatgtgctttttcatcaatggagaaatgaaaggaaaacacaagcaagaaaaaagttaacttgtattatgtatttttactacacttttcttaaaaatagagcattgggaaaactctgaaagagactgacatttttctcaacaggaatccatacttaacagttctggctttcattaaattttgctctttggt

SEQ ID NO: 4525 - protein, 64 aa, Homo sapiens
MIGPGLLFRQCKKEYAMETPWGAGSGSPAPSQTLQCQKQQQNETQPPPTTATTRRMIQQVFLKN

SEQ ID NO: 4526 - DNA, 2858 bp, Homo sapiens
agttaatctggctgtcagttggtgttaacgctgcagtttaagtgttcggattccaagggaaacagacaaacctcacgaaaggaaggaagcaagcaagcaaggaaggaactgcaggaggaaaagaacaggcagaacagcgagaagaataaagggaaagggggggaaacaccaaatctatgattggacctgggcttctttttcgccaatgcaaaaaggaatatgcaatggagaccccttggggagcaggctcgggctccccagccccatcccaaacccttcagtgccaaaaacaacaacaaaatgaaacgcaaccaccaccaaccactgcgaccacaagaaggatgattcaacaggttttcctgaagaattgaaaaaccattttgctgtcccttttccttttttgatgttctttcacccttttctgtttgctaagtgaggatgaaaaaataacactgtactgcaataaggggagagtaaccctgtctaatgaaacctgtgtctctgagagtagagtcactggaacactaatgaggaaactgcactgttttattttaattcagttgttagtgtgtcttagtgtgtgcaattttttttcttactaatatccatggtttgcaggttctgttaggccctttccttctccttacttcttatccccaactccctacccacccctcttcagttttcagattggagattcaagatttgttccactttacaagcaagaggaaaaaaaagcaaccttcaaactaattctccatgggggctctccatgttaccctccactccttggcccaaacctctgatggagatagacattgttggagaagtgggctgccttccccaagtggggcactgcttaagcacttattcagtggagaacacaggtgaaaagcaactcaggatgagggtggtggagagggcaggggcagatgtgcagtcagagaaggactcctgaagttactgctgctcagaaaaacagttcctttaatgtggaagagccatttcataggtcataggtggtatggtatatttcttcagagtcaaccttggccctgagaagtatgtcctcctggtgtgctcaggctcaacggcagtctggtggctgaaggcacttggcctcctaaaccaagcagaattttgggaagagataacagccagggagatattgcccatgattctcactttttctttgcctggcatctaagcaggaacccattgtggagtagactctcttcttctatggagcctctgacatggggagcaatgctaagcaagctaagtgtaaaagaaaagtgacagaataattttggaagaggaagcctcatcaaaagctcacacaaaatagagcttcccatggtgtgccctatcctaggtttaagaaaacacgtatgaagtttatgctgatgcaaagaacttgggtttttatgttaatataaagtgttgttttagcatgtggccagatgatgctctgtcatctttagaaagtgagataaccaaggaaataattgaaggagtatagggagatggattaagttgataatgacatttagggcaacttaagacctttgatcccaggttctaactcaaagaggctgaccttcccccagctaagatagcatgaggacgttgtattccaatatacgtatgattggggctacaaagctgaactaaagcaagattggtgaagtggcagggtttatagagagaagcccaggctgagttcagcttttgttggaagtgagaatccctgacatatagctttcttggagatcccaactctcattcttggtgcaactggcttccagctctccagcagtcactctcctaggtgcatgattcagtgcgtgccatgtgtcattagcttttactgataaccatattctggcttgttcccttaccccctacttctatccaattttctctgctaggggttatcattagcaattgacatgctaaaggttttggagcccacctaggggtaggtgcagctttattggcttttctgtggattctctcagtggacccacaccatctctatgtctctccactctcctgccttcagccatagcaaagaatccttccaaaatcaaactcttcacttttttgactcaagtgttgttgttcagtctctcgcgtgtcaatgtggtcatggttcatgaaaccggaccctcaagatggatgattgcttttaactactgccagctgatgtctctcagcccctgccctcatacaagatttttctcagccttcagcctaccactgcagaatccgatgtgacccaccattagggagtctgcatcttggaagagttggaaataaccctttaacatcaacatgcttcaaagactttttgcctttggcctagtaagatgcctctccagctactgagcccacaagtaacatgagcggataaaaagagacttgtttgtgctagaaatgagggtctatgctatgagggggtccaagactctggcgaaatgtgctttttcatcaatggagaaatgaaaggaaaacacaagcaagaaaaaagttaacttgtattatgtatttttactacacttttcttaaaaatagagcattgggaaaactctgaaagagactgacatttttctcaacaggaatccatacttaacagttctggctttcattaaattttgctctttggtacctgggccttttatttaacatctatatttgttttaactctcttggcagatgtgtgaaaggattcttgcttgatcaaacactaagtatttttttggttcttgtttttctttcaaatagccaggtttttttcttttggtatttgcataaaatgaaaatatcaccgaatattaaatcactgtggatccatt

SEQ ID NO: 4527 - protein, 64 aa, Homo sapiens; identical to SEQ ID NO: 4525

SEQ ID NO: 4528 - DNA, 2567 bp, Homo sapiens
ataccctactcgcactccaggcaagagcatgtgaaatggaggaaccatcgctttggaggaaaaaaaaaatcaggctggaaagggtggtgggtgtttaaggagttaactctattgcttggtagatggtgcttgattccatttttaatgtaagtatgtatgccccatcccaaacccttcagtgccaaaaacaacaacaaaatgaaacgcaaccaccaccaaccactgcgaccacaagaaggatgattcaacaggttttcctgaagaattgaaaaaccattttgctgtcccttttccttttttgatgttctttcacccttttctgtttgctaagtgaggatgaaaaaataacactgtactgcaataaggggagagtaaccctgtctaatgaaacctgtgtctctgagagtagagtcactggaacactaatgaggaaactgcactgttttattttaattcagttgttagtgtgtcttagtgtgtgcaattttttttcttactaatatccatggtttgcaggttctgttaggccctttccttctccttacttcttatccccaactccctacccacccctcttcagttttcagattggagattcaagatttgttccactttacaagcaagaggaaaaaaaagcaaccttcaaactaattctccatgggggctctccatgttaccctccactccttggcccaaacctctgatggagatagacattgttggagaagtgggctgccttccccaagtggggcactgcttaagcacttattcagtggagaacacaggtgaaaagcaactcaggatgagggtggtggagagggcaggggcagatgtgcagtcagagaaggactcctgaagttactgctgctcagaaaaacagttcctttaatgtggaagagccatttcataggtcataggtggtatggtatatttcttcagagtcaaccttggccctgagaagtatgtcctcctggtgtgctcaggctcaacggcagtctggtggctgaaggcacttggcctcctaaaccaagcagaattttgggaagagataacagccagggagatattgcccatgattctcactttttctttgcctggcatctaagcaggaacccattgtggagtagactctcttcttctatggagcctctgacatggggagcaatgctaagcaagctaagtgtaaaagaaaagtgacagaataattttggaagaggaagcctcatcaaaagctcacacaaaatagagcttcccatggtgtgccctatcctaggtttaagaaaacacgtatgaagtttatgctgatgcaaagaacttgggtttttatgttaatataaagtgttgttttagcatgtggccagatgatgctctgtcatctttagaaagtgagataaccaaggaaataattgaaggagtatagggagatggattaagttgataatgacatttagggcaacttaagacctttgatcccaggttctaactcaaagaggctgaccttcccccagctaagatagcatgaggacgttgtattccaatatacgtatgattggggctacaaagctgaactaaagcaagattggtgaagtggcagggtttatagagagaagcccaggctgagttcagcttttgttggaagtgagaatccctgacatatagctttcttggagatcccaactctcattcttggtgcaactggcttccagctctccagcagtcactctcctaggtgcatgattcagtgcgtgccatgtgtcattagcttttactgataaccatattctggcttgttcccttaccccctacttctatccaattttctctgctaggggttatcattagcaattgacatgctaaaggttttggagcccacctaggggtaggtgcagctttattggcttttctgtggattctctcagtggacccacaccatctctatgtctctccactctcctgccttcagccatagcaaagaatccttccaaaatcaaactcttcacttttttgactcaagtgttgttgttcagtctctcgcgtgtcaatgtggtcatggttcatgaaaccggaccctcaagatggatgattgcttttaactactgccagctgatgtctctcagcccctgccctcatacaagatttttctcagccttcagcctaccactgcagaatccgatgtgacccaccattagggagtctgcatcttggaagagttggaaataaccctttaacatcaacatgcttcaaagactttttgcctttggcctagtaagatgcctctccagctactgagcccacaagtaacatgagcggataaaaagagacttgtttgtgctagaaatgagggtctatgctatgagggggtccaagactctggcgaaatgtgctttttcatcaatggagaaatgaaaggaaaacacaagcaagaaaaaagttaacttgtattatgtatttttactacacttttcttaaaaatagagcattgggaaaactctgaaagagactgacatttttctcaacaggaatccatacttaacagttctggctttcattaaattttgctctttggt

SEQ ID NO: 4529 - protein, 48 aa, Homo sapiens
MVLDSIFNVSMYAPSQTLQCQKQQQNETQPPPTTATTRRMIQQVFLKN

SEQ ID NO: 4530 - DNA, 2756 bp, Homo sapiens
ataccctactcgcactccaggcaagagcatgtgaaatggaggaaccatcgctttggaggaaaaaaaaaatcaggctggaaagggtggtgggtgtttaaggagttaactctattgcttggtagatggtgcttgattccatttttaatgtaagtatgtatgccccatcccaaacccttcagtgccaaaaacaacaacaaaatgaaacgcaaccaccaccaaccactgcgaccacaagaaggatgattcaacaggttttcctgaagaattgaaaaaccattttgctgtcccttttccttttttgatgttctttcacccttttctgtttgctaagtgaggatgaaaaaataacactgtactgcaataaggggagagtaaccctgtctaatgaaacctgtgtctctgagagtagagtcactggaacactaatgaggaaactgcactgttttattttaattcagttgttagtgtgtcttagtgtgtgcaattttttttcttactaatatccatggtttgcaggttctgttaggccctttccttctccttacttcttatccccaactccctacccacccctcttcagttttcagattggagattcaagatttgttccactttacaagcaagaggaaaaaaaagcaaccttcaaactaattctccatgggggctctccatgttaccctccactccttggcccaaacctctgatggagatagacattgttggagaagtgggctgccttccccaagtggggcactgcttaagcacttattcagtggagaacacaggtgaaaagcaactcaggatgagggtggtggagagggcaggggcagatgtgcagtcagagaaggactcctgaagttactgctgctcagaaaaacagttcctttaatgtggaagagccatttcataggtcataggtggtatggtatatttcttcagagtcaaccttggccctgagaagtatgtcctcctggtgtgctcaggctcaacggcagtctggtggctgaaggcacttggcctcctaaaccaagcagaattttgggaagagataacagccagggagatattgcccatgattctcactttttctttgcctggcatctaagcaggaacccattgtggagtagactctcttcttctatggagcctctgacatggggagcaatgctaagcaagctaagtgtaaaagaaaagtgacagaataattttggaagaggaagcctcatcaaaagctcacacaaaatagagcttcccatggtgtgccctatcctaggtttaagaaaacacgtatgaagtttatgctgatgcaaagaacttgggtttttatgttaatataaagtgttgttttagcatgtggccagatgatgctctgtcatctttagaaagtgagataaccaaggaaataattgaaggagtatagggagatggattaagttgataatgacatttagggcaacttaagacctttgatcccaggttctaactcaaagaggctgaccttcccccagctaagatagcatgaggacgttgtattccaatatacgtatgattggggctacaaagctgaactaaagcaagattggtgaagtggcagggtttatagagagaagcccaggctgagttcagcttttgttggaagtgagaatccctgacatatagctttcttggagatcccaactctcattcttggtgcaactggcttccagctctccagcagtcactctcctaggtgcatgattcagtgcgtgccatgtgtcattagcttttactgataaccatattctggcttgttcccttaccccctacttctatccaattttctctgctaggggttatcattagcaattgacatgctaaaggttttggagcccacctaggggtaggtgcagctttattggcttttctgtggattctctcagtggacccacaccatctctatgtctctccactctcctgccttcagccatagcaaagaatccttccaaaatcaaactcttcacttttttgactcaagtgttgttgttcagtctctcgcgtgtcaatgtggtcatggttcatgaaaccggaccctcaagatggatgattgcttttaactactgccagctgatgtctctcagcccctgccctcatacaagatttttctcagccttcagcctaccactgcagaatccgatgtgacccaccattagggagtctgcatcttggaagagttggaaataaccctttaacatcaacatgcttcaaagactttttgcctttggcctagtaagatgcctctccagctactgagcccacaagtaacatgagcggataaaaagagacttgtttgtgctagaaatgagggtctatgctatgagggggtccaagactctggcgaaatgtgctttttcatcaatggagaaatgaaaggaaaacacaagcaagaaaaaagttaacttgtattatgtatttttactacacttttcttaaaaatagagcattgggaaaactctgaaagagactgacatttttctcaacaggaatccatacttaacagttctggctttcattaaattttgctctttggtacctgggccttttatttaacatctatatttgttttaactctcttggcagatgtgtgaaaggattcttgcttgatcaaacactaagtatttttttggttcttgtttttctttcaaatagccaggtttttttcttttggtatttgcataaaatgaaaatatcaccgaatattaaatcactgtggatccatt

SEQ ID NO: 4531 - protein, 48 aa, Homo sapiens; identical to SEQ ID NO: 4529

SEQ ID NO: 4532 - DNA, 534 bp, Homo sapiens
cgtgaataagaaacattcttcaaaactgtggttgacatccaagcttgctgtcatgttttgaactgccctatggagaaagcaacatggctaagaatatgagagagccaacaggacaatgaggacctcaatacagcaagaaaccaaatcctgccaacaaccatgcactcacatctctaccccaccagcagcgtcttagaggcagtgagaactctattttagaaggaaaacagaaaacagcccgggaaaagaaagaaaacagaagtcaagacgtcccatctgtgatacagaataacccatgacttaagaatatttcatgtaatgacttcaaactacagtaagacttcagtacttaagagcatagatgttggagtgagatggttgggtctaaatcttggctccaccattcattggctctgtgtctttgggaaccttccataacctctgtaagtctcagcctccttgtctgtaaactgaaagtaataatagtccttccatcattaggctgttgcaaagataaaatgaaatagtgtatgt

SEQ ID NO: 4533 - protein, 50 aa, Homo sapiens
MVGSKSWLHHSLALCLWEPSITSVSLSLLVCKLKVIIVLPSLGCCKDKMK

SEQ ID NO: 4534 - DNA, 898 bp, Homo sapiens
agacacctcacttaaaaattctagttatggaataattgtgatgccataggaagaaaattaagcaagctgtctactcttgggaaatgttaacaaatgcctgtgcatactgtgaagagtccacggggaagaaaatgagccacacaagatggtcccacctatatttattatacactgatcactatgaagacataaagatttgttaaaagtggcctttgaagagcatgtaattgtgtccagaattggcgggttcttggtctcactgacttcaagaatgaagccgcagaccctcacggctaagacatccaaggtcaaagggcctacatctggtgaaggtcttgctgctttatcccatggtggaaggcagatgggttcacagaaaatagaaattctttacacagtcttctgatcaatagaatcaaagccctttttctgtaaatactggctagagagttgctaacttccataatggagaaatggaaaaagcagtttctttctccaataaaaccacaaaagccatggttttaaaagaaactatagaggatttcttgtgtggagtccttagctttgtgactgctgagatttaagacataggaaatcatgacttcctcgtggcagcctcatgattctgagatcacagcacgtgcatttggtacagccagcagaggtggtggtgtcttctcgaattcctgaccttctttccatggcagaagaagcaacccttttgctaactgaggtctatggtggtgttcctggaatctccatctctaacctatttacctaatccttccaaaaatcttatattgaatcttttcatgtttaaattatttagaatggtttgtggtatctgtaaacactgaccaatgcttcccacaataaaatcagcagtatggaaagaaag

SEQ ID NO: 4535 - protein, 44 aa, Homo sapiens
MKPQTLTAKTSKVKGPTSGEGLAALSHGGRQMGSQKIEILYTVF

SEQ ID NO: 4536 - DNA, 629 bp, Homo sapiens
tggaggctgcagggaatatggatttaaatgaattttggctgtaccatcaagcagtctgatcactgaggaaatatcaaaagcttcacccgagtgactcatcacccaaattcaacagagacttgccaaagaagctgcttatttcacagaaggatggtgctggctgaaagatacttccttgaaactgagagattgcttccttagacaggtctccttgaagagcattcatgataagcaaccagcatctgctgccaaagactctgtccacatcaaagactcttctgtgaaagaccagcaaccacctgggccagaccaggatattcttttggcctacatcactctctacgaactggtctgttaacctgtttttgctatctcttttctcttgatgttaaatgtcacttagtttgttgtggaatgtttaatctataacatgtattgtttaagtatactatcatgtatggttggcaatattgactgacttgtggagtggcttgagccagtgtgcctacagctctaattaccagtgagtgggaattactaaagagaactgcttccttgggaactccatatagctcgtggcttttatgattgagatagtatcaataaaagtctgatattttgggaaagac

SEQ ID NO: 4537 - protein, 87 aa, Homo sapiens
LITQIQQRLAKEAAYFTEGWCWLKDTSLKLRDCFLRQVSLKSIHDKQPASAAKDSVHIKDSSVKDQQPPGPDQDILLAYITLYELVC

SEQ ID NO: 4538 - DNA, 2862 bp, Homo sapiens
cagaaaatagtacaaacccatctggctgcaacagtccagcagcatgaagatcaaagtcacgtagtagagccagagagaaatttgccctgggcctaatattcatgaagcctttccaattcagactcggtattattgccaagtcggtgtgtttgggagaaatcagaagccaacacactagaaaagttgcaagagattcctaggggaacccacaaattcagttccttgccagaaacctgctcctccagatgaatctagtgcatcagatgggctcagaagcacaggtggcgcaggcagacctctactgagaagaacaacagtggaaggcagatgaaactcacattttggagtctgagagccatgcgggcccaccccagttacgtctacccctggtcggtgaccagagaatcctttagcagcaacagcagtgatgtttatttcactggtatgtataaagcgactgattgaaaacaagctgtatgcccaacaacttggaactggttaaatgatttttggttcagccgcacagtggaatatcatgcggccattaagaataaataaaaaatcctatactttccatgttcaactttagactgcaaacaactgaaaaaacaccttcataattaggcttcctcagattagaacgtgaagtcaaatcaacgtgtgtcagaaagttaacaacagctaactgtttgttgtggtgttctgagtaacttgtattatttttcagtttttttcccattcctaatgtgcaaatgtactatttttattgtaaaaaaaaatacatgtttgtaaagagcaataacataaatctctgcataggcaaattgaaaggaaatcagacaaaatgataccttttggtagtggaattctaaatcatttttttcttcattagagtttctgaattttctgcatttgatatgtttacctttataaagggtcaatcatatttaagatgattttttaaaagacaagtggacagggaaagagaggtctgctgttgcaaaaccaaagctggaggctctccgaagcccacttatgttagtcaattgatatttcatgaaactctagaatgtgcaaatcactttccacggggattgggggggtgagaaatacagagatgaaggagatgcaaacactttaatcaaagaaatccgtctggttgggaagagaaggttctgcattatataagttgcaaggtcttatccaagaggttagtctgtcaagagtaatagcaataattacacaacaatatgtcagagaggctgggagctccagcttcaaagccaccttgcctggggagaaacttaaccatattgggcctgagcctcagttacctacctcttctgtaaatgtaaactacctcttggggtccttgtgaggattaaatgaaacttgagcctaaaggggctgagctaggtgctttgcaaataacccaaccttagcatgaggcacgttatcatcattacggctgtggtgtttgtggtcacctatctgcaagtcacgctttcatagatatggctgagctgggatttgaacccacattgatctaattccaaagccaatgattccaccccaaccagacactgcatttactctctatgcctaactgaaatttgttctaaacctcaccctaaggtcttgccagaaagaaaagctaaattttcattaaaagatgaaaggagaaatgaatctgtttcaaaggacatgagaggaagaaggaaatatcccttcatgaaggattttgcaactttgtccatgcttctgcagggtgtaaaagtaaaaatcctatacttcccatattcaacgttagattttaaacaactgaacaagcactttcacaattagccttcctcagattggaatgcgaagtcaagccaacgtgtacctcttactgcagaagatttctgcactgtgaatgtgataggatttgcctccttaaccagagggtgctggtttttcctggctggagggtagaaggtcatgaatagaggacaaagcacagggaaggggcagcatgtcgggaagagccccaaggatctcagtatgaaaataaagaggtgtgagccaactgcccataggtttgggctatgagtctggggaaactgtttcaaaatcaatggaggcccaaaggcagagggaaaattctgtgtatggacttccatgtcattcagaaatgttaactccttgaaaagagttaatatatttttttcttttttaaacatttcaataggtttttggggaacaggtggtgtttggttccgtgggtaagttctttagtggtgatttctgagattttggtgcacccatcacctgagcagtgtacattctacccattgtgtagtcttttatctttcactcccctcccacttagaataatgttctccaattccatccaggttgctgcgaaggacattatttcattcctttttatggctgagttgcattccatggtgtatatatatataccacaatgtctgtatccactcattgattgatgggtatgcaggctggttccatacttttccaattgcgaattgtgctgctataaacatccatgagcaagtatctttttggtataatgatatgttttcctctgagtggatacccagtagtgggattgctggatcaaatggtagttctacttttagctccttaagtaatctccacactgtttttcatagtggtggtactagtttacatttccaccggcaatgtaaaagtgtttcttcctgtccctctggtcatctgtttttttaagggatctacctaaactcaaccataacccattccatccacctcatcttgcctcaagctaagaaataggagtgcagagaagaaaacagtacagataagaatgctaga

SEQ ID NO: 4539 - protein, 32 aa, Homo sapiens
MKPFQFRLGIIAKSVCLGEIRSQHTRKVARDS

SEQ ID NO: 4540 - DNA, 4023 bp, Homo sapiens
cactcagagagaaacaatgcattttatcatagggccggacagctatatgcacaagatgctacctgcagagattggtttttgcccagatgtgcaggagagatgcacagagaggaagaaatgcatacatgtgtgcaggttttggcgtgtgcacaagaagcctggaaggattttctttggatctacagtcaaaatggatttccgagaggaagctgtctgaaaacacacctcttccctgtgctacatacggtcccatctctgccagccaggttgtcaggaaagtgatcagcactggcttcaactctggctagagctctttggccaatgtgatgggcagaaaactggaatgaggacagaaaagcacctcagaggtttgaagagtctagtctctcaccaccttgctgtaggttttctgaatacttctgagtttaggagcattttttctcaacaggcaagtcaggagctgctaagataaaccatggcagtaagctcgagccagtgttcgtatttgccattgatcggccaccaggagttttttgtggtaggagaaaatatgctgtctaaatttgccttgggaaaccatcatggtggtcacaaaaccacttctacggcttgccttgacctagcaggaatgaagatgtaaagaaagaatgagcgcgtcatggttatgatgggatgatgatgtctgttgtgttgtttggtgtcagtttctgtaacgcctttctatttcaatcaaggctattatcttttcctctgttttagtgaagtttccttgaagtagaaaatgggagtgtattgggcatctcagagttttcagctgaactgaagggtctgatggtaactttacccccaaatctctgagagaaaagcagggagtccctgcttcagctctgctcagaagagcctccctcacatggtggtttctgtgtcactagactggttaaccaaatggttcttctaaatacccaacttttaatagaaactcctgcggcttggattattaaagtcctaacatgcttatttaatcgtgtttcaagtccatctatcttttttgagtctaaggaagactcactaggtcagaaggagtagagggaagaggattaatacatgattttctttttcccctttttcttttaacttaggctgagacttatttgaatgcctgtttcatatggagcttttaagtgtaacagttgtgagtgaaattgccccttttcaagcgctccgagtttgcttctgcatggaaggggaagatggactagagctgatacctcctgcaccctggtgaagaaatgcaccctgaggccagaaaatagtacaaacccatctggctgcaacagtccagcagcatgaagatcaaagtcacgtagtagagccagagagaaatttgccctgggcctaatattcatgaagcctttccaattcagactcggtattattgccaagtcggtgtgtttgggagaaatcagaagccaacacactagaaaagttgcaagagattcctaggggaacccacaaattcagttccttgccagaaacctgctcctccagatgaatctagtgcatcagatgggctcagaagcacaggtggcgcaggcagacctctactgagaagaacaacagtggaaggcagatgaaactcacattttggagtctgagagccatgcgggcccaccccagttacgtctacccctggtcggtgaccagagaatcctttagcagcaacagcagtactttccatgttcaactttagactgcaaacaactgaaaaaacaccttcataattaggcttcctcagattagaacgtgaagtcaaatcaacgtgtgtcagaaagttaacaacagctaactgtttgttgtggtgttctgagtaacttgtattatttttcagtttttttcccattcctaatgtgcaaatgtactatttttattgtaaaaaaaaatacatgtttgtaaagagcaataacataaatctctgcataggcaaattgaaaggaaatcagacaaaatgataccttttggtagtggaattctaaatcatttttttcttcattagagtttctgaattttctgcatttgatatgtttacctttataaagggtcaatcatatttaagatgattttttaaaagacaagtggacagggaaagagaggtctgctgttgcaaaaccaaagctggaggctctccgaagcccacttatgttagtcaattgatatttcatgaaactctagaatgtgcaaatcactttccacggggattgggggggtgagaaatacagagatgaaggagatgcaaacactttaatcaaagaaatccgtctggttgggaagagaaggttctgcattatataagttgcaaggtcttatccaagaggttagtctgtcaagagtaatagcaataattacacaacaatatgtcagagaggctgggagctccagcttcaaagccaccttgcctggggagaaacttaaccatattgggcctgagcctcagttacctacctcttctgtaaatgtaaactacctcttggggtccttgtgaggattaaatgaaacttgagcctaaaggggctgagctaggtgctttgcaaataacccaaccttagcatgaggcacgttatcatcattacggctgtggtgtttgtggtcacctatctgcaagtcacgctttcatagatatggctgagctgggatttgaacccacattgatctaattccaaagccaatgattccaccccaaccagacactgcatttactctctatgcctaactgaaatttgttctaaacctcaccctaaggtcttgccagaaagaaaagctaaattttcattaaaagatgaaaggagaaatgaatctgtttcaaaggacatgagaggaagaaggaaatatcccttcatgaaggattttgcaactttgtccatgcttctgcagggtgtaaaagtaaaaatcctatacttcccatattcaacgttagattttaaacaactgaacaagcactttcacaattagccttcctcagattggaatgcgaagtcaagccaacgtgtacctcttactgcagaagatttctgcactgtgaatgtgataggatttgcctccttaaccagagggtgctggtttttcctggctggagggtagaaggtcatgaatagaggacaaagcacagggaaggggcagcatgtcgggaagagccccaaggatctcagtatgaaaataaagaggtgtgagccaactgcccataggtttgggctatgagtctggggaaactgtttcaaaatcaatggaggcccaaaggcagagggaaaattctgtgtatggacttccatgtcattcagaaatgttaactccttgaaaagagttaatatatttttttcttttttaaacatttcaataggtttttggggaacaggtggtgtttggttccgtgggtaagttctttagtggtgatttctgagattttggtgcacccatcacctgagcagtgtacattctacccattgtgtagtcttttatctttcactcccctcccacttagaataatgttctccaattccatccaggttgctgcgaaggacattatttcattcctttttatggctgagttgcattccatggtgtatatatatataccacaatgtctgtatccactcattgattgatgggtatgcaggctggttccatacttttccaattgcgaattgtgctgctataaacatccatgagcaagtatctttttggtataatgatatgttttcctctgagtggatacccagtagtgggattgctggatcaaatggtagttctacttttagctccttaagtaatctccacactgtttttcatagtggtggtactagtttacatttccaccggcaatgtaaaagtgtttcttcctgtccctctggtcatctgtttttttaagggatctacctaaactcaaccataacccattccatccacctcatcttgcctcaagctaagaaataggagtgcagagaagaaaacagtacagataagaatgctaga

SEQ ID NO: 4541 - protein, 54 aa, Homo sapiens
MAVSSSQCSYLPLIGHQEFFVVGENMLSKFALGNHHGGHKTTSTACLDLAGMKM

SEQ ID NO: 4542 - DNA, 581 bp, Homo sapiens
cagaaaatagtacaaacccatctggctgcaacagtccagcagcatgaagatcaaagtcacgtagtagagccagagagaaatttgccctgggcctaatattcatgaagcctttccaattcagactcggtattattgccaagtcggtgtgtttgggagaaatcagaagccaacacactagaaaagttgcaagagattcctaggggaacccacaaattcagttccttgccagaaacctgctcctccagatgaatctagtgcatcagatgggctcagaagcacaggtggcgcaggcagacctctactgagaagaacaacagtggaaggcagatgaaactcacattttggagtctgagagccatgcgggcccaccccagttacgtctacccctggtcggtgaccagagaatcctttagcagcaacagcagtgatgtttatttcactggtatgtataaagcgactgattgaaaacaagctgtatgcccaacaacttggaactggttaaatgatttttggttcagccgcacagtggaatatcatgcggccattaagaataaataaaaaatcctatactttccatgttc

SEQ ID NO: 4543 - protein, 32 aa, Homo sapiens; identical to SEQ ID NO: 4539

SEQ ID NO: 4544 - DNA, 927 bp, Homo sapiens
cttcccctcggaggaaaggctcagctcccagcgcgcccctcccgtctccgcagcaaaaaagtttgagtcgccgctgccgggttgccagcggagtcgcgcgtcgggagctacgtagggcagagaagtcatggcttctccgtccaaaggcaatgacttgttttcgcccgacgaggagggcccagcagtggtggccggaccaggcccggggcctgggggcgccgagggggccgcggaggagcgccgcgtcaaggtctccagcctgcccttcagcgtggaggcgctcatgtccgacaagaagccgcccaaggaggcgtccccgctgccggccgaaagcgcctcggccggggccaccctgcggccactgctgctgtcggggcacggcgctcgggaagcgcacagccccgggccgctggtgaagcccttcgagaccgcctcggtcaagtcggaaaattcagaagatggagcggcgtggatgcaggaacccggccgatattcgccgccgccaagacatatgagccctaccacctgcaccctgaggaaacacaagaccaatcggaagccgcgcacgccctttaccacatcccagctcctcgccctggagcgcaagttccgtcagaaacagtacctctccattgcagagcgtgcagagttctccagctctctgaacctcacagagacccaggtcaaaatctggttccagaaccgaagggtaaagccatgttttgacttggtgaaaatgggattgtcaaacagcccattaagttccctggtatttcaccttcctgtccatctgtcccctccctccggtatacctttatccctttgaaagggtgcttgtacaatttgatatattttattgaagagttatctcttattctgaattaaattaagcatttgttttattgcagtaaagtttgtccaaactca

SEQ ID NO: 4545 - protein, 232 aa, Homo sapiens
MASPSKGNDLFSPDEEGPAVVAGPGPGPGGAEGAAEERRVKVSSLPFSVEALMSDKKPPKEASPLPAESASAGATLRPLLLSGHGAREAHSPGPLVKPFETASVKSENSEDGAAWMQEPGRYSPPPRHMSPTTCTLRKHKTNRKPRTPFTTSQLLALERKFRQKQYLSIAERAEFSSSLNLTETQVKIWFQNRRVKPCFDLVKMGLSNSPLSSLVFHLPVHLSPPSGIPLSL

SEQ ID NO: 4546 - DNA, 1193 bp, Homo sapiens
tcccgtctccgcagcaaaaaagtttgagtcgccgctgccgggttgccagcggagtcgcgcgtcgggagctacgtagggcagagaagtcatggcttctccgtccaaaggcaatgacttgttttcgcccgacgaggagggcccagcagtggtggccggaccaggcccggggcctgggggcgccgagggggccgcggaggagcgccgcgtcaaggtctccagcctgcccttcagcgtggaggcgctcatgtccgacaagaagccgcccaaggaggcgtccccgctgccggccgaaagcgcctcggccggggccaccctgcggccactgctgctgtcggggcacggcgctcgggaagcgcacagccccgggccgctggtgaagcccttcgagaccgcctcggtcaagtcggaaaattcagaagatggagcggcgtggatgcaggaacccggccgatattcgccgccgccaagacatatgagccctaccacctgcaccctgaggaaacacaagaccaatcggaagccgcgcacgccctttaccacatcccagctcctcgccctggagcgcaagttccgtcagaaacagtacctctccattgcagagcgtgcagagttctccagctctctgaacctcacagagacccaggtcaaaatctggttccagaaccgaagggccaaggcgaaaagactgcaggaggcagaactggaaaagctgaaaatggctgcaaaacctatgctgccctccagcttcagtctccctttccccatcagctcgcccctgcaggcagcgtccatatatggagcatcctacccgttccatagacctgtgcttcccatcccgcctgtgggactctatgccacgccagtgggatatggcatgtaccacctgtcctaaggaagaccagatcaatagactccatgatggatgcttgtttcaaagggtttcctctccctctccacgaaggcagtaccagccagtactcctgctctgctaaccctgcgtgcaccaccctaagcggctaggctgacagggccacacgacatagctgaaatttgttctgtaggcggaggcaccaagccctgttttcttggtgtaatcttccagatgcccccttttcctttcacaaagattggctctgatggtttttatgtataaatatatatatataataaaatataatacatttttatacagc

SEQ ID NO: 4547 - protein, 267 aa, Homo sapiens; identical to SEQ ID NO: 556

SEQ ID NO: 4548 - DNA, 2092 bp, Homo sapiens
tcccgtctccgcagcaaaaaagtttgagtcgccgctgccgggttgccagcggagtcgcgcgtcgggagctacgtagggcagagaagtcatggcttctccgtccaaaggcaatgacttgttttcgcccgacgaggagggcccagcagtggtggccggaccaggcccggggcctgggggcgccgagggggccgcggaggagcgccgcgtcaaggtctccagcctgcccttcagcgtggaggcgctcatgtccgacaagaagccgcccaaggaggcgtccccgctgccggccgaaagcgcctcggccggggccaccctgcggccactgctgctgtcggggcacggcgctcgggaagcgcacagccccgggccgctggtgaagcccttcgagaccgcctcggtcaagtcggaaaattcagaagatggagcggcgtggatgcaggaacccggccgatattcgccgccgccaagacatatgagccctaccacctgcaccctgaggaaacacaagaccaatcggaagccgcgcacgccctttaccacatcccagctcctcgccctggagcgcaagttccgtcagaaacagtacctctccattgcagagcgtgcagagttctccagctctctgaacctcacagagacccaggtcaaaatctggttccagaaccgaagggccaaggcgaaaagactgcaggaggcagaactggaaaagctgaaaatggctgcaaaacctatgctgccctccagcttcagtctccctttccccatcagctcgcccctgcaggcagcgtccatatatggagcatcctacccgttccatagacctgtgcttcccatcccgcctgtgggactctatgccacgccagtgggatatggcatgtaccacctgtcctaaggaagaccagatcaatagactccatgatggatgcttgtttcaaagggtttcctctccctctccacgaaggcagtaccagccagtactcctgctctgctaaccctgcgtgcaccaccctaagcggctaggctgacagggccacacgacatagctgaaatttgttctgtaggcggaggcaccaagccctgttttcttggtgtaatcttccagatgcccccttttcctttcacaaagattggctctgatggtttttatgtataaatatatatatataataaaatataatacatttttatacagcagacgtaaaaattcaaattattttaaaaggcaaaatttatatacatatgtgctttttttctatatctcaccttcccaaaagacactgtgtaagtccatttgttgtattttcttaaagagggagacaaattatttgcaaaatgtgctaaagtcaatgatttttacgggattattgacttctgcttatggaaaacaaagaaacagacacaatgcacacagaaaatattagatatggagagattattcaaagtgaaggggacacatcatatttctgcattttacttgcattaaaagaaacctctttatatactacagttgttcctatctctcccccgccccccaccgccccaccacacacatatttttaaagtttttccttttttaagaatatttttgtaagaccaatacctgggatgagaagaatcctgagactgcctggaggtgaggtagaaaattagaaatacttcctaattcttctcaaggctgttggtaactttatttcagataattggagagtaaaatgttaaaacctgttgagaggaattgatggtttctgagaaatactaggtacattcatcctcacagattgcaaaggtgatttgggtgggggtttagtaattttctgcttaaaaaatgagtatcttgtaaccattacctatatgctaaatattcttgaacaattagtagatccagaaagaaaaaaaaatatgctttctctgtgtgtgtacctgttgtattgtcaaacagcccattaagttccctggtatttcaccttcctgtccatctgtcccctccctccggtatacctttatccctttgaaagggtgcttgtacaatttgatatattttattgaagagttatctcttattctgaattaaattaagcatttgttttattgc

SEQ ID NO: 4549 - protein, 267 aa, Homo sapiens; identical to SEQ ID NO: 556

SEQ ID NO: 4550 - DNA, 2207 bp, Homo sapiens
tcccgtctccgcagcaaaaaagtttgagtcgccgctgccgggttgccagcggagtcgcgcgtcgggagctacgtagggcagagaagtcatggcttctccgtccaaaggcaatgacttgttttcgcccgacgaggagggcccagcagtggtggccggaccaggcccggggcctgggggcgccgagggggccgcggaggagcgccgcgtcaaggtctccagcctgcccttcagcgtggaggcgctcatgtccgacaagaagccgcccaaggaggcgtccccgctgccggccgaaagcgcctcggccggggccaccctgcggccactgctgctgtcggggcacggcgctcgggaagcgcacagccccgggccgctggtgaagcccttcgagaccgcctcggtcaagtcggaaaattcagaagatggagcggcgtggatgcaggaacccggccgatattcgccgccgccaagacatatgagccctaccacctgcaccctgaggaaacacaagaccaatcggaagccgcgcacgccctttaccacatcccagctcctcgccctggagcgcaagttccgtcagaaacagtacctctccattgcagagcgtgcagagttctccagctctctgaacctcacagagacccaggtcaaaatctggttccagaaccgaagggccaaggcgaaaagactgcaggaggcagaactggaaaagctgaaaatggctgcaaaacctatgctgccctccagcttcagtctccctttccccatcagctcgcccctgcaggcagcgtccatatatggagcatcctacccgttccatagacctgtgcttcccatcccgcctgtgggactctatgccacgccagtgggatatggcatgtaccacctgtcctaaggaagaccagatcaatagactccatgatggatgcttgtttcaaagggtttcctctccctctccacgaaggcagtaccagccagtactcctgctctgctaaccctgcgtgcaccaccctaagcggctaggctgacagggccacacgacatagctgaaatttgttctgtaggcggaggcaccaagccctgttttcttggtgtaatcttccagatgcccccttttcctttcacaaagattggctctgatggtttttatgtataaatatatatatataataaaatataatacatttttatacagcagacgtaaaaattcaaattattttaaaaggcaaaatttatatacatatgtgctttttttctatatctcaccttcccaaaagacactgtgtaagtccatttgttgtattttcttaaagagggagacaaattatttgcaaaatgtgctaaagtcaatgatttttacgggattattgacttctgcttatggaaaacaaagaaacagacacaatgcacacagaaaatattagatatggagagattattcaaagtgaaggggacacatcatatttctgcattttacttgcattaaaagaaacctctttatatactacagttgttcctatctctcccccgccccccaccgccccaccacacacatatttttaaagtttttccttttttaagaatatttttgtaagaccaatacctgggatgagaagaatcctgagactgcctggaggtgaggtagaaaattagaaatacttcctaattcttctcaaggctgttggtaactttatttcagataattggagagtaaaatgttaaaacctgttgagaggaattgatggtttctgagaaatactaggtacattcatcctcacagattgcaaaggtgatttgggtgggggtttagtaattttctgcttaaaaaatgagtatcttgtaaccattacctatatgctaaatattcttgaacaattagtagatccagaaagaaaaaaaaatatgctttctctgtgtgtgtacctgttgtatgtcctaaacttattagaaaattttatatacttttttacatgttggggggcagaaggtaaagccatgttttgacttggtgaaaatgggattgtcaaacagcccattaagttccctggtatttcaccttcctgtccatctgtcccctccctccggtatacctttatccctttgaaagggtgcttgtacaatttgatatattttattgaagagttatctcttattctgaattaaattaagcatttgttttattgcagtaaagtttgtccaaactcacaatt

SEQ ID NO: 4551 - protein, 267 aa, Homo sapiens; identical to SEQ ID NO: 556

SEQ ID NO: 4552 - DNA, 2006 bp, Homo sapiens
gtcgccgctgccgggttgccagcggagtcgcgcgtcgggagctacgtagggcagagaagtcatggcttctccgtccaaaggcaatgacttgttttcgcccgacgaggagggcccagcagtggtggccggaccaggcccggggcctgggggcgccgagggggccgcggaggagcgccgcgtcaaggtctccagcctgcccttcagcgtggaggcgctcatgtccgacaagaagccgcccaaggaggcgtccccgctgccggccgaaagcgcctcggccggggccaccctgcggccactgctgctgtcggggcacggcgctcgggaagcgcacagccccgggccgctggtgaagcccttcgagaccgcctcgttccgtcagaaacagtacctctccattgcagagcgtgcagagttctccagctctctgaacctcacagagacccaggtcaaaatctggttccagaaccgaagggccaaggcgaaaagactgcaggaggcagaactggaaaagctgaaaatggctgcaaaacctatgctgccctccagcttcagtctccctttccccatcagctcgcccctgcaggcagcgtccatatatggagcatcctacccgttccatagacctgtgcttcccatcccgcctgtgggactctatgccacgccagtgggatatggcatgtaccacctgtcctaaggaagaccagatcaatagactccatgatggatgcttgtttcaaagggtttcctctccctctccacgaaggcagtaccagccagtactcctgctctgctaaccctgcgtgcaccaccctaagcggctaggctgacagggccacacgacatagctgaaatttgttctgtaggcggaggcaccaagccctgttttcttggtgtaatcttccagatgcccccttttcctttcacaaagattggctctgatggtttttatgtataaatatatatatataataaaatataatacatttttatacagcagacgtaaaaattcaaattattttaaaaggcaaaatttatatacatatgtgctttttttctatatctcaccttcccaaaagacactgtgtaagtccatttgttgtattttcttaaagagggagacaaattatttgcaaaatgtgctaaagtcaatgatttttacgggattattgacttctgcttatggaaaacaaagaaacagacacaatgcacacagaaaatattagatatggagagattattcaaagtgaaggggacacatcatatttctgcattttacttgcattaaaagaaacctctttatatactacagttgttcctatctctcccccgccccccaccgccccaccacacacatatttttaaagtttttccttttttaagaatatttttgtaagaccaatacctgggatgagaagaatcctgagactgcctggaggtgaggtagaaaattagaaatacttcctaattcttctcaaggctgttggtaactttatttcagataattggagagtaaaatgttaaaacctgttgagaggaattgatggtttctgagaaatactaggtacattcatcctcacagattgcaaaggtgatttgggtgggggtttagtaattttctgcttaaaaaatgagtatcttgtaaccattacctatatgctaaatattcttgaacaattagtagatccagaaagaaaaaaaaatatgctttctctgtgtgtgtacctgttgtatgtcctaaacttattagaaaattttatatacttttttacatgttggggggcagaaggtaaagccatgttttgacttggtgaaaatgggattgtcaaacagcccattaagttccctggtatttcaccttcctgtccatctgtcccctccctccggtatacctttatccctttgaaagggtgcttgtacaatttgatatattttattgaagagttatctcttattctgaattaaattaagcatttgttttattgcagtaaagtttgtccaaactcaca

SEQ ID NO: 4553 - protein, 210 aa, Homo sapiens
MASPSKGNDLFSPDEEGPAVVAGPGPGPGGAEGAAEERRVKVSSLPFSVEALMSDKKPPKEASPLPAESASAGATLRPLLLSGHGAREAHSPGPLVKPFETASFRQKQYLSIAERAEFSSSLNLTETQVKIWFQNRRAKAKRLQEAELEKLKMAAKPMLPSSFSLPFPISSPLQAASIYGASYPFHRPVLPIPPVGLYATPVGYGMYHLS

SEQ ID NO: 4554 - DNA, 353 bp, Homo sapiens
cactacagcgtttgcagctttccagctcatcatgctgaactgaagacaagacgaggggaaaatcaaggggcatccacattaatctggataaaggctgcttcttcagccacagctaaggtgcatgtaataggaatgagagccacctgtgtttcagaaagcgtctgggattttagagctgcttgtaactgcagcctaacacagcctcagccgactgatacatccagtgtcgtcaaaacagagcagtgaaccaagcagccggctcattgtttgagaaacagttgtttcatgggtgaattgacctcatcttcggcagccaccggtttgctaagcatttactttgaacatttctatgg

SEQ ID NO: 4555 - protein, 37 aa, Homo sapiens
MRATCVSESVWDFRAACNCSLTQPQPTDTSSVVKTEQ

SEQ ID NO: 4556 - DNA, 4764 bp, Homo sapiens
cagtgttcacgatttttgatcgacacgtccatccttccactttgtctcttaaattgcagatacaaacccagagagaagctgaaggtgaactttggaaccccagaatttctcgcccctgaagttgtgaactatgattttgtttcatttcccactgacatgtggagtgtgggggtcatcgcctatatgctacttagcggtttgtcgcctttcctgggtgacaatgatgctgagacgctgaacaacatcctggcctgcaggtgggacttagaggatgaagaatttcaggacatctcggaggaggccaaggagttcatctctaagcttctgattaaggagaagagttggcgaataagtgcaagcgaagctctcaagcacccctggttgtcagaccacaagctccactccagactcaatgcccagaagaagaagaatcgtggctctgatgcccaggactttgtgaccaaatagtctacaggaggcagccatttggaaggaaaactgctgtggttgctgctgcttcgagaaaattttttgaaaaatcagcagttctgatgccttgacccctgtgatgacctggtagtcttagcagggggagccctcgaccctgaatgtgaacttgaactggagtgcctctgctgcgctcagaggaacacccagcgctgcggtctggtctcagggcgcaaacacatccctgcacccggtggtggtgatgttgggaagatgtttccctgccatcttgagattttttacttttttaaaaaaattttttgatcttagtcactggggcagggggtgcattatgtctgccatttctcaaatgactacagctgtgacacttaagattgattggagattttaaaactggaggatgcatttagagggagaaagctacttccagccattagactatgcctttggaaggggcaattagatggccagaaagaattctgactcccatgcacccttggagacttagtttcacagactctgtcattttgatttggtctgtggtcacgtgactacaatggataaataatttgtttgctggaacagaagccgtctttgaattctccaacaagaggcatcagccactgtgtctttcatttattctgaattgtccccagcgtgcgttttcttccatgtagctgattctgtttttcacatctatactccctgcacccttctgactgacagttcatccccacaaaacacattggttttgagaggtgatgcaaaaagtatctgtttatggttggactttgaaattctgacctttgaaataatgtcaacagtcacaacaggtttcctcaagccccatttgtcaactaaaagagacggatctgcacctcctggagcaagatagcactgagctttcaacattgaagtgacttgggaaataacattcaagcttctgggtaaacacatacaaacagtggcaaagaccaagtacagtctctcgcctgtgctgtctcatgggactcaatggtggtgaagaaatctcaatcggacaccagaggtgggggcaactctgcaagctcacctgctggacgtgagaatgttggaacgttccagttggaaggttcctatgcctagcctgtgtgccatttcatggcagatatgtaagaaaggaaatggccctactgtagacagcttatggggcccagaaaggcactgggctttaaagagcgaaatgagtgtgtcatttccacatgaaggagaggcaaggaaaagccccacaaaattcctgttacccgctgaactccaagctcaccaaccagattcatgagctttctcacattttccatttccaaataactgttgtgttgaatcagctgtgttaatgcctttattctttgttttttttttttagacggagtctcgctctgtcacgaggctggagtgcagtggccccatctcggctcactgcaacctccgcctcccaggttcaagcgattctcctgcagcctcccgagtagctgggattacaggcgcacgccaccacgcacggctgatttttgcatttttagtagagatggggtttctccatgttggccagaatggtctcaattactgttgtcgcaatagcaatgaaaggcataagaattacttggtggcctcatgagggatggcagtttcactttgcatcagctttcccccattatctctcagatccacttaaggaatccttacagcatgccgtgaatgtgtgcaacatccttattctcatctttaaggtaaggaggaagtagagatagaaggaaatacgtgatttggtgaaggccacatgcgaattttgtggtcgtgttagttataaaactgactcctttccagcctttgctcttacattatgatgcgtttctttttctcctttggccttgcatttatccgaggttggtttcttatgttcctgtgatgtgactatgcttaagtgtttaatttagtttgcttaaaacacacacaccacacacacacacacacacaaaaccctgtgactggagtgttatattactatgctatctttagctgatgatattcattgagcctggaaaaatacaagccagtgcatgcattaatacttagttagaccgcagagagctggcattcactcaaatgctaaacaggacacaggggtctgatttgaagcccctcgtggcagggcgttttctgtcctgtggtgtgcattctctaccaaatcaagcaggagatcttttgcacgacgtgcaatttgcatccaccttcccttctgactcaggttggcagataaactgtccccagaccctgccacacatggaagagacagctcaggccaaatacaggcatgatttctttgccaagttaatgcactgatgaccctgcagtgagtgggtgtgatttttgttttgttttgaggtttagaaaggagactgtactttgaaaatggatcttgtttgattctgtagttaaatttccacatttggaatgggaaggcatctccatgccagcagggtgccttttatatgagtgctgagggtagtttgcattgcagagttcatgattacagtctagagttacttgaaatgggagattatcagtctagtgttcatcccgcccctgctccatgtccttgtgtggctgctccagcgagagctggtaactaggtagactgctgctctaatggggaaagggggctttgcaaagccgaggaatcaagccagatgcgagcatggactcagaaaagctgagtctggctagaccagggctatggagatcaatttttccaacaggtcattaggatttgggaggctgtatttctcctccaccctcttaatggatggtatggctttgctcactcactaggcagttcccactttctttagcaaatggaggaaattaagcaccgatgtagcacttcccactgcctggagagaaataaacctcgcaagttattaaggagaaggcatgcctcattggtaatttggaagacaccaacacttacccagaatctgttgctatttaaaaatcagggagaggagggcacatgtccccatttgctacattacaaactttggacgagactctcatctgaactaacttggggaaacaatttctaggttgaagctggtaacactcatgtctgttgagtgccataagtttgttttcagttatttcctctaacttgatattaatttgctttctttcctcaaaaatgtaagtaggcatgttgccattgttgtggcttgctttgatgtatgtttggaaagatgtgtgaatacttaatttttatccattttatggaaattagcttagcaatttttttttctcttttaagaatcaaaatatggatttgatactaggaacagaatctgctctttatttcattccttttttgtctcttctgcttcctctgcccctcccccagccacgcagcacgggtgccagtgtgcatgcgtgtgctgggggccaaatgacagaaccccggttgaaagtccgcttgtaaaagcacaagtgagaggcagcatcaggcccctggagggctgtggtcctcggactcggttctttcctgtcccctggccgtcctgtcatccctgtgtgctgcagcatcaccacggcctacttcccaatatccacaaagcttcgcctttgcttttgcactctcttttacatttttttacttctttcctttttcttaagttcggatccaagtttgtcttcttatccatcaccatgctccctgaaagcctttttgagattaagaaattttcttaccaggaggcaactttccgtctgtcctaaagggaagtgggtgctggatttattagatattgggttcctggattaagatgacttcctcacatagcttggagtctgcagtttctcagttagaagtgttctatatttctttttgctccattttagtgcgctgtgctttgtataagtggtctttctatgggcagtttcaccttccatgaaggcttataactcaaccactactacccattcagaagagcagaaagcatctgctgtgtgagcgttcatatgttacctaatgtgtattttgctgtcgtctcagctgatagatgtcagtgagtctttctgactaggtttattggtgttgataagaaattaaaaaaaggattcataacgtggtgattgtgtctatcatgtatattttaaatttctgaacgtactttcatttagctgtttttctttgctttctaaagatgtataacaatcatgtatatgtattatattgaagaataaacatggaccttatttatcttttga

SEQ ID NO: 4557 - protein, 103 aa, Homo sapiens
MWSVGVIAYMLLSGLSPFLGDNDAETLNNILACRWDLEDEEFQDISEEAKEFISKLLIKEKSWRISASEALKHPWLSDHKLHSRLNAQKKKNRGSDAQDFVTK

SEQ ID NO: 4558 - DNA, 5760 bp, Homo sapiens; identical to SEQ ID NO: 557

SEQ ID NO: 4559 - protein, 388 aa, Homo sapiens; identical to SEQ ID NO: 558

SEQ ID NO: 4560 - DNA, 1043 bp, Homo sapiens
actcgcggggattgttttccacaccgtggaagctttgttcttttcgttttttgcaataaatcttgttgctgctcgctttttgggtccacattgcttttatgagctgtaccactcaccgtgaagatctgcagcttcacttcagagcctagcgagaccacaagctcactgagaggaacaaacaactccagacgcgctgtcttaagagctataacactcaccgcgaaggtgtgcagtttcactcctgagctagtgagactacgaagccactggaacgaagaaactccaaccacgtttgaacatcagaaggggcagactccagacgcttcatcttaagagctgtaacactcactgtgaaggtctgcagcttcactcctgagccagcgagaccacgaaccgatctgaacatcagaagggacagactccagatgccccaccttaagagctgtaatactcactgcaagggtctgcagcttcattcttgaagtcagaccaagaacccagcaattcccaacacacagggaccagcttctttcctaactcacttaggctcttcgtgctgctctggcaactaacacccttggctgcaggggcttggacactacccttagtcactgacaattgtgtgaaggctgctgtcgttaacttcacttgatcaccttaggctcctgtgaagtggtgagcaattcaaacaaattcctgtcgtcaaatcatatggagaaattgcactgcagagaaatctttaaaagcaattacctaatactgcagattgctgaactgtacccacacccaagactgagcattggatcaatccagaatatacatcaggtgttctgcaatgtctgcctaaaaccatgactctgcctcctccagctgttgctacatctcactatgggtttcctgtgacattttgagcaagtatgcctctgtgactggggttcttacactccagaatggatgagaagcaccgtaagtggcttttaaaatgaatattccctggcccttcagtcgctctataggtcaagaatctgaattctcaacctgtc

SEQ ID NO: 4561 - protein, 47 aa, Homo sapiens
MEKLHCREIFKSNYLILQIAELYPHPRLSIGSIQNIHQVFCNVCLKP

SEQ ID NO: 4562 - DNA, 1010 bp, Homo sapiens
actcgcggggattgttttccacaccgtggaagctttgttcttttcgttttttgcaataaatcttgttgctgctcgctttttgggtccacattgcttttatgagctgtaccactcaccgtgaagatctgcagcttcacttcagagcctagcgagaccacaagctcactgagaggaacaaacaactccagacgcgctgtcttaagagctataacactcaccgcgaaggtgtgcagtttcactcctgagctagtgagactacgaagccactggaacgaagaaactccaaccacgtttgaacatcagaaggggcagactccagacgcttcatcttaagagctgtaacactcactgtgaaggtctgcagcttcactcctgagccagcgagaccacgaaccgatctgaacatcagaagggacagactccagatgccccaccttaagagctgtaatactcactgcaagggtctgcagcttcattcttgaagtcagaccaagaacccagcaattcccaacacacagggaccagcttctttcctaactcacttaggctcttcgtgctgctctggcaactaacacccttggctgcaggggcttggacactacccttagtcactgacaattgtgtgaaggctgctgtcgttaacttcacttgatcaccttaggctcctgtgaagtggtgagcaattcaaacaaattcctgtcgtcaaatcatgatatacatctttccacaccaatagaccttgttttccgatgtagcattatttttcatagttggcgaatatacagttatggattcataacagcaagatggagaaattgcactgcagagaaatctttaaaagcaattacctaatactgcagattgctgaactgtacccacacccaagactgagcattggatcaatccagaatatacatcaggtgttctgcaatgtctgcctaaaaccatgactctgcctcctccagctgttgctacatctcactatgggtttcctgtgacattttgagcaa

SEQ ID NO: 4563 - protein, 47 aa, Homo sapiens; identical to SEQ ID NO: 4561

SEQ ID NO: 4564 - DNA, 1034 bp, Homo sapiens
actcgcggggattgttttccacaccgtggaagctttgttcttttcgttttttgcaataaatcttgttgctgctcgctttttgggtccacattgcttttatgagctgtaccactcaccgtgaagatctgcagcttcacttcagagcctagcgagaccacaagctcactgagaggaacaaacaactccagacgcgctgtcttaagagctataacactcaccgcgaaggtgtgcagtttcactcctgagctagtgagactacgaagccactggaacgaagaaactccaaccacgtttgaacatcagaaggggcagactccagacgcttcatcttaagagctgtaacactcactgtgaaggtctgcagcttcactcctgagccagcgagaccacgaaccgatctgaacatcagaagggacagactccagatgccccaccttaagagctgtaatactcactgcaagggtctgcagcttcattcttgaagtcagaccaagaacccagcaattcccaacacacagggaccagcttctttcctaactcacttaggctcttcgtgctgctctggcaactaacacccttggctgcaggggcttggacactacccttagtcactgacaattgtgtgaaggctgctgtcgttaacttcacttgatcaccttaggctcctgtgaagtggtgagcaattcaaacaaattcctgtcgtcaaatcatgagtccacctgtcccgagttggaagtctgaactcatgttcctggattcctcccatgcatcttggtgctggtgtggggcctgaactcagccaatccgcaacacctccaggagtcttcctcttagatgctgaggccacggagaaggaagcagcacaaagaatgaaccctggagagggtgccagaggcaggcgggttccagccatgtggcggcacagccttactgggatagtctagctgtgtcactcaggtacggttgctctctgagaagccgccaaacccaaccctttcacacacacctaggatgatttgaagagctacctaata

SEQ ID NO: 4565 - protein, 59 aa, Homo sapiens [sequence omitted]

SEQ ID NO: 4566 - DNA, 1227 bp, Homo sapiens
actcgcggggattgttttccacaccgtggaagctttgttcttttcgttttttgcaataaatcttgttgctgctcgctttttgggtccacattgcttttatgagctgtaccactcaccgtgaagatctgcagcttcacttcagagcctagcgagaccacaagctcactgagaggaacaaacaactccagacgcgctgtcttaagagctataacactcaccgcgaaggtgtgcagtttcactcctgagctagtgagactacgaagccactggaacgaagaaactccaaccacgtttgaacatcagaaggggcagactccagacgcttcatcttaagagctgtaacactcactgtgaaggtctgcagcttcactcctgagccagcgagaccacgaaccgatctgaacatcagaagggacagactccagatgccccaccttaagagctgtaatactcactgcaagggtctgcagcttcattcttgaagtcagaccaagaacccagcaattcccaacacacagggaccagcttctttcctaactcacttaggctcttcgtgctgctctggcaactaacacccttggctgcaggggcttggacactacccttagtcactgacaattgtgtgaaggctgctgtcgttaacttcacttgatcaccttaggctcctgtgaagtggtgagcaattcaaacaaattcctgtcgtcaaatcatcattaagaagaaaagaaagagcacttggaggtctgcttggagatccctgaggtttttcacaggcacaatgtccttatttgggagcctcaaaataccagactaacattgctcaaagcagctttgggaagagggcaggtgtctgagatgctgagaggccaactgagcagttttttagctggagccatgggccacaccaggaacaaaccactggaccaaattgactcaggacacctgctctggacccagtttcttctcatgtctcctcacccctaactctgcccaccacctcccacttcctctctgttccccatcccatcccaggtttgtatttaaatttctgcataatgcatgttctctgcatgttctgaagtactttccatcaagtccttcattttaaaagtgtttcttttaaatgaagctgtgcataacctctttttgaggctctctttggcttttcttgcacaattttaaattgaccaggtctacttgcaaaaatagacactttttctgctcttt

SEQ ID NO: 4567 - protein, 42 aa, Homo sapiens
MLRGQLSSFLAGAMGHTRNKPLDQIDSGHLLWTQFLLMSPHP

SEQ ID NO: 4568 - DNA, 1836 bp, Homo sapiens
gacaactcgcggggattgttttccacaccgtggaagctttgttcttttcgttttttgcaataaatcttgttgctgctcgctttttgggtccacattgcttttatgagctgtaccactcaccgtgaagatctgcagcttcacttcagagcctagcgagaccacaagctcactgagaggaacaaacaactccagacgcgctgtcttaagagctataacactcaccgcgaaggtgtgcagtttcactcctgagctagtgagactacgaagccactggaacgaagaaactccaaccacgtttgaacatcagaaggggcagactccagacgcttcatcttaagagctgtaacactcactgtgaaggtctgcagcttcactcctgagccagcgagaccacgaaccgatctgaacatcagaagggacagactccagatgccccaccttaagagctgtaatactcactgcaagggtctgcagcttcattcttgaagtcagaccaagaacccagcaattcccaacacacagggaccagcttctttcctaactcacttaggctcttcgtgctgctctggcaactaacacccttggctgcaggggcttggacactacccttagtcactgacaattgtgtgaaggctgctgtcgttaacttcacttgatcaccttaggctcctgtgaagtggtgagcaattcaaacaaattcctgtcgtcaaatcatgctggagtgcaatggcgtgattatggctcactgcagccttgacctcctggacccaggtgatcctcccactttagcctttcaagtagctgggactacaggtgtgtgccacaatacccggctaattttttaaaaattttaataaagacagggtcttgctatgttgttcatgctggtctagaaccctgggcctcaagaagtcctcctgcctcagcctcccaaaatgctggggccaagaagaaagaacagatctggaggtggagattttggaggatcataacaaaagaggaaatatgtaaagccatgagactggacttgatcactacgagagcaggcctgaggaaccaaggagagcccttgacagcgggcaggaagaggaggagaaagaagtgacttttattgagcacctactgcattccaagcactgcacaaggcactgtgtgtacagagacacataagatgctgtctcagtcctgaatagacatcagctagcatgaagaaatcccacaaaaacacagtatcaagaaggaagaggagaaggtggagccagatagagaaggaggaaaaataaacaaacggaattacagcaaaacaagggtagtgagaagcattaagaagaaaagaaagagcacttggaggtctgcttggagatccctgaggtttttcacaggcacaatgtccttatttgggagcctcaaaataccagactaacattgctcaaagcagctttgggaagagggcaggtgtctgagatgctgagaggccaactgagcagttttttagctggagccatgggccacaccaggaacaaaccactggaccaaattgactcaggacacctgctctggacccagtttcttctcatgtctcctcacccctaactctgcccaccacctcccacttcctctctgttccccatcccatcccaggtttgtatttaaatttctgcataatgcatgttctctgcatgttctgaagtactttccatcaagtccttcattttaaaagtgtttcttttaaatgaagctgtgcataacctctttttgaggctctctttggcttttcttgcacaattttaaattgaccaggtctacttgcaaaaatagacactttttctgctcttt

SEQ ID NO: 4569 - protein, 43 aa, Homo sapiens [sequence omitted]

SEQ ID NO: 4570 - DNA, 1650 bp, Homo sapiens
atgcctgctgggataccaggcacgtttgcatcagcctcggtcacacaagtgtgggggagacgccagtgtccttgggcacctacttccccatccctgcaaagccgacggatagaacctgtgatgggaagacttctgctctgcgcttctcatggggagatagaaaagcacccgagccttcatgcctcgagctatggactggttgccataaaggaagcccacgacatagagaccaggcttaatgaggtggagaagctgctgaagacgatcataagcatgccctgtaaatattctagatcggaagttgtgctcaccttcttcgaaagatctcctctggatcaggtgttaaaaaatgataatgtgcataaaattcaacccagctttcaaagtccagtcaaaatatcagaaatcatgaggtccaatggattttgtttagcaaataccgaaacaatagttattgaccacagtataccaaatggaagagaccagcagctgggcgtggacccaacagagcatttatttgagaatggcagtgagtttccctcagagctggaggacggggacgacccagcagcctacgtcaccaacctgtcatattaccacctggtccccttcgagacagacatttgggactgaacctctctatcaggcctcccccgcctcagctgttcactgccagctctgatgctgtccactgtgctggcccccatggtcacagctgctgccccagctctggaactcccagacgtcccaggccccactgacgccaggaggcctgggtgtcctgcaagtggagcagcaggggctcctagtgggccaggctgaccgcagagtctccagcaagctgaggtcacagccggaggccacagggcctgtgttctgagggtcttcactccctgcttggtgcccacagggctgcgcactgccagggcagggacagttcctgtggggctcgctctcactgctactgcttcctgggaggtgcatccctcttggtgaagtggcctagtgccccccagccaccctgactccccaccattccctcccacggcaaacgcacaaaacgtcttgagggagattttgacaagtcacccattccaggtgccacaggcaggggatgtttagtaatccaggatttctctgagaactgggatatgtggcctttttttttttctttttatcttttatctggaaactgggtttgggtcaaccccaggagtatttgcagaaggcccagcacagtggggggtattggctgcagggcagggaaggcattgccgactagataaccgtgtgagcttggactgagcgttggtggttcttcccaaaggaaaggaatttcttcccggcctgccaggtctctgggccttcagcgcgggtcctggtgctgcggccacaccaccctggggtgctcattgacagagctgccataatgaacttgaaaggacgggaatcacgagggaagctggggctcccctgcccacaggagaggatccccgttcttcaagcttctctgctcagtgtctactaacgaccgacatttgctaatgtaaataatagtaaattattgagaattctaattcttttacacagtctgtttttaatctattttaattaaataaaatctatgactctactttgatctgtccagga

SEQ ID NO: 4571 - protein, 210 aa, Homo sapiens [sequence omitted]

SEQ ID NO: 4572 - DNA, 2215 bp, Homo sapiens
gcctcccttcccggctggtccagtcaccgacctgcggctccggggccgcgagggaggaggcgcggggggcgcgaggcgggggcgagcgcttgggactcggcccggctcccggctccgggggttctcgtggccgcggcagcgcggtctctgcggaggcggcgggggcgcggccagccggacctcttcctttccagagcggcccgcggcgcccgttccgcgggaggcgggcgggaggcggacgcggcctaacctcgacgtcgactaccgcgccgcccgcgatgggaagcgccttataaagccgcgcccggccggcccgagccactcgccgccgcgccgccccgctgccccgaacgcgggccatacgcagcctccttggagtgacgggccgaccccggacgaccccggccacggacagacccgggacgaccccggccggggcgcgcctcctgcgggcgggcgggcggcggggctggggagcccttggcgggggcatgcgtgcgacatggcctcggcggtgtttgagggcacgtcgctcgtgaacatgttcgtgcgcggctgctgggtgaacggcatccgcaggctcatcgtcagccggcgcggcgacgaagaggagttcttcgagatccgcacggagtggtcggaccgcagcgtgctctacctgcaccgcagcctggcggacctgggccgcctgtggcagcgcctgcgcgacgcctttcccgaggaccggtccgaactggcgcaggggccgctgcggcaaggactggttgccataaaggaagcccacgacatagagaccaggcttaatgaggtggagaagctgctgaagacgatcataagcatgccctgtaaatattctagatcggaagttgtgctcaccttcttcgaaagatctcctctggatcaggtgttaaaaaatgataatgtgcataaaattcaacccagctttcaaagtccagtcaaaatatcagaaatcatgaggtccaatggattttgtttagcaaataccgaaacaatagttattgaccacagtataccaaatggaagagaccagcagctgggcgtggacccaacagagcatttatttgagaatggcagtgagtttccctcagagctggaggacggggacgacccagcagcctacgtcaccaacctgtcatattaccacctggtccccttcgagacagacatttgggactgaacctctctatcaggcctcccccgcctcagctgttcactgccagctctgatgctgtccactgtgctggcccccatggtcacagctgctgccccagctctggaactcccagacgtcccaggccccactgacgccaggaggcctgggtgtcctgcaagtggagcagcaggggctcctagtgggccaggctgaccgcagagtctccagcaagctgaggtcacagccggaggccacagggcctgtgttctgagggtcttcactccctgcttggtgcccacagggctgcgcactgccagggcagggacagttcctgtggggctcgctctcactgctactgcttcctgggaggtgcatccctcttggtgaagtggcctagtgccccccagccaccctgactccccaccattccctcccacggcaaacgcacaaaacgtcttgagggagattttgacaagtcacccattccaggtgccacaggcaggggatgtttagtaatccaggatttctctgagaactgggatatgtggcctttttttttttctttttatcttttatctggaaactgggtttgggtcaaccccaggagtatttgcagaaggcccagcacagtggggggtattggctgcagggcagggaaggcattgccgactagataaccgtgtgagcttggactgagcgttggtggttcttcccaaaggaaaggaatttcttcccggcctgccaggtctctgggccttcagcgcgggtcctggtgctgcggccacaccaccctggggtgctcattgacagagctgccataatgaacttgaaaggacgggaatcacgagggaagctggggctcccctgcccacaggagaggatccccgttcttcaagcttctctgctcagtgtctactaacgaccgacatttgctaatgtaaataatagtaaattattgagaattctaattcttttacacagtctgtttttaatctattttaattaaataaaatctatgactctactttgatctgtccagga

SEQ ID NO: 4573 - protein, 231 aa, Homo sapiens
MASAVFEGTSLVNMFVRGCWVNGIRRLIVSRRGDEEEFFEIRTEWSDRSVLYLHRSLADLGRLWQRLRDAFPEDRSELAQGPLRQGLVAIKEAHDIETRLNEVEKLLKTIISMPCKYSRSEVVLTFFERSPLDQVLKNDNVHKIQPSFQSPVKISEIMRSNGFCLANTETIVIDHSIPNGRDQQLGVDPTEHLFENGSEFPSELEDGDDPAAYVTNLSYYHLVPFETDIWD

SEQ ID NO: 4574 - DNA, 2160 bp, Homo sapiens
gcctcccttcccggctggtccagtcaccgacctgcggctccggggccgcgagggaggaggcgcggggggcgcgaggcgggggcgagcgcttgggactcggcccggctcccggctccgggggttctcgtggccgcggcagcgcggtctctgcggaggcggcgggggcgcggccagccggacctcttcctttccagagcggcccgcggcgcccgttccgcgggaggcgggcgggaggcggacgcggcctaacctcgacgtcgactaccgcgccgcccgcgatgggaagcgccttataaagccgcgcccggccggcccgagccactcgccgccgcgccgccccgctgccccgaacgcgggccatacgcagcctccttggagtgacgggccgaccccggacgaccccggccacggacagacccgggacgaccccggccggggcgcgcctcctgcgggcgggcgggcggcggggctggggagcccttggcgggggcatgcgtgcgacatggcctcggcggtgtttgagggcacgtcgctcgtgaacatgttcgtgcgcggctgctgggtgaacggcatccgcaggctcatcgtcagccggcgcggcgacgaagaggagttcttcgagatccgcacggagtggtcggaccgcagcgtgctctacctgcaccgcagcctggcggacctgggccgcctgtggcagcgcctgcgcgacgcctttcccgaggaccggtccgaactggcgcaggggccgctgcggcaaggactggttgccataaaggaagcccacgacatagagaccaggcttaatgaggtggagaagctgctgaagacgatcataagcatgccctgtaaatattctagatcggaagttgtgctcaccttcttcgaaagatctcctctggatcaggtgttaaaaaatgataatgtgcataaaattcaacccagctttcaaagtccagtcaaattattgaccacagtataccaaatggaagagaccagcagctgggcgtggacccaacagagcatttatttgagaatggcagtgagtttccctcagagctggaggacggggacgacccagcagcctacgtcaccaacctgtcatattaccacctggtccccttcgagacagacatttgggactgaacctctctatcaggcctcccccgcctcagctgttcactgccagctctgatgctgtccactgtgctggcccccatggtcacagctgctgccccagctctggaactcccagacgtcccaggccccactgacgccaggaggcctgggtgtcctgcaagtggagcagcaggggctcctagtgggccaggctgaccgcagagtctccagcaagctgaggtcacagccggaggccacagggcctgtgttctgagggtcttcactccctgcttggtgcccacagggctgcgcactgccagggcagggacagttcctgtggggctcgctctcactgctactgcttcctgggaggtgcatccctcttggtgaagtggcctagtgccccccagccaccctgactccccaccattccctcccacggcaaacgcacaaaacgtcttgagggagattttgacaagtcacccattccaggtgccacaggcaggggatgtttagtaatccaggatttctctgagaactgggatatgtggcctttttttttttctttttatcttttatctggaaactgggtttgggtcaaccccaggagtatttgcagaaggcccagcacagtggggggtattggctgcagggcagggaaggcattgccgactagataaccgtgtgagcttggactgagcgttggtggttcttcccaaaggaaaggaatttcttcccggcctgccaggtctctgggccttcagcgcgggtcctggtgctgcggccacaccaccctggggtgctcattgacagagctgccataatgaacttgaaaggacgggaatcacgagggaagctggggctcccctgcccacaggagaggatccccgttcttcaagcttctctgctcagtgtctactaacgaccgacatttgctaatgtaaataatagtaaattattgagaattctaattcttttacacagtctgtttttaatctattttaattaaataaaatctatgactctactttgatctgtccagga

SEQ ID NO: 4575 - protein, 229 aa, Homo sapiens
MASAVFEGTSLVNMFVRGCWVNGIRRLIVSRRGDEEEFFEIRTEWSDRSVLYLHRSLADLGRLWQRLRDAFPEDRSELAQGPLRQGLVAIKEAHDIETRLNEVEKLLKTIISMPCKYSRSEVVLTFFERSPLDQVLKNDNVHKIQPSFQSPVKLLTTVYQMEETSSWAWTQQSIYLRMAVSFPQSWRTGTTQQPTSPTCHITTWSPSRQTFGTEPLYQASPASAVHCQL

SEQ ID NO: 4576 - DNA, 2197 bp, Homo sapiens
aaataaacgtggcgggacgtatgtgtcatggcgctctccatctaaagtctgtgcagcttccggagagtggcgggttgattttctcactttggactggtttttacttcccgacttctggactcatctttcaagaggactttagactaattgcagataattaagagaatatgccttctgcatcctgtgatacactactggatgacatcgaagatatcgtgtctcaggaagattcaaaaccacaagataggcattttgtaagaaaggatgttgtcccgaaggtacgaaggcgaaatacccaaaaatatttgcaagaggaagaaaacagtccaccaagtgacagcactattccaggcatacagaaaatttggatacgaacatggggttgttctcataataattcagatggagaatatatggctggacagctagctgcttatggctataaaattacagaaaagctcaagaggagaacaagaaaatcgtactggctggatgcgttcctcaagcccagcctcgccaggactaccttaagggactgagtatcattggggttcagcagatagatcgtgtggtagaagttgtggaggagacaattaaaggtcactctgtgagactgctgggtcagaaaaaggataatggaaggcggcttgggggagcacgattggatttgccgaagattaggaagaatccactgatagaaatcatttccatcaataccgggtagagggtgtttgtgagatatggttgaccagtgaagacacgggggcttatggcagagatattggcaccaatctccccacactcctgtggaaactggttgaagtgattcctgagggagcaatgctgaggcttggcatgacaaatccgccctatattttagagcatctggaggaaatggcaaaaatccttaatcaccccagagtctacgcttttctgcacataccagtccagtctgcctccgacagcgtactcatggaaatgaaaagagaatactgtgtggctgacttcaaaagagtagtggattttctgaaagagaaagttcctggaataactattgctacagatattatctgtggttttcctggagaaacagatcaggattttcaagaaacagtgaaacttgttgaagagtacaaattcccaagcctgtttattaaccaattttacccaagaccaggaactcctgctgcaaaaatggaacaagttccagcacaagtgaaaaagcaaaggacaaaagatctttctcgggtgtttcattcttacagtccatatgatcacaagattggtgaaagacaacaagtgttagtaacagaagaatcttttgattccaagttttatgttgcacacaatcaattctatgagcaggttttagtgccaaagaaccctgcgttcatggggaagatggttgaagtggacatctatgaatcaggcaaacattttatgaaagggcagccagtatctgatgccaaagtgtacacgccctccatcagcaaaccgctagcaaagggagaagtctcgggtttgacaaaggacttcagaaatgggcttgggaaccagctgagttcaggatcccacacctctgctgcatctcagtgtgactcagcgagttccagaatggtgctgcccatgccaaggctacatcaagactgtgcgctgaggatgtccgtgggcttggctctgctgggtcttctttttgctttttttgtcaaggtctataattagaatacaactaatggaaacatctataaagaagaatacatttctaattaaaatcttcaatgaacaggaaagcgacatctccattctccaagggcaataatttgtactggtcatgctgcctccttctcagccactcttcttaatgaggctccccctgtctcacattgagttgggcccattggttatttgacctaaaacctaatcaccgctaccatagcacatccttcaaattaaactgcttttggtttacttttagcaagaaatgcaagcggttgcatttttttctgtttgtttcaatctctaatctttaagtcagaacctaattgtacagtggctctggccatcttttcctcatgtggaagaattttctatctttaataaaccagattaaatgtttttatttctacctgccatcattggtctttactaagtgaagtgacttctttctttaacaataaatagaattggtatactaagc

SEQ ID NO: 4577 - protein, 293 aa, Homo sapiens
MLRLGMTNPPYILEHLEEMAKILNHPRVYAFLHIPVQSASDSVLMEMKREYCVADFKRVVDFLKEKVPGITIATDIICGFPGETDQDFQETVKLVEEYKFPSLFINQFYPRPGTPAAKMEQVPAQVKKQRTKDLSRVFHSYSPYDHKIGERQQVLVTEESFDSKFYVAHNQFYEQVLVPKNPAFMGKMVEVDIYESGKHFMKGQPVSDAKVYTPSISKPLAKGEVSGLTKDFRNGLGNQLSSGSHTSAASQCDSASSRMVLPMPRLHQDCALRMSVGLALLGLLFAFFVKVYN

SEQ ID NO: 4578 - DNA, 3096 bp, Homo sapiens
aaataaacgtggcgggacgtatgtgtcatggcgctctccatctaaagtctgtgcagcttccggagagtggcgggttgattttctcactttggactggtttttacttcccgacttctggactcatctttcaagaggactttagactaattgcagataattaagagaatatgccttctgcatcctgtgatacactactggatgacatcgaagatatcgtgtctcaggaagattcaaaaccacaagataggcattttgtaagaaaggatgttgtcccgaaggtacgaaggcgaaatacccaaaaatatttgcaagaggaagaaaacagtccaccaagtgacagaaaatgcatccgatgcagatttatggctcctgaacagttgcactgtaaaaaacccagctgaagaccactttagaaactcaattaaaaaagctcaagaggagaacaagaaaatcgtactggctggatgcgttcctcaagcccagcctcgccaggactaccttaagggactgagtatcattggggttcagcagatagatcgtgtggtagaagttgtggaggagacaattaaaggtcactctgtgagactgctgggtcagaaaaaggataatggaaggcggcttgggggagcacgattggatttgccgaagattaggaagaatccactgatagaaatcatttccatcaataccgggtgtctcaatgcttgtacctactgcaaaactaaacacgccagaggaaatttggccagttatccaattgatgaactagtagatagagccaaacaatcttttcaagagggtgtttgtgagatatggttgaccagtgaagacacgggggcttatggcagagatattggcaccaatctccccacactcctgtggaaactggttgaagtgattcctgagggagcaatgctgaggcttggcatgacaaatccgccctatattttagagcatctggaggaaatggcaaaaatccttaatcaccccagagtctacgcttttctgcacataccagtccagtctgcctccgacagcgtactcatggaaatgaaaagagaatactgtgtggctgacttcaaaagagtagtggattttctgaaagagaaagttcctggaataactattgctacagatattatctgtggttttcctggagaaacagatcaggattttcaagaaacagtgaaacttgttgaagagtacaaattcccaagcctgtttattaaccaattttacccaagaccaggaactcctgctgcaaaaatggaacaagttccagcacaagtgattggtgaaagacaacaagtgttagtaacagaagaatcttttgattccaagttttatgttgcacacaatcaattctatgagcaggttttagtgccaaagaaccctgcgttcatggggaagatggttgaagtggacatctatgaatcaggcaaacattttatgaaagggcagccagtatctgatgccaaagtgtacacgccctccatcagcaaaccgctagcaaagggagaagtctcgggtttgacaaaggacttcagaaatgggcttgggaaccagctgagttcaggatcccacacctctgctgcatctcagtgtgactcagcgagttccagaatggtgctgcccatgccaaggctacatcaagactgtgcgctgaggatgtccgtgggcttggctctgctgggtcttctttttgctttttttgtcaaggtctataattagaatacaactaatggaaacatctataaagaagaatacatttctaattaaaatcttcaatgaacaggaaagcgacatctccattctccaagggcaataatttgtactggtcatgctgcctccttctcagccactcttcttaatgaggctccccctgtctcacattgagttgggcccattggttatttgacctaaaacctaatcaccgctaccatagcacatccttcaaattaaactgcttttggtttacttttagcaagaaatgcaagcggttgcatttttttctgtttgtttcaatctctaatctttaagtcagaacctaattgtacagtggctctggccatcttttcctcatgtggaagaattttctatctttaataaactttttctttgttttttttttccagatggagtttcgctcttgtcccccaggctggagtggtgcagtggcacgatctcaggtcactgcaacctctgcctcctgggttcaaacgattctcctgcctcagcctcccaagtagctgggattacaggcatgcgccaccaagcccagacaatttttttgtgttttcagtagagacggagtttcaccatgttggccaggctagtctcgaactcctgacctcaagtgatccgcccgcctcggcctcccaaagtgctaggattacaggcgtgagccactgcgcccggcctctttaataaatatttttaagtgcatcttccccttcaggctttgtttggagtcccagtgctacaaacattgtatttttcacagcagatgtgttcctgaaaagtgtatagaaacctgttctgggaacctgaatgcttttggaatgcacggggagagtctgccagctaaaggactcctggcaacattctgtgaaatatgaaactggaaaactggatttgtcgaaaactaattgtgcccattttctcacatttttgatccattggggttttttttttgtttttgtttttttttttttttgagtcaaggtctcactctgtcaccctggctggagtgcaatggcactatcttggctcactgcagccttgacctcctggactcaagcagtcctcctacctcagcctccctaatagccaggggctacaggcatataccaccatgcccaactaattttttaattttttgtagagatgagtgtcactatgttgcccaggcttgcctggaactcctagcctcaagcagtcttcttgcctcagcctcccaaagtgctgggattacaggcgtgagccactccacccagcccagattaaatgtttttatttctacctgccatcattggtctttactaagtgaagtgacttctttctttaacaataaatagaattggtatactaagcaaa

SEQ ID NO: 4579 - protein, 488 aa, Homo sapiens
MLSRRYEGEIPKNICKRKKTVHQVTENASDADLWLLNSCTVKNPAEDHFRNSIKKAQEENKKIVLAGCVPQAQPRQDYLKGLSIIGVQQIDRVVEVVEETIKGHSVRLLGQKKDNGRRLGGARLDLPKIRKNPLIEIISINTGCLNACTYCKTKHARGNLASYPIDELVDRAKQSFQEGVCEIWLTSEDTGAYGRDIGTNLPTLLWKLVEVIPEGAMLRLGMTNPPYILEHLEEMAKILNHPRVYAFLHIPVQSASDSVLMEMKREYCVADFKRVVDFLKEKVPGITIATDIICGFPGETDQDFQETVKLVEEYKFPSLFINQFYPRPGTPAAKMEQVPAQVIGERQQVLVTEESFDSKFYVAHNQFYEQVLVPKNPAFMGKMVEVDIYESGKHFMKGQPVSDAKVYTPSISKPLAKGEVSGLTKDFRNGLGNQLSSGSHTSAASQCDSASSRMVLPMPRLHQDCALRMSVGLALLGLLFAFFVKVYN

SEQ ID NO: 4580 - DNA, 529 bp, Homo sapiens
taattatgaaggtcagctttcatttgctgtgaaaacaacacggataatttgggaccataatacgttctgaaatagttcaagacaagcatgttaaaaatgagggtttttttttttccccactgaaccttccctcaagattttattgtcttcataataaaagatgatgcttagaactagttaatttggctctttctcttcttttctcctcccggttcaaaatgcttgcttctcttaataggcagcattctcttagatttgcaactgggctcaaagcactgaagcctcatcacagtcttctttttggcagtagcctttttacagaattccagatcatgaccctgcattccagcctgtctgaaacagtgagaccctgcctcaaacaaacaaacaaacaaattcatttggctgtgtcttccacctgaaatcagattgggatctcatagtactacagctctcatagcattcaggtagatggagctagaaataagcccaagtatgcattttccttcaggactttttaacactaagc

SEQ ID NO: 4581 - protein, 67 aa, Homo sapiens
MLASLNRQHSLRFATGLKALKPHHSLLFGSSLFTEFQIMTLHSSLSETVRPCLKQTNKQIHLAVSST

SEQ ID NO: 4582 - DNA, 615 bp, Homo sapiens
gccatgatcacgtcactgcactccagcatgggcaacggagcaggactctatcccccaccaccctcaaaaaagaaggatgtcaaattagtttaaaattcctacatcaagacaaattgcaagtctggtgtacacatgtgcacgaaggtaaggggaggatgcacacatcagcttactgcaagtatgaagagtttgttaatgacagcaatgacacctagaaaaagatattaaaatgagaaaagaataagaagagactgtccaaaaagacagaactcaaagtataaatcagagtataagtagagagcccactaaggtactgatgttaccaaggtgcatttccagagtttaacaaagcatgaaggttccaacaccttacctggtggactggggaggaggcgaagtatcttacagaaaatgaggaaaggcttgtgagagcagacctgaactccattctacgtctgaccactcagcccaacatgatggcagcagcaacaataattactgagaaactgccaaagtttgagcagagaaaggcagtaggcaaaggagctgtagactgaaaaacaagtgatggagcaatgatcttcaggaagtagaccgagcaaaatctaaaacatg

SEQ ID NO: 4583 - protein, 31 aa, Homo sapiens
MCTKVRGGCTHQLTASMKSLLMTAMTPRKRY

SEQ ID NO: 4584 - DNA, 1712 bp, Homo sapiens; identical to SEQ ID NO: 565

SEQ ID NO: 4585 - protein, 72 aa, Homo sapiens
MFQQFQASCLVLFFLVGFAQQTLKPQNRKVDCNKGVTGTIYEYGALTLNGEEYIQFKQFAGKHVLFVNVAAY

SEQ ID NO: 4586 - DNA, 557 bp, Homo sapiens
atggtggtcatgtaagccaatactctgaaatcccagcttttggtagctctcaagaaaggagatggagaaccctaaagtccatctgcaatgttcatgcagtaccccaagtgtaccgatgccacagtgctcaccagcacatgctgatcccttttcttatactggggaagctgccacaaattgctcatggaatacagaatatatatgacaggaatatgaaaaggaagctctatgtccaaaccatccgacgcagcttttattaagcaaattctgcagcccagagtctccacactcaattaagcaccacaggtggattgcaacaaaggggtaacaggcaccatctatgagtatggagccctcaccctcaacggcgaggagtacatccaattcaagcagtttgcaggcaagcacgtcctgtttgtcaatgtggccgcctattgaggcttggcagctcagtatcctgaactgaatgcactacaggaggagctgaagaattttggtgtcattgtgttggcctttccctgcaaccagtttggaaaacaagaaccaggaacaaactc

SEQ ID NO: 4587 - protein, 47 aa, Homo sapiens
MENPKVHLQCSCSTPSVPMPQCSPAHADPFSYTGEAATNCSWNTEYI

SEQ ID NO: 4588 - DNA, 668 bp, Homo sapiens; identical to SEQ ID NO: 567

SEQ ID NO: 4589 - protein, 221 aa, Homo sapiens; identical to SEQ ID NO: 568

SEQ ID NO: 4590 - DNA, 550 bp, Homo sapiens; identical to SEQ ID NO: 569

SEQ ID NO: 4591 - protein, 100 aa, Homo sapiens; identical to SEQ ID NO: 570

SEQ ID NO: 4592 - DNA, 705 bp, Homo sapiens
tcttcattttactcatggggaaactgaaggccagggatgggaattgcccaggttcacaaaggaatttaacaatggagctggcttctgattcccagggcagtgttctttctactctacctgctgatgagtggagtaagaggtcagaagacctggggaaagataagcaactaagatatcctaaaaatagttcagcaatttaaaaccctcccttctcagagagtccagacaggaggccttcaatccagagccaaggagtagcctgttttttacagaagcatgtaagattacacagatgccaggaattattgttaccagtattatcacttaaaaaaaatcttccagatggattgccacaaagacgagaaaggcaccatctatgactatgaggccatcgcacttaataagaatgaatatgtttccttcaagcagtatgtgggcaagcacatcctcttcgtcaacgtggccacctactgtggtctgacagcgcaatatcctgatttccaggggaatcaatatatacttgagaactaggagcctctcagaagattccagaagtcttcttgataaatacaggacagaagacccatgtttttgagacttttgcaaggttttacagaactaaatgcactccaggaggagctgaagccctatggtctagttgtgttgggctttccctgcaaccaatttggaaagcaagaaccagga

SEQ ID NO: 4593 - protein, 62 aa, Homo sapiens
MDCHKDEKGTIYDYEAIALNKNEYVSFKQYVGKHILFVNVATYCGLTAQYPDFQGNQYILEN

SEQ ID NO: 4594 - DNA, 1469 bp, Homo sapiens
attttactcatggggaaactgaaggccagggatgggaattgcccaggttcacaaaggaatttaacaatggagctggcttctgattcccagggcagtgttctttctactctacctgctgatgagtggagtaagaggtcagaagacctggggaaagataagcaactaagatatcctaaaaatagttcagcaatttaaaaccctcccttctcagagagtccagacaggaggccttcaatccagagccaaggagtagcctgttttttacagaagcatgtaagatggattgccacaaagacgagaaaggcaccatctatgactatgaggccatcgcacttaataagaatgaatatgtttccttcaagcagtatgtgggcaagcacatcctcttcgtcaacgtggccacctactgtggtctgacagcgcaatatcctggtatgtccgtccagggggaggatttgtacctagtttccagctttttgagaaaggggatgtgaatggtgaaaaagaacagaaagtcttcagtttcttgaagcactcctgtcctcatccctctgagattttgggcacattcaaatctatatcctgggaccctgtaaaggtccatgacatccgttggaactttgaaaagttcctggtggggcctgatggaatccctgtcatgcgctggtcccaccgggctacggtcagctcagtcaagacagacatcctggcgtacttgaagcaattcaaaaccaaataggaaggtggagttaagggcaggagcaaccctacttctcaccacactctcttcctgcatgggctccacctgagtaaatcaccgccacatactgccagaattcccactctccacaaactagatttatatttggaaggctactgctcttttgcctctcaagagtatgtgggtgaagactgaaacaaatggaaacctaaaatccccagacctctgttacaggttgaatcattcatatccaccagagggaaatcatccttccacgacaatggttcagtcggccatcacatcctgaagaacattcctagacattctgactcttccatctctctctaccctggaggtgtagaaatagcaatggggtcacagtcacacaatttaggttccacttcataacattttttgtctcctaggacaaacgtgtatcatcagtttccaactgttttggctcagttttcatccatgacacctccccctaccagccattctcctgtgggagcaagaacattgcttcaaaagaagagagggcatctccatgcttgtgggacccaaaacctatctctggccctacaaaagttttcctaattgtctgatctttagtgcattcaggttatggcacctggagaggaatgccctttatcttttgaaggatgggatttcccatctcaaccctggattcctcaccttcagaacgagccctgccactgtctccaataaaatgttttctgcagcatcg

SEQ ID NO: 4595 - protein, 71 aa, Homo sapiens
MDCHKDEKGTIYDYEAIALNKNEYVSFKQYVGKHILFVNVATYCGLTAQYPGMSVQGEDLYLVSSFLRKGM

SEQ ID NO: 4596 - DNA, 4876 bp, Homo sapiens
gagcgtggctcaccgggcccggccggaacctacgggcacagctgcgggtgtgtctgcggaacctccacctgagctgtagagtgtttccctcgacccactagtctgggttccacagggtctgagctcctcagaggtgggagctgcggccgagggaagggtgcatgtgcgcggcgacaatcgggcctcttccccaggcagcttgtgagcccctctccctctccgccctcgcccaggctgctccgatcttcgtttccttgcctaggctcatacacccaggctttatttagggccaaagtatccgtcataacctcggttttctgtctcgcaagtatcttgccgctcaatttgtgaccctgaagctttagtgagtcgctctgtgctcactatttctggtcttttcagaggatggcttcactttcaatggaattgcccgagtaactgccctgtgttgtcacgtaaacaagtccttttaaactgagtctgtagttgtcctgtgttgagtgttttcttatatcaaaaactttcctgaccaagaacaaaaaaggagctcaagtaaaatcacccatttgcctagaccccaactggagagaacctttgcctgagctgtctaagctcgggatggaagcagtctctagggtcttcccagccttggctggccaggctccagaagaacaaggggagattatcaaagtaaaggttaaagaagaagaccacacttgggatcaggaatcagccctacgtaggaatttgtcttataccagggaactctctcgtcagcgcttcaggcagttctgctatcaggagacacctgggcccagggaggctctgagtcaactgcgggaactttgccgtcagtggctgaacccagagatacataccaaggagcagatcctggaattgttggtgctggagcagttcctgaccatcctgcctgaggagctccagtcttgggtgcgggagcataatcctgagagtggagaagaggtggtgactttgctggaagatttggagagggagcttgatgaacctagacagcaggtctcacagggcacatatgggcaggaagtttctatggaagaaatgatccctctggattctgcaaaggagtctttaggcacccagcttcagtctatggaagatagaatggaatgtgaatctccagagccacacccacttcaagataatgggtcatttttgtggttttccatgatgtctcaaagcatgggtggtgataacctcagtagcttagatactaatgaagcagaaattgaaccagaaaacatgagagaaaagttcttcagaagcttagcaaggttactggaaaacaaaagtaataatactaagatattttctaaagcaaagtactgtcagttgataaaggaagtgaaagaagctaaagctaaggcgaaaaaggaatcagttgactaccgtcgcttggctagatttgatgttatccttgtacaaggaaatgagaagctaattgaggctgtaaatggggaaacagataaaatacggtattacttacacagtgaggacttatttgacattctgcataatacacatctcagcattggacatggtggacgtactcgcatggagaaagagttacaagcgaaatacaagaacatcacaaaagaagttataatgctgtatctgaccctctgtaaaccatgccaacagaaaaattcaaaactcaagaaggttctaacatcaaaatcaattaaggaagttagttcaagatgccaagtagatcttatagacatgcagttgaatcctgatggggagtacagatttattttgcattatcaagatctctgtacaaagttaacttttttgcggtcattaaagtctaaaaggcctacggaagttgcacatgctcttttagatatatttacaattattggagcacccagtgtcctacaatctgacaatgggagggaattttcaagccaggttgtcagtgaactcagtaatatttggccagaattgaaaattgtccatgggaagtctcagacctgccaaagccagagttctgcagaacaaactgaggatatccgaaagaggattttctcctggatgcaaactaacaactcatcacactggactgaatttttgtggttcattcagatgtcccaaaatcagccctatcacagaagcatgcaacagactccatgtgaaagtgcatttagctctgaagctaaactgggcttgtcccattctcagctaactgaagaacttgttgccagcttgcatacagaaaatgaattagatcaggctgacaaagagttagaaaatactttaagagcccagtatgaagaaaacattgagactggaacagacagtagtgatattgaagagaatctttctgtcactcctaaggtggctgaaaaaagccctcctgagagcagactaagatttttatcctgtgtagtttgtgaaaaagaatgcacaggtgttaatagttgtatatcatgtgatggaaatatccatgcaatttgtggagtgccctctcaacatgggactgagggctgtggtcggcaaataacttgtagcctttgctatgaaaccagcacaatgaagaggaaacatgatgagattcaaagaagtttgcctgttaaaccttccaaaatgctaaagccatcagggacaccattttcaccagacaaagtaggagactggatggcgaaacaagcttcactggacttttttgtcaagaaaagacatgccttttctgaacacagtagtagtaataaaagaaatgttaacaatagaagttatcctgaagaagggaaaaccaaaagagttcatgctagtttcactcggaaatatgatccttcatatattgagtttggttttgtagctgtaattgatggtgaagtactaaaaccacagtgtattatttgtggagatgtactggctaatgaagcaatgaaaccatcaaaacttaagcgacatttatattcaaaacataaagaaataagttcacaaccaaaagaattctttgaaagaaagagtagtgaattgaaaagccaaccaaagcaggtgttcaacgtttctcatataaacattagtgctttgcgggcttcatataaagtagcacttccggttgccaagtctaaaacaccatacacaattgctgagacactagtgaaagactgcatcaaagaagtttgcttggaaatgttgggtgaatctgcagcaaagaaggtagctcaggtaccactttccaatgacaccatagctcgacgtattcaggaactggctaatgatatggaagatcaactcatagaacaaataaaactagcaaagtatttttcattgcaacttgatgaatgcagagatattgctaacatgataattcttttagtctatgtgaggtttgaacatgatgatgatataaaggaagagttctttttttcagcctctttgcctacaaacacaactagctcagaactgtatgaagctgtaaagaattatattgttaacaaatgtggtttggaatttaaattttgtgtaggagtatgttctgatggtgcagcttcaatgacaggaaaacattctgaagtggtaacccagattaaggaacttgcgccagaatgtaaaacaacacattgcttcattcatcgagaaagtcttgccatgaaaaaaatatcagctgaactaaatagtgtacttaatgatatagtaaaaattgtgaattatataaaatctaattcattgaattcaagattattctctttattatgtgataatatggaagctgatcataagcaactgttactgcatgctgagatacggtggttatcacggggaaaagttctgtcaagaatgtttgaaatacgaaatgaactcttagtgtttctgcaaggcaagaaacccatgtggtcccaactttttaaagatgtgaattggacagccagacttgcttatttgtctgatatcttcagtatttttaatgatcttaatgcttctatgcaagggaagaatgcaacttatttttcaatggcagataaagttgaaggacaaaaacagaagttagaagcttggaaaaacagaatttctacagattgttatgacatgtttcataatttaacaacaattatcaatgaagtaggtaatgatcttgatattgcacatctgcgaaaagttatcagtgaacatcttacaaatttgttagaatgttttgaattttattttccatcaaaagaagatccacgcataggaaatttgtggatccaaaatccatttctttcatcaaaagataacttaaatttaactgtaactctacaggataagttgttgaagctggctaccgacgaaggattgaaaatcagttttgaaaatacagcatcacttccttcattttggataaaagctaaaaatgactatcctgagcttgctgagattgctttaaaattgctgcttcttttcccctcaacatacctctgtgagaccggattctctactttaagtgttattaaaacaaaacatagaaacagtttaaatatacattatcccctgagggtagcattgtcatcaatccaacctagattagacaaattaacaagcaagaagcaagctcacttatcacattaaaagctttaaatattgatatgtaaggtattggttcaaagtatgcatataagcattgagtgtgaggaatttgctatttcactttaaactttctgtctagttacagttatggaagtatgagaagttatgagtgaaacagcaattttctatataaattgcctatatgtatattttcaattaagaatgtgtacagtttttataattctatttttcctcatatttgtcgtatttattaaaatataattttaaatctgttgattctaatattaaaacatttgatctt

SEQ ID NO: 4597 - protein, 1325 aa, Homo sapiens; identical to SEQ ID NO: 572

SEQ ID NO: 4598 - DNA, 873 bp, Homo sapiens
atttagggccaaagtatccgtcataacctcggttttctgtctcgcaagtatcttgccgctcaatttgtgaccctgaagctttagtgagtcgctctgtgctcactatttctggtcttttcagaggatggcttcactttcaatggaattgcccgagtaactgccctgtgttgtcacgtaaacaagtccttttaaactgagtctgtagttgtcctgtgttgagtgttttcttatatcaaaaactttcctgaccaagaacaaaaaaggagctcaagtaaaatcacccatttgcctagaccccaactggagagaacctttgcctgagctgtctaagctcgggatggaagcagtctctagggtcttcccagccttggctggccaggctccagaagaacaaggggagattatcaaagtaaaggttaaagaagaagaccacacttgggatcaggaatcagccctacgtaggaatttgtcttataccagggaactctctcgtcagcgcttcaggcagttctgctatcaggagacacctgggcccagggaggctctgagtcaactgcgggaactttgccgtcagtggctgaacccagagatacataccaaggagcagatcctggaattgttggtgctggagcagttcctgaccatcctgcctgaggagctccagtcttgggtgcgggagcataatcctgagagtggagaagaggtggtgactttgctggaagatttggagagggagcttgatgaacctagacagcagttttttgtattccagaaaaggagcaagcagagggttttgcaagtgccatagaagtgtgcttgtgataaaatttctgctagtgagtataaaagaagaaaagctttaacaattgaaga

SEQ ID NO: 4599 - protein, 156 aa, Homo sapiens
MEAVSRVFPALAGQAPEEQGEIIKVKVKEEDHTWDQESALRRNLSYTRELSRQRFRQFCYQETPGPREALSQLRELCRQWLNPEIHTKEQILELLVLEQFLTILPEELQSWVREHNPESGEEVVTLLEDLERELDEPRQQFFVFQKRSKQRVLQVP

SEQ ID NO: 4600 - DNA, 574 bp, Homo sapiens
gtgcaaacacctacggtaccagtaattctggggaggcaagtactctggaaacgacggagaattaactccggaattacctagttatctggcatcacggtgaaaagagttccacagtgtgagtagtgctggagtagatgctgctggtctgtgttttcctgtcaccgtgataaaccatcgctggcactcagacccgtggtgctcaccgcagcgacctgaaacaaaatggagaggagcatccctaaggactaccacgtcagcgaatctgtaggatcgtcccccgcctttcctcgttaatttcgggccactttcacctttccctttcaccctaaatcagacttaaaaagaaatttactccttcttcagcagcaaagcgtcagctttcctgtcagcgtgagtctcactgaagcctgacctaactctttcggatcggaactagaaagtttattatcaaggaggtatttaaccacgactatacttacctactgtacccttgtggttggtcccatggtgtaatggttagcactctggactttgaatccagcaatccgagttcgaatctcggtgggacctttca

SEQ ID NO: 4601 - protein, 38 aa, Homo sapiens
FRATFTFPFHPKSDLKRNLLLLQQQSVSFPVSVSLTEA

SEQ ID NO: 4602 - DNA, 457 bp, Homo sapiens
gctggagcttttcgtaagtcgataagagcagcatctttctctttgtctccaaacccgtgaatttgatacgctttgaaagcgttcttctaggcgaaagagcttggtactttcatgcttggatagaaggggagagttcaataccgtgcacgcgaccacaaagttgttttcgacgagaattcgatgggaagcggaggaacgaatttttcccacattcagaggccaagccaggaactgtaaaacgttcacctttgaaaggtcccaccgagattcgaactcggattgctggattcaaagtccagagtgctaaccattacaccatgggaccaaccacaagggtacagtagagatttctaaaagagatgttctgattattcaaagactctctactcagaaatgccaaaatgtgagaaatcaacatgaggaccacagcagaaggaaacagagaatggagaaggga

SEQ ID NO: 4603 - protein, 33 aa, Homo sapiens
KVPPRFELGLLDSKSRVLTITPWDQPQGYSRDF

SEQ ID NO: 4604 - DNA, 216 bp, Homo sapiens; identical to SEQ ID NO: 573

SEQ ID NO: 4605 - protein, 71 aa, Homo sapiens; identical to SEQ ID NO: 574

SEQ ID NO: 4606 - DNA, 297 bp, Homo sapiens
gctacaaagctgtacagcatgttgctgaactgaataccgtcggcaattgcaatacagtggtatttgtgtatccgaacatacgaaagcttctacaaggtgcggatccataaggaagatattaggaaacatctaattgaagcttgaagaaccaaaatgaggaaggcagaattaggaaagaccctgtccggtgacgcctccccttctggtttccatctgtgccccctctcaggagccgcgggaacacaagcctcgagcaggcaaagtctctttggatttgaaatacaaaaccgttaagtg

SEQ ID NO: 4607 - protein, 46 aa, Homo sapiens
MRKAELGKTLSGDASPSGFHLCPLSGAAGTQASSRQSLFGFEIQNR

SEQ ID NO: 4608 - DNA, 673 bp, Homo sapiens
atgagccctctcacctatcgtggacaccgaggaaacgcagcagagatgggcacccaggctgcccagatcctctggcagcctcgggtgctcgtccacttcgctcctcctccgcctttgctgccgcagccgcaggtgcgcaccccaccgcgtccctgcttccctcctcgagctcttgtggtcgagctcagactgggcgacagagcgtgtgaggagacgattgaaaaacccaaaaagaagaaaaagcaaaagccccaggagattcatcaggagaatggaatggaagacccatctatctctttctccaaacccaagaaaaagaaatctttttccaaggaggagttgatgagtagcgatcttgaagagaccgctggcagcaccagtcttcccaagaggaagaagtcttcacccaaggaggaaacagttaatgacaccgaagagtcaggccacagaagtggctccaagaaaacgaggaaattctccaaagaggagctggtcagcagtgggcctgaagaggcggctggcaagagcagctccaagaagaagaaaaagttccataaagcatcccaggaagattagaatgcaaatggacattctctgggaggtggggcataccatagcccaaggcgacatttcccaccctgtgccgtcttccccaataagaacaaattcacaa

SEQ ID NO: 4609 - protein, 191 aa, Homo sapiens; identical to SEQ ID NO: 577

SEQ ID NO: 4610 - DNA, 446 bp, Homo sapiens
gaggcgctctcgcagccgtggcagtctggacgaaaagaaccaggtccctttcctggtctagcctacctccctacctctcttccctcatatccagaagaagcgacggagagatggagtttcgctcttgttgcccaggctggagtgcaatggcgcgatctcggctcaccgcaacctctgcctccagggttcaagcgattctcctgccgcctcagcttcccgagtagctgggattacaggcacgcgccaccaccccagctaattttttttttgtgtgtgtgacggagtctcgctctgtcgcccaggctggagtgcagtggcgcgcgctgcaagctccgcctcccgggttcacgccattctcctgcctcagcctcccgagtagctgggactacaggcgcctgccaccacgcctggctaattttttgtattttttagtagaattggggttt

SEQ ID NO: 4611 - protein, 37 aa, Homo sapiens
MEFRSCCPGWSAMARSRLTATSASRVQAILLPPQLPE

SEQ ID NO: 4612 - DNA, 709 bp, Homo sapiens
gtccgcgcctcgctgggctcagcaccccggcccccggcgggacggaggctcgggtccaaagcagtggctgcaccgacacgaacccgtctgcgtttctccacctgtcttccctcgccacctgcatctactatggtctctaaatgcctcgctttgtactttgtggctttctggcagccctttaaagcagcggtgaaagaaaggagagagtcaagacacgggagaaaatgtttcatcccgggttcttctagtggtgcccgccttgacacgactcgggggactgcctaagcaaaaggtggaaaagatggagctggaagacaaagacggctccggattccaaaacttcaatggcgtcgccaaattgacgagctcattaacctttggagtattgttatttaaaaagtaggaaataaaagataaatgtggaaatatttaataaaagaaaaacgtaagctctcaattttctttattacttttttttttttgagacggagtctctcgctctgtcgcccagtggcacgatcttggctcactgcaagctccgcctcccgggtttacgccattcttctgcctcagcctcccgagtagccgggactacaggcgcccgtcaccacgcccggctaattttttctatttttttggtagagacagggtttcaccgtgttagccaggatggtcgcgatctcctgacctcgtgatcctcccgcctcgg

SEQ ID NO: 4613 - protein, 51 aa, Homo sapiens
MVSKCLALYFVAFWQPFKAAVKERRESRHGRKCFIPGSSSGARLDTTRGTA

SEQ ID NO: 4614 - DNA, 2394 bp, Homo sapiens
cagcttccttggctctttttgcccatatgccgaagagccgagcattgccgccaagcattggcaccggccatgcggagactagcgaaagctttgcaattcctctacttctcagtgatgactcgggctttctccttacattcttgatgggcatgaccggtcctgtcagctgggtggccaatttctgttcttcagcagaactgtctcccttcttgggggccgagggctttctggggaagaggatgagtttggagcaatactcattcagacgctgcacattggcctgcagggaatcggtggacttgttctgcctcctcggatccacagagatgccagtggtccgggtcaccttcttgtgaatgcccgccaccctgagctccaggctgaagcctctgccggcgcgcaccttgatgtgataacgcacagcagggcacagcacaatgggccagatgggtcccgactctccgggcgcggggcgatgcagcgccctttggcttgccgggccttgattctgcggatcttctggttgaaccacgtggccacacgctgctgccagtccttgtggaagtggggcttcaacatcatgccattcctgctgggcgccatggctgcctacggccctcctacgaaggaaacactttatagatttctatagcagtgttacatagtaaggttttatggcgagttttgtagcatggatcatactaccttaggactgatggtaaagttttagtctaaggaaagctctgaaaatttgaaaatgtgtaaccacccaatgagttcagcttgcccactgcctagacagaaccatttatcaagacgggcatgcaaagccggctgtgtgggagacccgttttattattattcaaatcagtctccccaagtggattgcagtttttaaggataatttggtgggtaggggaccagtgagttgggaaagttgattagtcgggtcggagatgaaatcagagggagtcgaagctgtcctcttgtgttggcttaatttctggatgggggccacaagaccagatgagccagtttatcgttatgggtggtgctagctgatccatagagtacaggggctgcaaaatatctcaagaactgatcttcggttttacaatagtgatgttatcctgaggagcaattgggggaggtttagaatcttgcagcctccagctgcatgactcctaaaccataatttataatcttgtggctaatttgttagtcctgcgaaagcagtctagtccccaggcaggaagcgggtttgttttggaaagggctgctattgtctttgtttcaaagctaaactataaactaagttcctcccaaagttaggtcagcctacgaccaggaatgaacaaggacagcttggaggttagaagcaagatggaattggttaggttagatctctcactgtctcagttgtaattttgcgatggtgttttcaaatgttgatttaaagaagaccataaatttgtgttgctttctcagattttgagaataaggacaaaaagtgtatgttttaatgggagaatcttaagaatttcactactgaagtggatttctctgtccattaacagtgctaaatgttttgtatttcccagttggaaaaacaaaatctgcaagctttgaatgatacttgttattaggttttggtaacagctgttgtactattcccatttcaatgctcaatagccacacgtggcatgtcatacctaccaggtggacagcacagatatagaacattttcatcattgtaaaaagccctatttgacaacactaacttaaagtattaatcttttagaagagaaagcttcagtccaacccaaattacacaattttacttttgaaaatattgttgaaacaacgttcaattttttaaaattttggaaaactgaatgaaatccatttgtaaatgcgcaaatggtactggaggtggaaaactgaagccttgctatagttttagttttttggagggttatgatcaacacagagaagaaaagattcatctacccatagagcttcttgagaaaaattttctaacaataattttgaaaatttgtagtgaatttgttcttgccattatttatgggtgctttcatgtgcgaggcacatcaaagttctggggaatgacttaggcacaaccaaatggctatcttgggaagaccaaagtcctttgctatatatgagagttttgagatggcgactacctttctgtatggtagattcttgtttttgaatatgccctctgggttttcaaaacaaattgtttttacaatacctatagtagttatctagggcatattctttagcttcaaaaattctatctttagaatgggcttcaatattcataactgagttattttcctctaataaatcattaacattttcccatgt

SEQ ID NO: 4615 - protein, 109 aa, Homo sapiens
MPKSRALPPSIGTGHAETSESFAIPLLLSDDSGFLLTFLMGMTGPVSWVANFCSSAELSPFLGAEGFLGKRMSLEQYSFRRCTLACRESVDLFCLLGSTEMPVVRVTFL

SEQ ID NO: 4616 - DNA, 880 bp, Homo sapiens
ctcccgccttttctcctagatgtgccttgtttgcaaaatcatgtctatcatgtccacgactcgcctcaattttttttcttttgtttttgtggcactttcattctctctcaattcttcaaattcacatggaaaccaaggaaaacaagctccgttttgctttcaatattgatgcatttctgctctaaggctttgacaccaccctgggtggctgtgtcaagagatgaaagacaaaatgaaagaggccgcggaagcacagactggcagaattccaaaacccgaaaaacaagcaaggcaccaaattaacaagcccaatcacattggttacatttcccagtattatcgaagatcaagcaagaaagaaaaagacagaaaacaaatgcgaaaccacagcttccttggctctttttgcccatatgccgaagagccgagcattgccgccaagcattggcaccggccatgcggagactagcgaaagctttgcaattcctctacttctcagtgatgactcgggctttctccttacattcttgatgggcatgaccggtcctgtcagctgggtggccaatttctgttcttcagcagaactgtctcccttcttgggggccgagggctttctggggaagaggatgagtttggagcaatactcattcagacgctgcacattggcctgcagggaatcggtggacttgttctgcctcctcggatccacagagatgccagtggtccgggtcaccttcttgtgaatgcccgccaccctgagctccaggctgaagcctctgccggcgcgcaccttgatgtgataacgcacagcagggcacagcacaatgggccagatgggtcccgactctccgggcgcggggcgatgcagcgccctttggct

SEQ ID NO: 4617 - protein, 82 aa, Homo sapiens
MKDKMKEAAEAQTGRIPKPEKQARHQINKPNHIGYISQYYRRSSKKEKDRKQMRNHSFLGSFCPYAEEPSIAAKHWHRPCGD

SEQ ID NO: 4618 - DNA, 560 bp, Homo sapiens
agatgttttcaggttttgaaggagaaacaggtcccttaaggatgagagcgaatcagaagaagacagacaaaaaaggatttaggatttgttccagaagctcatttctggattgactgtcgtaccaaggtttggcgaacggcggcaagcgcttgccagtttgtcgaagagtggagaggtcagttgtgccaaggagtggagaggtctaagaactctccaggagcacggagggtttatgcagtcataaatcgccttgcttctgcatactttttattccgtggaggattccgcccgggcgatggcgccataaatgcaggaaaacaagctccgttttgctttcaatattgatgcatttctgctctaaggctttgacaccaccctgggtggctgtgtcaagagatgaaagacaaaatgaaagaggccgcggaagcacagactggcagaattccaaaacccgaaaaacaagcaaggcaccaaattaacaagcccaatcacattggttacatttcccagtattatcgaagatcaagcaagaaagaaaaagacagaaaacaaatgcgaaa

SEQ ID NO: 4619 - protein, 53 aa, Homo sapiens
MKDKMKEAAEAQTGRIPKPEKQARHQINKPNHIGYISQYYRRSSKKEKDRKQM

SEQ ID NO: 4620 - DNA, 395 bp, Homo sapiens
gccatctcgaaaaacgtgtgcgggttttttttttttttttttttgctcccagcctgcccagatttcaggaaggaaagaagatcttttgcttcttcggtcgctgggtcggctctccagtgtctgatgtttactgaaatcttgatcgtggttagcctcccccaggacttcattgtttggaagatgccttcgccaagcaatctgagctccaggccgggaagccccaaggtcacaaattttaatggagccctgaaactaaacagaaatcatccctcccactagaacaagagcccctagaggccagcgacaccgctaaaataacatgtgtagaccaatgccgtccaggtaacagtgcctggcaaacacggtagaggttcaataaatacattttaactcaa

SEQ ID NO: 4621 - protein, 51 aa, Homo sapiens
MFTEILIVVSLPQDFIVWKMPSPSNLSSRPGSPKVTNFNGALKLNRNHPSH

SEQ ID NO: 4622 - DNA, 2491 bp, Homo sapiens
aaaattcctgggcagtctggtggattctgaaatccttatatgtaggtaaacccttctcttaattattagaaattacaaacccccacaatctttgataattttctattttgtatatgctgggttcatatatgcattgcatctattcagatatatactttttggggcatctagcaacatagagctagcagatacatgtcctctacaagcaagacaaatggggagaaactccactcaatacagtggataataccagaagtggttagttcaggcatgactttccttgatctggctcttcttttcttgccacttaaaagtcttagtgggataatgtgtgagaaattctgtttcaactataaagtgccttataaatgaatggtcatgtttaccccagagtgtcagtgagtgtcacttgagccattcagctcttgtacacagatgacttatgcaactcaaaagttatgtatgacgtggggttggaaccgcgtttccctctgcagaatcagctgactcactggaaggtggaattcttgatcttggctcagttttatcccatattctaccagtctcaggcatgtggttatccctgtacttaagattcccaatccctctccccttaaagcttttggttggatgatagagccatacatcatatgaaaaaattagtgcatgactaacaacagaggttctggggtttctggtggagaccactgctttatgatgactaaccaaagcccccttagttatgtatttcctggaaaccctcatgacttccataactttgctcttttattctttcagaattaagagaggctcagttatactcagtggacgtgactctggacccagacacggcctaccccagcctgatcctctctgataatctgcggcaagtgcggtacagttacctccaacaggacctgcctgacaaccccgagaggttcaatctgtttccctgtgtcttgggctctccatgcttcatcgccgggagacattattgggaggtagaggtgggagataaagccaagtggaccataggtgtctgtgaagactcagtgtgcagaaaaggtggagtaacctcagccccccagaatggattctgggcagtgtctttgtggtatgggaaagaatattgggctcttacctccccaatgactgccctacccctgcggaccccgctccagcgggtggggattttcttggactatgatgctggtgaggtctccttctacaacgtgacagagaggtgtcacaccttcactttctctcatgctaccttttgtgggcctgtccggccctacttcagtctgagttactcgggagggaaaagtgcagctcctctgatcatctgccccatgagtgggatagatgggttttctggccatgttgggaatcatggtcattccatggagacctccccttgaggaggtgaattcaggccaaaagggctgttggctgtaatcctacgccaggcacaaggcatcttgttgccttgccacgtcctgtcacagctgggtatccttaccatgttccacgcccttgcagtgggagacaggatgtccatgttctctaccatccttttccttcccatgcagattgtgaaatgtaatgagatgtatcaagatatcctagaaataaaaaccagatgtccacctccagtgtttcatactttctggttttacacatcgctggagggataaagagtatggataatctttggatttggagagccgttcaagatacttccagcttcttggctcagcctggcttcctctggttcagccccacataatgattatggctatttgctgtcatttctgggctagggctcctttctaacaacctagactggaataaggccctgtcagcatggctccctttatcccagttttccgtctgggaacagtacctctgcccctgattcccaatgtgccatagttttattaactccattaaagaagcctgtatgtgttttggttagttacagttattttacaataatggtgggtaatggccccacctctgttatgagataatgttctaatcaatgtctctgcctttgtatcttttctgagggctttgtctgttctcttcattctaatgaaaggtgtattctagtgctgggtgcatatcatccaggataatattctgcccaactccatcctctgttactagatcccttaccagtcacatttgtggactggtggccagtcgtataccatccctggaaggattctgggacaatattccagggattcattgacttcttggctccttttctccatttcctttgggggaagggggaattgaccatgcttaagtgcatcctatcaaggggcagctccgtccccatggccattggatcatgagacactctgaagtcagaaggctggggcagatcacttcaagcaagcccccatgatggttctcagtcctgcttctctgtgggtacgtgcccctctgtttaaaaataaactgaatatggatgtttaca

SEQ ID NO: 4623 - protein, 44 aa, Homo sapiens
MYFLETLMTSITLLFYSFRIKRGSVILSGRDSGPRHGLPQPDPL

SEQ ID NO: 4624 - DNA, 2972 bp, Homo sapiens
ggggtttacgctgccgccggcatccgctcggacgcggccacgttgtcttgcgcgctttgcccgcctggccctgggactctgaccctcggctaccctttcctgccccactagcgtggccgcgagcctcggtgagccggccgtattcccgctctcgcttagggggcacaggcgcaggcatcggcccggccactccaagccttcggtgcgcgggcgcgtctgggatacgggcccgggaggcgccgccctccgtccgcccggtgcctctcaggaacagcgaaccggagagagcgccggagagttgggctcagtgcagagctcggcgccggggcccatgcccgtgcgcccccgcaggccggcgccatggcctccgggagtgtggccgagtgcctgcagcaggagaccacctgccccgtgtgcctgcagtacttcgcagagcccatgatgctcgactgcggccataacatctgttgcgcgtgcctcgcccgctgctggggcacggcagagactaacgtgtcgtgcccgcagtgccgggagaccttcccgcagaggcacatgcggcccaaccggcacctggccaacgtgacccaactggtaaagcagctgcgcaccgagcggccgtcggggcccggcggcgagatgggcgtgtgcgagaagcaccgcgagcccctgaagctgtactgcgaggaggaccagatgcccatctgcgtggtgtgcgaccgctcccgcgagcaccgcggccacagcgtgctgccgctcgaggaggcggtggagggcttcaaggagcaaatccagaaccagctcgaccatttaaaaagagtgaaagatttaaagaagagacgtcgggcccagggggaacaggcacgagctgaactcttgagcctaacccagatggagagggagaagattgtttgggagtttgagcagctgtatcactccttaaaggagcatgagtatcgcctcctggcccgccttgaggagctagacttggccatctacaatagcatcaatggtgccatcacccagttctcttgcaacatctcccacctcagcagcctgatcgctcagctagaagagaagcagcagcagcccaccagggagctcctgcaggacattggggacacattgagcagggctgaaagaatcaggattcctgaaccttggatcacacctccagatttgcaagagaaaatccacatttttgcccaaaaatgtctattcttgacggagagtctaaagcagttcacagaaaaaatgcagtcagatatggagaaaatccaagaattaagagaggctcagttatactcagtggacgtgactctggacccagacacggcctaccccagcctgatcctctctgataatctgcggcaagtgcggtacagttacctccaacaggacctgcctgacaaccccgagaggttcaatctgtttccctgtgtcttgggctctccatgcttcatcgccgggagacattattgggaggtagaggtgggagataaagccaagtggaccataggtgtctgtgaagactcagtgtgcagaaaaggtggagtaacctcagccccccagaatggattctgggcagtgtctttgtggtatgggaaagaatattgggctcttacctccccaatgactgccctacccctgcggaccccgctccagcgggtggggattttcttggactatgatgctggtgaggtctccttctacaacgtgacagagaggtgtcacaccttcactttctctcatgctaccttttgtgggcctgtccggccctacttcagtctgagttactcgggagggaaaagtgcagctcctctgatcatctgccccatgagtgggatagatgggttttctggccatgttgggaatcatggtcattccatggagacctccccttgaggaggtgaattcaggccaaaagggctgttggctgtaatcctacgccaggcacaaggcatcttgttgccttgccacgtcctgtcacagctgggtatccttaccatgttccacgcccttgcagtgggagacaggatgtccatgttctctaccatccttttccttcccatgcagattgtgaaatgtaatgagatgtatcaagatatcctagaaataaaaaccagatgtccacctccagtgtttcatactttctggttttacacatcgctggagggataaagagtatggataatctttggatttggagagccgttcaagatacttccagcttcttggctcagcctggcttcctctggttcagccccacataatgattatggctatttgctgtcatttctgggctagggctcctttctaacaacctagactggaataaggccctgtcagcatggctccctttatcccagttttccgtctgggaacagtacctctgcccctgattcccaatgtgccatagttttattaactccattaaagaagcctgtatgtgttttggttagttacagttattttacaataatggtgggtaatggccccacctctgttatgagataatgttctaatcaatgtctctgcctttgtatcttttctgagggctttgtctgttctcttcattctaatgaaaggtgtattctagtgctgggtgcatatcatccaggataatattctgcccaactccatcctctgttactagatcccttaccagtcacatttgtggactggtggccagtcgtataccatccctggaaggattctgggacaatattccagggattcattgacttcttggctccttttctccatttcctttgggggaagggggaattgaccatgcttaagtgcatcctatcaaggggcagctccgtccccatggccattggatcatgagacactctgaagtcagaaggctggggcagatcacttcaagcaagcccccatgatggttctcagtcctgcttctctgtgggtacgtgcccctctgtttaaaaataaactgaatatggatgtttaca

SEQ ID NO: 4625 - protein, 513 aa, Homo sapiens; identical to SEQ ID NO: 580

SEQ ID NO: 4626 - DNA, 7087 bp, Homo sapiens
ggggtttacgctgccgccggcatccgctcggacgcggccacgttgtcttgcgcgctttgcccgcctggccctgggactctgaccctcggctaccctttcctgccccactagcgtggccgcgagcctcggtgagccggccgtattcccgctctcgcttagggggcacaggcgcaggcatcggcccggccactccaagccttcggtgcgcgggcgcgtctgggatacgggcccgggaggcgccgccctccgtccgcccggtgcctctcaggaacagcgaaccggagagagcgccggagagttgggctcagtgcagagctcggcgccggggcccatgcccgtgcgcccccgcaggccggcgccatggcctccgggagtgtggccgagtgcctgcagcaggagaccacctgccccgtgtgcctgcagtacttcgcagagcccatgatgctcgactgcggccataacatctgttgcgcgtgcctcgcccgctgctggggcacggcagagactaacgtgtcgtgcccgcagtgccgggagaccttcccgcagaggcacatgcggcccaaccggcacctggccaacgtgacccaactggtaaagcagctgcgcaccgagcggccgtcggggcccggcggcgagatgggcgtgtgcgagaagcaccgcgagcccctgaagctgtactgcgaggaggaccagatgcccatctgcgtggtgtgcgaccgctcccgcgagcaccgcggccacagcgtgctgccgctcgaggaggcggtggagggcttcaaggagcaaatccagaaccagctcgaccatttaaaaagagtgaaagatttaaagaagagacgtcgggcccagggggaacaggcacgagctgaactcttgagcctaacccagatggagagggagaagattgtttgggagtttgagcagctgtatcactccttaaaggagcatgagtatcgcctcctggcccgccttgaggagctagacttggccatctacaatagcatcaatggtgccatcacccagttctcttgcaacatctcccacctcagcagcctgatcgctcagctagaagagaagcagcagcagcccaccagggagctcctgcaggacattggggacacattgagcagggctgaaagaatcaggattcctgaaccttggatcacacctccagatttgcaagagaaaatccacatttttgcccaaaaatgtctattcttgacggagagtctaaagcagttcacagaaaaaatgcagtcagatatggagaaaatccaaggtaaatttatctacctactgggcttttgatgtaaagttgcttggaaaaaagaacatctgcactgaaagtgggaaacgtgggataagggtgatacccattggccagccttccctgatattttacatcttccctttggtcttaattaattttctcaattaacagcttcttgttctaatttgaagtttgttaactgtatttagtcaattcgcagtctgcattgatggaggagaaaaataagcaatccaaaaattaatcaatccagaattaatttgattgtttacttcggaaagaatgaacaaaaactaccttggatacgtttcacttgagccagtgtttatcattgtaatttactgagttcctactgcttgtgggcacaggtgccagctcgggctggaggaatccagcagcactgacaggcagcaccgccagggacatggttaggagcgggcagtcaggagtcaggctgcctgggttctgggcctgcctctaccacttagtaaggattcaacaagtaatttcctcatctgtaacagaacagtaatagttcttacctcctgaggtataagaattaaggttagttaccatttctaacacttctagaatagaacctgacacataataagtcctatatttatgtttattaaatcgttctaggcatttggagaagcttttccaaattaaaatttttctgctcacgagccacattcagtaaagagttggccatatattattccacccaggaatactaaaattcctgggcagtctggtggattctgaaatccttatatgtaggtaaacccttctcttaattattagaaattacaaacccccacaatctttgataattttctattttgtatatgctgggttcatatatgcattgcatctattcagatatatactttttggggcatctagcaacatagagctagcagatacatgtcctctacaagcaagacaaatggggagaaactccactcaatacagtggataataccagaagtggttagttcaggcatgactttccttgatctggctcttcttttcttgccacttaaaagtcttagtgggataatgtgtgagaaattctgtttcaactataaagtgccttataaatgaatggtcatgtttaccccagagtgtcagtgagtgtcacttgagccattcagctcttgtacacagatgacttatgcaactcaaaagttatgtatgacgtggggttggaaccgcgtttccctctgcagaatcagctgactcactggaaggtggaattcttgatcttggctcagttttatcccatattctaccagtctcaggcatgtggttatccctgtacttaagattcccaatccctctccccttaaagcttttggttggatgatagagccatacatcatatgaaaaaattagtgcatgactaacaacagaggttctggggtttctggtggagaccactgctttatgatgactaaccaaagcccccttagttatgtatttcctggaaaccctcatgacttccataactttgctcttttattctttcagaattaagagaggctcagttatactcaggtaggtgatgagagacaaaaccatattagggtaaggagtaaaaatccttgtgaacctaactactattatgaatgatttggaaattgcttagatttggattcttttggttacatgtataaagatgatacacaacaaccacaaaaatcctcagttgtttctatgtgttaacagtatctttgcctcctgaaatgtctcagagctgaagccatagggtaaaatcaatctcaggtgttaaagaaggattatagggtggaaaccgcagttccccaaaagtagaacagagctggtacactagtacactgctctgcccgcccagcttcagggtcaaaccatggtttgtgacaagcaggactgattgagctccacaatagtgctcttgagtgctagaggaagtctaggagtcttgtgtcatcccatcactgtgcctcagagcaaagtttgaaacttcccttccccctcacaaccgctttcaccctactatagagcctgggtaaatttaacattgcagaagtattcaaatctaaggtgtattcgtcccatagtcacagtcaccttctgttatgaattatcctctaaatgaagagaaggactctacatacagtggatctgcagtccttggtgtgcagtggctctgatccatatttattttcaacaagtattaaatgagtactttgcttgtatcctacactgcctaacattgtgcagggtattttagaggaacagaagagcataagtcatcctactcttggggtttacattgtctggttggaggtatacccatgacacaagaagaaggtaggcagctgttgtagacagattgttgaaccaggagccaagggttctggggttcttggttacctctatcagttgcctgtcttttgtgggagtaaaaatttgtgggcttaaatttctgagaggtaatgtttgggactcttcctcctgaacaagatgtgaggagcaaatgagagaatacatatcagtatttttatttatttatttattattttaattttttaaattttttattattcattttagaggcaggttctctgttgcccaggctggtgtgcagtggcatggtgatagcttgctgcagcctcatactcctgggctcaagtgatcctcctgcctcagcctcctgagtagctggaattacaggcatgcaccaccatgcttgcctaatttttttacttttattttttgtagagacagggtctcaaactcctgtatgcaagcaatcctcttgcctcagcttcccaaagtgctgagattacaggcatgagccacatatccagcccattatcagtgtttttgaagcaggaaaacacttgatgatagcaagatgctgtaatactaaatgccagaggagatgacatgggtcatacacagttttagatttcagaacagtaagtgtaatggcctgggcagattaagaaaaacttggaggatgtgtgttttggactggacattagaagaagatgaatagagcttcgatgtgcagagtaaagatcttatagaatggataaaagagtgatttgggctgggtgtagtggctcacacctgtagtcctaacactttggaaggctgaaatgggaagtctgcagtgagccatgattatgccactgtactacagtctgggtgacagagtgagacctcatctcaaaaaataaaaaaaagtaaaaaataattttaaaagagtgatttaaaaagtaagcatactgatacaggttcccagtcccttacccacagttctaaaatcccaaatctctgaaagccaaaacctttttcattattttgtgggaaattaattatagcatcaaaacctgaatttatgtggtactgtttagagcctttatccttcattatgtaaacattcatgaatctcacagcagatctattaatacttcattatagaatgctgcctgtctaaaacctgtaatattctgaattctatgaaacttggggcccctggaattttcagaataagggatgatgagcgtgtaagaaaacctcaattcagcgtatctgccaggcacagtggctcatgcctgaaatcccattgctttgggaagttgaggtgggaggattgcttgaggccaagagttcgagaccatcctgagcaacatagtaagacctcatctctacaaaaaattttttaaaattagggtggtagtgcacacctatggtcccagctacttgggtgtcttaggcgggagaatcacctgagcccaggagtttggggttacaatgaactatgaccacaccactgcgctccagcctaggcaacagagcaagaccctatctcttaaaatcagttcatgatggatattgtggcttcagatgtgaaagaaaagatacggggctaaaattctgtattttcagagtattctggtaaccagctaatccaagcagtaatttttgaaatgtgaagtttagaatatattctaaataaaatacgtgcaacctccagtgggaacctcttattattggggaggtagtagaaaggcgctgggtgttctaaaataggctctcctggcccacggctgactgtcttccttgtgtctctacagtggacgtgactctggacccagacacggcctaccccagcctgatcctctctgataatctgcggcaagtgcggtacagttacctccaacaggacctgcctgacaaccccgagaggttcaatctgtttccctgtgtcttgggctctccatgcttcatcgccgggagacattattgggaggtagaggtgggagataaagccaagtggaccataggtgtctgtgaagactcagtgtgcagaaaaggtggagtaacctcagccccccagaatggattctgggcagtgtctttgtggtatgggaaagaatattgggctcttacctccccaatgactgccctacccctgcggaccccgctccagcgggtggggattttcttggactatgatgctggtgaggtctccttctacaacgtgacagagaggtgtcacaccttcactttctctcatgctaccttttgtgggcctgtccggccctacttcagtctgagttactcgggagggaaaagtgcagctcctctgatcatctgccccatgagtgggatagatgggttttctggccatgttgggaatcatggtcattccatggagacctccccttgaggaggtgaattcaggccaaaagggctgttggctgtaatcctacgccaggcacaaggcatcttgttgccttgccacgtcctgtcacagctgggtatccttaccatgttccacgcccttgcagtgggagacaggatgtccatgttctctaccatccttttccttcccatgcagattgtgaaatgtaatgagatgtatcaagatatcctagaaataaaaaccagatgtccacctccagtgtttcatactttctggttttacacatcgctggagggataaagagtatggataatctttggatttggagagccgttcaagatacttccagcttcttggctcagcctggcttcctctggttcagccccacataatgattatggctatttgctgtcatttctgggctagggctcctttctaacaacctagactggaataaggccctgtcagcatggctccctttatcccagttttccgtctgggaacagtacctctgcccctgattcccaatgtgccatagttttattaactccattaaagaagcctgtatgtgttttggttagttacagttattttacaataatggtgggtaatggccccacctctgttatgagataatgttctaatcaatgtctctgcctttgtatcttttctgagggctttgtctgttctcttcattctaatgaaaggtgtattctagtgctgggtgcatatcatccaggataatattctgcccaactccatcctctgttactagatcccttaccagtcacatttgtggactggtggccagtcgtataccatccctggaaggattctgggacaatattccagggattcattgacttcttggctccttttctccatttcctttgggggaagggggaattgaccatgcttaagtgcatcctatcaaggggcagctccgtccccatggccattggatcatgagacactctgaagtcagaaggctggggcagatcacttcaagcaagcccccatgatggttctcagtcctgcttctctgtgggtacgtgcccctctgtttaaaaataaactgaatatggatgtttaca

SEQ ID NO: 4627 - protein, 315 aa, Homo sapiens
MASGSVAECLQQETTCPVCLQYFAEPMMLDCGHNICCACLARCWGTAETNVSCPQCRETFPQRHMRPNRHLANVTQLVKQLRTERPSGPGGEMGVCEKHREPLKLYCEEDQMPICVVCDRSREHRGHSVLPLEEAVEGFKEQIQNQLDHLKRVKDLKKRRRAQGEQARAELLSLTQMEREKIVWEFEQLYHSLKEHEYRLLARLEELDLAIYNSINGAITQFSCNISHLSSLIAQLEEKQQQPTRELLQDIGDTLSRAERIRIPEPWITPPDLQEKIHIFAQKCLFLTESLKQFTEKMQSDMEKIQGKFIYLLGF

SEQ ID NO: 4628 - DNA, 2692 bp, Homo sapiens
ggggtttacgctgccgccggcatccgctcggacgcggccacgttgtcttgcgcgctttgcccgcctggccctgggactctgaccctcggctaccctttcctgccccactagcgtggccgcgagcctcggtgagccggccgtattcccgctctcgcttagggggcacaggcgcaggcatcggcccggccactccaagccttcggtgcgcgggcgcgtctgggatacgggcccgggaggcgccgccctccgtccgcccggtgcctctcaggaacagcgaaccggagagagcgccggagagttgggctcagtgcagagctcggcgccggggcccatgcccgtgcgcccccgcaggccggcgccatggcctccgggagtgtggccgagtgcctgcagcaggagaccacctgccccgtgtgcctgcagtacttcgcagagcccatgatgctcgactgcggccataacatctgttgcgcgtgcctcgcccgctgctggggcacggcagagactaacgtgtcgtgcccgcagtgccgggagaccttcccgcagaggcacatgcggcccaaccggcacctggccaacgtgacccaactggtaaagcagctgcgcaccgagcggccgtcggggcccggcggcgagatgggcgtgtgcgagaagcaccgcgagcccctgaagctgtactgcgaggaggaccagatgcccatctgcgtggtgtgcgaccgctcccgcgagcaccgcggccacagcgtgctgccgctcgaggaggcggtggagggcttcaaggagcaaatccagaaccagctcgaccatttaaaaagagtgaaagatttaaagaagagacgtcgggcccagggggaacaggcacgagctgaactcttgagcctaacccagatggagagggagaagattgtttgggagtttgagcagctgtatcactccttaaaggagcatgagtatcgcctcctggcccgccttgaggagctagacttggccatctacaatagcatcaatggtgccatcacccagttctcttgcaacatctcccacctcagcagcctgatcgctcagctagaagagaagcagcagcagcccaccagggagctcctgcaggacattggggacacattgagcagggctgaaagaatcaggattcctgaaccttggatcacacctccagatttgcaagagaaaatccacatttttgcccaaaaatgtctattcttgacggagagtctaaagcagttcacagaaaaaatgcagtcagatatggagaaaatccaagaattaagagaggctcagttatactcagtggacgtgactctggacccagacacggcctaccccagcctgatcctctctgataatctgcggcaagtgcggtacagttacctccaacaggacctgcctgacaaccccgagaggtctccttctacaacgtgacagagaggtgtcacaccttcactttctctcatgctaccttttgtgggcctgtccggccctacttcagtctgagttactcgggagggaaaagtgcagctcctctgatcatctgccccatgagtgggatagatgggttttctggccatgttgggaatcatggtcattccatggagacctccccttgaggaggtgaattcaggccaaaagggctgttggctgtaatcctacgccaggcacaaggcatcttgttgccttgccacgtcctgtcacagctgggtatccttaccatgttccacgcccttgcagtgggagacaggatgtccatgttctctaccatccttttccttcccatgcagattgtgaaatgtaatgagatgtatcaagatatcctagaaataaaaaccagatgtccacctccagtgtttcatactttctggttttacacatcgctggagggataaagagtatggataatctttggatttggagagccgttcaagatacttccagcttcttggctcagcctggcttcctctggttcagccccacataatgattatggctatttgctgtcatttctgggctagggctcctttctaacaacctagactggaataaggccctgtcagcatggctccctttatcccagttttccgtctgggaacagtacctctgcccctgattcccaatgtgccatagttttattaactccattaaagaagcctgtatgtgttttggttagttacagttattttacaataatggtgggtaatggccccacctctgttatgagataatgttctaatcaatgtctctgcctttgtatcttttctgagggctttgtctgttctcttcattctaatgaaaggtgtattctagtgctgggtgcatatcatccaggataatattctgcccaactccatcctctgttactagatcccttaccagtcacatttgtggactggtggccagtcgtataccatccctggaaggattctgggacaatattccagggattcattgacttcttggctccttttctccatttcctttgggggaagggggaattgaccatgcttaagtgcatcctatcaaggggcagctccgtccccatggccattggatcatgagacactctgaagtcagaaggctggggcagatcacttcaagcaagcccccatgatggttctcagtcctgcttctctgtgggtacgtgcccctctgtttaaaaataaactgaatatggatgtttaca

SEQ ID NO: 4629 - protein, 358 aa, Homo sapiens
MASGSVAECLQQETTCPVCLQYFAEPMMLDCGHNICCACLARCWGTAETNVSCPQCRETFPQRHMRPNRHLANVTQLVKQLRTERPSGPGGEMGVCEKHREPLKLYCEEDQMPICVVCDRSREHRGHSVLPLEEAVEGFKEQIQNQLDHLKRVKDLKKRRRAQGEQARAELLSLTQMEREKIVWEFEQLYHSLKEHEYRLLARLEELDLAIYNSINGAITQFSCNISHLSSLIAQLEEKQQQPTRELLQDIGDTLSRAERIRIPEPWITPPDLQEKIHIFAQKCLFLTESLKQFTEKMQSDMEKIQELREAQLYSVDVTLDPDTAYPSLILSDNLRQVRYSYLQQDLPDNPERSPSTT

SEQ ID NO: 4630 - DNA, 1654 bp, Homo sapiens
aaaattcctgggcagtctggtggattctgaaatccttatatgtaggtaaacccttctcttaattattagaaattacaaacccccacaatctttgataattttctattttgtatatgctgggttcatatatgcattgcatctattcagatatatactttttggggcatctagcaacatagagctagcagatacatgtcctctacaagcaagacaaatggggagaaactccactcaatacagtggataataccagaagtggttagttcaggcatgactttccttgatctggctcttcttttcttgccacttaaaagtcttagtgggataatgtgtgagaaattctgtttcaactataaagtgccttataaatgaatggtcatgtttaccccagagtgtcagtgagtgtcacttgagccattcagctcttgtacacagatgacttatgcaactcaaaagttatgtatgacgtggggttggaaccgcgtttccctctgcagaatcagctgactcactggaaggtggaattcttgatcttggctcagttttatcccatattctaccagtctcaggcatgtggttatccctgtacttaagattcccaatccctctccccttaaagcttttggttggatgatagagccatacatcatatgaaaaaattagtgcatgactaacaacagaggttctggggtttctggtggagaccactgctttatgatgactaaccaaagcccccttagttatgtatttcctggaaaccctcatgacttccataactttgctcttttattctttcagaattaagagaggctcagttatactcagtggacgtgactctggacccagacacggcctaccccagcctgatcctctctgataatctgcggcaagtgcggtacagttacctccaacaggacctgcctgacaaccccgagaggttcaatctgtttccctgtgtcttgggctctccatgcttcatcgccgggagacattattgggaggtagaggtgggagataaagccaagtggaccataggtgtctgtgaagactcagtgtgcagaaaaggtggagtaacctcagccccccagaatggattctgggcagtgtctttgtggtatgggaaagaatattgggctcttacctccccaatgactgccctacccctgcggaccccgctccagcgggtggggattttcttggactatgatgctggtgaggtctccttctacaacgtgacagagaggtgtcacaccttcactttctctcatgctaccttttgtgggcctgtccggccctacttcagtctgagttactcgggagggaaaagtgcagctcctctgatcatctgccccatgagtgggatagatgggttttctggccatgttgggaatcatggtcattccatggagacctccccttgaggaggtgaattcaggccaaaagggctgttggctgtaatcctacgccaggcacaaggcatcttgttgccttgccacgtcctgtcacagctgggtatccttaccatgttccacgcccttgcagtgggagacaggatgtccatgttctctaccatccttttccttcccatgcagattgtgaaatgtaatgagatgtatcaagatatcctagaaataaaaaccagatgtccacctcc

SEQ ID NO: 4631 - protein, 44 aa, Homo sapiens; identical to SEQ ID NO: 4623

SEQ ID NO: 4632 - DNA, 2135 bp, Homo sapiens
ggggtttacgctgccgccggcatccgctcggacgcggccacgttgtcttgcgcgctttgcccgcctggccctgggactctgaccctcggctaccctttcctgccccactagcgtggccgcgagcctcggtgagccggccgtattcccgctctcgcttagggggcacaggcgcaggcatcggcccggccactccaagccttcggtgcgcgggcgcgtctgggatacgggcccgggaggcgccgccctccgtccgcccggtgcctctcaggaacagcgaaccggagagagcgccggagagttgggctcagtgcagagctcggcgccggggcccatgcccgtgcgcccccgcaggccggcgccatggcctccgggagtgtggccgagtgcctgcagcaggagaccacctgccccgtgtgcctgcagtacttcgcagagcccatgatgctcgactgcggccataacatctgttgcgcgtgcctcgcccgctgctggggcacggcagagactaacgtgtcgtgcccgcagtgccgggagaccttcccgcagaggcacatgcggcccaaccggcacctggccaacgtgacccaactggtaaagcagctgcgcaccgagcggccgtcggggcccggcggcgagatgggcgtgtgcgagaagcaccgcgagcccctgaagctgtactgcgaggaggaccagatgcccatctgcgtggtgtgcgaccgctcccgcgagcaccgcggccacagcgtgctgccgctcgaggaggcggtggagggcttcaaggagcaaatccagaaccagctcgaccatttaaaaagagtgaaagatttaaagaagagacgtcgggcccagggggaacaggcacgagctgaactcttgagcctaacccagatggagagggagaagattgtttgggagtttgagcagctgtatcactccttaaaggagcatgagtatcgcctcctggcccgccttgaggagctagacttggccatctacaatagcatcaatggtgccatcacccagttctcttgcaacatctcccacctcagcagcctgatcgctcagctagaagagaagcagcagcagcccaccagggagctcctgcaggacattggggacacattgagcagggctgaaagaatcaggattcctgaaccttggatcacacctccagatttgcaagagaaaatccacatttttgcccaaaaatgtctattcttgacggagagtctaaagcagttcacagaaaaaatgcagtcagatatggagaaaatccaagaattaagagaggctcagttatactcagtggacgtgactctggacccagacacggcctaccccagcctgatcctctctgataatctgcggcaagtgcggtacagttacctccaacaggacctgcctgacaaccccgagaggttcaatctgtttccctgtgtcttgggctctccatgcttcatcgccgggagacattattgggaggtagaggtgggagataaagccaagtggaccataggtgtctgtgaagactcagtgtgcagaaaaggtggagtaacctcagccccccagaatggattctgggcagtgtctttgtggtatgggaaagaatattgggctcttacctccccaatgactgccctacccctgcggaccccgctccagcgggtggggattttcttggactatgatgctggtgaggtctccttctacaacgtgacagagaggtgtcacaccttcactttctctcatgctaccttttgtgggcctgtccggccctacttcagtctgagttactcgggagggaaaagtgcagctcctctgatcatctgccccatgagtgggatagatgggttttctggccatgttgggaatcatggtcattccatggagacctccccttgaggaggtgaattcaggccaaaagggctgttggctgtaatcctacgccaggcacaaggcatcttgttgccttgccacgtcctgtcacagctgggtatccttaccatgttccacgcccttgcagtgggagacaggatgtccatgttctctaccatccttttccttcccatgcagattgtgaaatgtaatgagatgtatcaagatatcctagaaataaaaaccagatgtccacctcc

SEQ ID NO: 4633 - protein, 513 aa, Homo sapiens; identical to SEQ ID NO: 580

SEQ ID NO: 4634 - DNA, 1855 bp, Homo sapiens
ggggtttacgctgccgccggcatccgctcggacgcggccacgttgtcttgcgcgctttgcccgcctggccctgggactctgaccctcggctaccctttcctgccccactagcgtggccgcgagcctcggtgagccggccgtattcccgctctcgcttagggggcacaggcgcaggcatcggcccggccactccaagccttcggtgcgcgggcgcgtctgggatacgggcccgggaggcgccgccctccgtccgcccggtgcctctcaggaacagcgaaccggagagagcgccggagagttgggctcagtgcagagctcggcgccggggcccatgcccgtgcgcccccgcaggccggcgccatggcctccgggagtgtggccgagtgcctgcagcaggagaccacctgccccgtgtgcctgcagtacttcgcagagcccatgatgctcgactgcggccataacatctgttgcgcgtgcctcgcccgctgctggggcacggcagagactaacgtgtcgtgcccgcagtgccgggagaccttcccgcagaggcacatgcggcccaaccggcacctggccaacgtgacccaactggtaaagcagctgcgcaccgagcggccgtcggggcccggcggcgagatgggcgtgtgcgagaagcaccgcgagcccctgaagctgtactgcgaggaggaccagatgcccatctgcgtggtgtgcgaccgctcccgcgagcaccgcggccacagcgtgctgccgctcgaggaggcggtggagggcttcaaggagcaaatccagaaccagctcgaccatttaaaaagagtgaaagatttaaagaagagacgtcgggcccagggggaacaggcacgagctgaactcttgagcctaacccagatggagagggagaagattgtttgggagtttgagcagctgtatcactccttaaaggagcatgagtatcgcctcctggcccgccttgaggagctagacttggccatctacaatagcatcaatggtgccatcacccagttctcttgcaacatctcccacctcagcagcctgatcgctcagctagaagagaagcagcagcagcccaccagggagctcctgcaggacattggggacacattgagcagggctgaaagaatcaggattcctgaaccttggatcacacctccagatttgcaagagaaaatccacatttttgcccaaaaatgtctattcttgacggagagtctaaagcagttcacagaaaaaatgcagtcagatatggagaaaatccaagaattaagagaggctcagttatactcagtggacgtgactctggacccagacacggcctaccccagcctgatcctctctgataatctgcggcaagtgcggtacagttacctccaacaggacctgcctgacaaccccgagaggtctccttctacaacgtgacagagaggtgtcacaccttcactttctctcatgctaccttttgtgggcctgtccggccctacttcagtctgagttactcgggagggaaaagtgcagctcctctgatcatctgccccatgagtgggatagatgggttttctggccatgttgggaatcatggtcattccatggagacctccccttgaggaggtgaattcaggccaaaagggctgttggctgtaatcctacgccaggcacaaggcatcttgttgccttgccacgtcctgtcacagctgggtatccttaccatgttccacgcccttgcagtgggagacaggatgtccatgttctctaccatccttttccttcccatgcagattgtgaaatgtaatgagatgtatcaagatatcctagaaataaaaaccagatgtccacctcc

SEQ ID NO: 4635 - protein, 358 aa, Homo sapiens; identical to SEQ ID NO: 4629

SEQ ID NO: 4636 - DNA, 300 bp, Homo sapiens
gagcctaacccagatggagagggagaagattgtttgggagtttgagcagctgtatcactccttaaaggagcatgagtatcgcctcctggcccgccttgaggagctagacttggccatctacaatagcatcaatggtgccatcacccagttctcttgcaacatctcccacctcagcagcctgatcgctcagctagaagagaagcagcagcagcccaccagggagctcctgcaggagggctgaaagaatcaggattcctgaaccttggatcacacctccagatttgcaagagaaaatccaca

SEQ ID NO: 4637 - protein, 75 aa, Homo sapiens
MEREKIVWEFEQLYHSLKEHEYRLLARLEELDLAIYNSINGAITQFSCNISHLSSLIAQLEEKQQQPTRELLQEG

SEQ ID NO: 4638 - DNA, 676 bp, Homo sapiens
atctcggctcactgcaagctctgcatcctgggttcacgccattctcctgtttcagcctccaggtagctgggcctaccggcgcccgccaccacgcccggctaattttttgtatttttagtagagacggggtttcaccgtgttagccaggatggtctcgatctcctgacctggtgatccgcccgcctcggcctcccaaagtgctgagattacaggcgtgagctaccgcgccccgccaatttaccgtgcaggattgcaaacaccagagagaaaatcagtctctggaatgatgcctttgatggaccaagatgcagctgatgaagcattgaaccaattagcacctagcaggagggcacccttgctctgtgtccttgaaggttaaagctgtcaaaaagtggtctccctcaagttcggccatcttgctctcagagatctagaactggactcagtcaaaattttgggccaaggagaccgacgcgctgtcgcctgcactaagagaaacgcaacgaacaactttgtcaatgcattgcattatactatagcagcaactatacttttaaatgattcgaatcttgaggtttcaaactgaaccgtcttgtgccttttgcccggcgggcatttctgcggggaccgcgggtcaccttctgaatttttaccttcataaacagcaaggactgcg

SEQ ID NO: 4639 - protein, 38 aa, Homo sapiens
MIRILRFQTEPSCAFCPAGISAGTAGHLLNFYLHKQQG

SEQ ID NO: 4640 - DNA, 976 bp, Homo sapiens
cttcaggattctcagtcttccctccgggagacttttggccagtcttgtctcgctccaacctcctacccccaccccattcctcagtgcattcgtgaatttctccaagcaggcctttccagatcgacactaagttccaatcccgagctgtgtgacccagcaccaattcagtcacgatgatgacttgcaattgcttaatcagttggcctttcctcctagctgtgaagtttaccgtgcaggattgcaaacaccagagagaaaatcagtctctggaatgatgcctttgatggaccaagatgcagctgatgaagcattgaaccaattagcacctagcaggagggcacccttgctctgtgtccttgaaggttaaagctgtcaaaaagtggtctccctcaagttcggccatcttgctctcagagatctagaactggtaggagaatatagccttgatagtggagaggaaactattgctgttgtgagggactgagagaaccaggcagagagcccagattgacacagcaggtgacaaaagaggcgcgcctaccttggggaatacggaggaacagaggaaagtgagaccaggagaaagagcaggggggcgggtgtgcaggccgggcgccgtggctcacgcctgtaatcccagcactttgggaggccaaggcaggcggatcacaaggtcaggagttcgagaccagcctggccaatatggtgaaaccctgtctctactaaaaatacaaaaattagctgggcgtggtggcgaatgcctgtagtcccagctactcggaaggctgaggcaggagaatcgcttgaacccggaacccgggaggcagaggttgcagtgagccgagatggcgccattgcactctagcctgggcgacggactgagacttcgtctcaaaaaagggagtgactgtgttgcttttgctttcttggaaatcttttttcttagtaattttcctaaagtaatttccttaggaaa

SEQ ID NO: 4641 - protein, 33 aa, Homo sapiens
MMTCNCLISWPFLLAVKFTVQDCKHQRENQSLE

SEQ ID NO: 4642 - DNA, 2144 bp, Homo sapiens
tccctcagctctattacctgctccatatcctgccttcactaaagatggaagccaaggaaacctgccgcaagcagatatcacactaatgagccaggcccaagagtcagtgacatttgaggatgtagctgtgaacttcactaacagggagtggcagtgtctgacctacgctcaaaggcatctctataaggatgtgatgttggaaaattatgggaacatggtatcacttggatttccatttcctaaacctcctttaatctctcatctggagcgagaagtagacccctgtgtgcaggatccacaggacagggagtccctaagctgctcctacccagtgtcagctgacaagatgtggcctgagaatgaaaaggcaagttcacaacaagagatttttgaaaatggagaagcctactggatgaaatttaacagtctcctaaaagttgattcccgggatcctaaggttagagaagtttgtgttcaggatgtcaaattagagaatcaatgggaaacatctataagggagaaactgagagaagagaaagaaggctctgaggaagtgacctgcaaaaaaggaaagaaccagaaagtgcttagtaaaaacttgaatccaaactcaaaacatagtcaatgtaataaagttcttatagcacagaaactccatgaatgtgccaggtgtggcaaaaacttcagttggcactcagatctaattctccatgagcaaattcattctggtgagaaaccccatgtgtgtaatgagtgtgggaaagcattcaagaccagaaatcagctttctatgcaccggataatccacacaggggagaaaccttttaattgcacccagtgtgggaaggctttcaacagtagatcagctctttgccgacataaaaaaacccacagtggggagaagcctcacgagtgcagggactgtgggaaggccttcaagaccaggaaccgtctctgtatgcatcagcttatccacaccggggagaagccttacaaatgtaactgctgtgggaaggccttccagtttaagcattcccttaccatccatggcagaatccacactggggagaagccatatgaatgtgaggagtgcgggaaggccttcagtgggagttcagacctcaccaaacacataagaatccacactggggaacgaccttatgagtgcagcaagtgtggaagggccttcagtcggagctcagacctaagcaaacacaaacgaatccatactcgggagaaacactatgggtgtccccagtgtggaaaagacttcagcatcaaggcagaactcaccaaacacagaaggatccacactgaagagaaacgttacaggtgtgaggagtgtgggaaagcctttcgtcataactgtaagcgcagggctcatgaacgagagcatacaggggagaagccctatcaatgcagggattgtgggaaaaccttccaagataagcactgccttaccatccatcagagaatccacactggagagaaaccttacaaatgtttagagtgtgggaaagctttcagtgggaagtcaaacttgaccaatcatcgaagaattcacactggagagaagcctcacaaatgtgaggtatgtggaatggccttccatcatagttcagtcctgaggcagcacaaaagaatccacactggtgagaagccatacacctgcagtgagtgtggcacgtccttccgtcagggctcagctctgattggacataagcgagttcatactggggagaaaccttatgaatgtgaggaatgtggaaaagcttttagagtgagctcaaatcttactggacataagaaaagaaaacatcaagtatggagtacccatgaacttgatgggagtaggaaatccctctctccagtgactgtttctcagacctcagtagtcagtattttgaccagtgcctgagtataacgattctggtgttactttctgtttttcctacctcttaggctggtccttctgtctcttatattagttattcctgatttcctgacccttaattgtgagattccccaaagacattgtcctttaccttcttattcactattttttcagtgagcacatttacttccaagagtttatcaatcacttcctaatattaataaacacttattagtgcttgctgtgttct

SEQ ID NO: 4643 - protein, 610 aa, Homo sapiens
MSQAQESVTFEDVAVNFTNREWQCLTYAQRHLYKDVMLENYGNMVSLGFPFPKPPLISHLEREVDPCVQDPQDRESLSCSYPVSADKMWPENEKASSQQEIFENGEAYWMKFNSLLKVDSRDPKVREVCVQDVKLENQWETSIREKLREEKEGSEEVTCKKGKNQKVLSKNLNPNSKHSQCNKVLIAQKLHECARCGKNFSWHSDLILHEQIHSGEKPHVCNECGKAFKTRNQLSMHRIIHTGEKPFNCTQCGKAFNSRSALCRHKKTHSGEKPHECRDCGKAFKTRNRLCMHQLIHTGEKPYKCNCCGKAFQFKHSLTIHGRIHTGEKPYECEECGKAFSGSSDLTKHIRIHTGERPYECSKCGRAFSRSSDLSKHKRIHTREKHYGCPQCGKDFSIKAELTKHRRIHTEEKRYRCEECGKAFRHNCKRRAHEREHTGEKPYQCRDCGKTFQDKHCLTIHQRIHTGEKPYKCLECGKAFSGKSNLTNHRRIHTGEKPHKCEVCGMAFHHSSVLRQHKRIHTGEKPYTCSECGTSFRQGSALIGHKRVHTGEKPYECEECGKAFRVSSNLTGHKKRKHQVWSTHELDGSRKSLSPVTVSQTSVVSILTSA

SEQ ID NO: 4644 - DNA, 627 bp, Homo sapiens
ggagaagcctactggatgaaatttaacagtctcctaaaagttgattcccgggatcctaaggttagagaagtttgtgttcaggatgtcaaattagagaatcaatgggaaacatctataagggagaaactgagagaagagaaagaaggctctgaggaagtgacctgcagtgagtgtggcacgtccttccgtcagggctcagctctgattggacataagcgagttcatactggggagaaaccttatgaatgtgaggaatgtggaaaagcttttagagtgagctcaaatcttactggacataagaaaagaaaacatcaagtatggagtacccatgaacttgatgggagtaggaaatccctctctccagtgactgtttctcagacctcagtagtcagtattttgaccagtgcctgagtataacgattctggtgttactttctgtttttcctacctcttaggctggtccttctgtctcttatattagttattcctgatttcctgacccttaattgtgagattccccaaagacattgtcctttaccttcttattcactattttttcagtgagcacatttacttccaagagtttatcaatcacttcctaatattaataaacacttattagtgctt

SEQ ID NO: 4645 - protein, 131 aa, Homo sapiens
MKFNSLLKVDSRDPKVREVCVQDVKLENQWETSIREKLREEKEGSEEVTCSECGTSFRQGSALIGHKRVHTGEKPYECEECGKAFRVSSNLTGHKKRKHQVWSTHELDGSRKSLSPVTVSQTSVVSILTSA

SEQ ID NO: 4646 - DNA, 1077 bp, Homo sapiens
aattggcggactaggaagtggagcttctgtatatttctgtttctcatttcttggggagagtaccggcgggaaggtctgtgccttgggccgtcgtgggtcggaatttgcagctgagaggagaggagtccggtgccgccgtcgcccccctcacctaaatacccgggcccctggggttgcaggcaggggcgggtctttggggccagatttgaggagggagtcggctgcggtttcctccctcgaagccattccccaaaatgagcatttcccgcccatttgccctacctcctcccaggggctcgtgacccattttttttttttttttttgagaccggagtcttgctcttgtcgcctcctgacccattctttttattcttctctacagcatccattcatatattcattcagtcagctaatttttaatccagcacatactattgcaagcgctgttttaggcgttgagaatacaactgtgaacaagacgacaaaaattcctgccctcatggagcctaagagcctagattttagcgaaggtagaaccaccgtaaacaatgtatatattaataagtaacttatgcaccatactggaaaattataaagtgctatagaggaaaagaagaattcatgtaaagcaagggaaacaagatgtgagatcacagcggtttagtgttgctaatgaaccccaaatccagggcagtgtttgacacattaagccaaacagtagcggcactgtgggtcaagaagggccctttggctggcaccaccaaaacatgtgttctccaaaggaggctggcatcaactggagccacttcacagcttgtttgagaactggatctgaccagtaggaagaaaccaggacagcagtggaagactgttaaagaaacctgagtaaaaagatgcaggaggttgtgctgttggatgagagttcaggaccaccaagccagctgctttggacccgccaggatacccagctccctcaggaaagcgctctattacctgctccatatcctgccttcactaaagatggaagccaaggaaacctgccgcaagcagatatcacactaatgagccaggcccaag

SEQ ID NO: 4647 - protein, 60 aa, Homo sapiens
MQEVVLLDESSGPPSQLLWTRQDTQLPQESALLPAPYPAFTKDGSQGNLPQADITLMSQA

SEQ ID NO: 4648 - DNA, 553 bp, Homo sapiens
tatttctgtttctcatttcttggggagagtaccggcgggaaggtctgtgccttgggccgtcgtgggtcggaatttgcagctgagaggagaggagtccgcatccattcatatattcattcagtcagctaatttttaatccagcacatactattgcaagcgctgttttaggcgttgagaatacaactgtgaacaagacgacaaaaattcctgccctcatggagcctaagagcctagattttagcgaaggtagaaccaccgtaaacaatgtatatattaataagtaacttatgcaccatactggaaaattataaagtgctatagaggaaaagaagaattcatgtaaagcaaggaggctggcatcaactggagccacttcacagcttgtttgagaactggatctgaccagtaggaagaaaccaggacagcagtggaagactgttaaagaaacctgagtaaaaagatgcaggaggttgtgctgttggatgagagttcaggaccaccaagccagctgctttggacccgccaggatacccagctccctcaggaaagcggt

SEQ ID NO: 4649 - protein, 30 aa, Homo sapiens
MQEVVLLDESSGPPSQLLWTRQDTQLPQES

SEQ ID NO: 4650 - DNA, 559 bp, Homo sapiens
gataattggcggactaggaagtggagcttctgtatatttctgtttctcatttcttggggagagtaccggcgggaagcatccattcatatattcattcagtcagctaatttttaatccagcacatactattgcaagcgctgttttaggcgttgagaatacaactgtgaacaagacgacaaaaattcctgccctcatggagcctaagagcctagattttagcgaaggtagaaccaccgtaaacaatgtatatattaataagtaacttatgcaccatactggaaaattataaagtgctatagaggaaaagaagaattcatgtaaagcaaggaggctggcatcaactggagccacttcacagcttgtttgagaactggatctgaccagtaggaagaaaccaggacagcagtggaagactgttaaagaaacctgagtaaaaagatgcaggaggtaagaagaggagggtctgtgatacatcacaaggaggaagaaggagaagtgagtccaagaaagaaggaaagcagtgttgtgctgttggatgagagttcaggaccaccaagcc

SEQ ID NO: 4651 - protein, 39 aa, Homo sapiens
MQEVRRGGSVIHHKEEEGEVSPRKKESSVVLLDESSGPP

SEQ ID NO: 4652 - DNA, 947 bp, Homo sapiens
aattggcggactaggaagtggagcttctgtatatttctgtttctcatttcttggggagagtaccggcgggaaggtctgtgccttgggccgtcgtgggtcggaatttgcagctgagaggagaggagtccggtgccgccgtcgcccccctcacctaaatacccgggcccctggggttgcaggcaggggcgggtctttggggccagatttgaggagggagtcggctgcggtttcctccctcgaagccattccccaaaatgagcatttcccgcccatttgccctacctcctcccaggggctcgtgacccattttttttttttttttttgagaccggagtcttgctcttgtcgcctcctgacccattctttttattcttctctacagcatccattcatatattcattcagtcagctaatttttaatccagcacatactattgcaagcgctgttttaggcgttgagaatacaactgtgaacaagacgacaaaaattcctgccctcatggagcctaagagcctagattttagcgaaggtagaaccaccgtaaacaatgtatatattaataagtaacttatgcaccatactggaaaattataaagtgctatagaggaaaagaagaattcatgtaaagcaagggaaacaagatgtgagatcacagcggtttagtgttgctaatgaaccccaaatccagggcagtgtttgacacattaagccaaacagtagcggcactgtgggtcaagaagggccctttggctggcaccaccaaaacatgtgttctccaaaggaggctggcatcaactggagccacttcacagcttgtttgagaactggatctgaccagtaggaagaaaccaggacagcagtggaagactgttaaagaaacctgagtaaaaagatgcaggaggtaagaagaggagggtctgtgatacatcacaaggaggaagaagga

SEQ ID NO: 4653 - protein, 49 aa, Homo sapiens
MNPKSRAVFDTLSQTVAALWVKKGPLAGTTKTCVLQRRLASTGATSQLV

SEQ ID NO: 4654 - DNA, 405 bp, Homo sapiens
cccagggattcaccctggcctcggactaatcctatggggcgcttgcaaaccccggccatcccctggagtctgaaggtcattccggactcctgacgccgccagtcccgcggtgagacgtgagcgccattggcgtccgtggcctctgtttccgtggcaacctagtaaccattaattttcaattaaaggagacaaaaagctcgatgacagctccaggtctgctgaagatgtcaagaatctgtattaatatacagcaagagagcataattgtgtgtccatcttccagagcagcgaaaaatggagggataattaccagctcgaaagccactctgtaatttagttcttactgtcaccacagccctacacattagcataaattaaaagcagagtttattgttatcaaagtgc

SEQ ID NO: 4655 - protein, 43 aa, Homo sapiens
MTAPGLLKMSRICINIQQESIIVCPSSRAAKNGGIITSSKATL

SEQ ID NO: 4656 - DNA, 418 bp, Homo sapiens
gcgagagaaaaccacgtgcaccaaactttaggggaggaaaaatgggaacgtggggagaagacgtgaggcggcagatctgaaaaagatggtcattccggactcctgacgccgccagtcccgcggtgagacgtgagcgccattggcgtccgtggcctctgtttccgtggcaacctagtaaccattaattttcaattaaaggagacaaaaagctcgatgacagctccaggtctgctgaagatgtcaagaatctgtattaatatacagcaagagagcataattgtgtgtccatcttccagagcagcgaaaaatggagggataattaccagctcgaaagccactctgtaatttagttcttactgtcaccacagccctacacattagcataaattaaaagcagagtttattgttatcaaagtgc

SEQ ID NO: 4657 - protein, 43 aa, Homo sapiens; identical to SEQ ID NO: 4655

SEQ ID NO: 4658 - DNA, 415 bp, Homo sapiens
tggaaaaggggctgactggccctggcacttccgaggtgcgacctcagcaagacaagtcccctcttcaccagagacgacacggcgggtcattccggactcctgacgccgccagtcccgcggtgagacgtgagcgccattggcgtccgtggcctctgtttccgtggcaacctagtaaccattaattttcaattaaaggagacaaaaagctcgatgacagctccaggtctgctgaagatgtcaagaatctgtattaatatacagcaagagagcataattgtgtgtccatcttccagagcagcgaaaaatggagggataattaccagctcgaaagccactctgtaatttagttcttactgtcaccacagccctacacattagcataaattaaaagcagagtttattgttatcaaagtgc

SEQ ID NO: 4659 - protein, 43 aa, Homo sapiens; identical to SEQ ID NO: 4655

SEQ ID NO: 4660 - DNA, 574 bp, Homo sapiens
ccctggttttctgtggaaagtgagcttctgggttcgacagtgggaccggcacagaccttcccgcagctacaggccatacgacaaccccgctgctctttctttctgcgggcactcgggccagtcctaacaattgcccctcaagctgtgtgtgctgccctaaccctcaatcccgaacccgaaacagtgcgtgctgggacgaatctaggcaggtctccgaaaccggggtgaagatgctgaagttcaggtcattccggactcctgacgccgccagtcccgcggtgagacgtgagcgccattggcgtccgtggcctctgtttccgtggcaacctagtaaccattaattttcaattaaaggagacaaaaagctcgatgacagctccaggtctgctgaagatgtcaagaatctgtattaatatacagcaagagagcataattgtgtgtccatcttccagagcagcgaaaaatggagggataattaccagctcgaaagccactctgtaatttagttcttactgtcaccacagccctacacattagcataaattaaaagcagagtttattgttatcaaagtgc

SEQ ID NO: 4661 - protein, 36 aa, Homo sapiens
MLKFRSFRTPDAASPAVRRERHWRPWPLFPWQPSNH

SEQ ID NO: 4662 - DNA, 3652 bp, Homo sapiens
gctctccgcgcgctccctccttccctctccaccctcctcctcccccgccccctcccgccccgcccgcgcgccgcccgctcgcagccactcgcagcccaggctcagtcgcagcccctcggagtccggagcccgccgtccctgcggaccggacagtgcggccggcggccggcggccgggacggagcccccagcccgcgaggagggcgcggcgcaggcggcggcggcgcggcggggaggagcccgggccggaaccagggctgggccgggggcggggacgccggggtccgggagcccgggagccggagcgagctgacgagcgtcgcggaaggaccgggaaggaagagcggagccggagcgagccaagcagcccacaaagtgccatgccccggcggggttgaggcgcgcggcggtcggcccggcgcgctgggaggacgcccgggagctgcgcgacgcggggcggcgcggaagggcagccccggcgggcggcggcgggcccgggctgcgaccggagcgagccccatgccccgcgcgggctgacgggccggagcccgcacggagcggccgggcgggacaggtaccgctagagcgacatgatggtggaatctgcctcggagacaatcaggtcggctccatctggtcagaatggcgtgggcagcctctctgggcaagccgatggcagcagcggcggggccacagggacaactgcaagtggcacgggcagggaagtgaccacgggtgcagacagcaatggtgagatgagtcccgcagagctgctgcacttccagcagcaacaggctctccaagtggcccggcagttcctgctgcagcaggcctcaggcctgagctccccagggaacaatgacagcaaacagtctgcctctgctgtgcaggtgcctgtgtcggtggccatgatgtcgccgcagatgcttaccccgcaacagatgcagcagatcctgtcgcccccgcagctgcaggccttgctccagcagcagcaagccctcatgctccagcagctacaggagtactacaagaagcagcaggagcagctccacctgcagctcctcacccagcagcaggctgggaaaccgcagcccaaagaggcactggggaacaagcagctggccttccagcagcagctcctgcaaatgcaacagttgcagcagcagcacctgctcaacctgcagaggcaggggctggtcagcctgcagcccaaccaagcctcggggcccctccagacccttccgcaagctgtttgcccaacagacctgccccagctgtggaagggcgagggtgcccccgggcagcctgccgaggacagcgtcaagcaggaggggctggacctcactggcacggccgccaccgctacctcgtttgccgctccccccaaggtctcaccccccctctcccaccataccctgcccaacggacagcctactgtgctcacatctcggagagacagctcttcccacgaggagacccccggctcccaccccctgtacggacacggagagtgcaagtggccaggctgtgagaccctgtgtgaagacctgggccagtttatcaaacacctcaacacagagcacgccctggatgaccggagtacagcccagtgccgggtacagatgcaggtggtgcagcagctggagatccagctcgccaaggagagcgagcggctgcaggccatgatggcccacctgcacatgcggccctcggagcccaagcccttcagccagccactgaacccggtccccggctcctcctcattctccaaggtgaccgtctctgcagcagactcattcccagatggtctcgtgcaccccccgacctcggccgcagcccctgtcacccctctacggccccctggcctgggctctgcctccctgcatggtgggggcccagcccgtcggagaagcagtgacaagttctgctcccccatctcctcagagctggcccagaatcatgagttctacaagaacgccgacgtccggccccccttcacctacgcctccctcatccgccaggccatcctggaaacccctgacaggcagctgaccctgaatgagatctataactggttcaccaggatgttcgcctatttccgcagaaacactgccacctggaagaacgccgtgcgccacaacctcagcctgcacaagtgcttcgtccgcgtggagaacgtcaagggtgccgtgtggactgtggacgagcgggagtatcagaagcggagaccgccaaagatgacagggagccccaccctggtgaagaacatgatctctggcctcagctatggagcacttaatgccagctaccaggccgccctggccgagagcagcttccccctcctcaacagccctggcatgctgaaccctggctccgccagcagcctgctgcccctcagccacgatgacgtgggtgcccccgtggagccgctgcccagcaacggcagcagcagccctcctcgcctctccccgccccagtacagccaccaggtgcaggtgaaggaggagccagcagaggcagaggaagacaggcagcccgggcctcccctgggcgcccctaaccccagcgcctcggggcctccggaagacagggacctggaggaggagctgccgggagaagaactgtcctaagggcctgtagtgaccggcagggctggggtgagacccctcccttccagaatccaggccccatctcccccaactccacagcccctcccgagcctcaaggcaagtccaggactcagaccggggaggcccgggccagcagctcccagtgtgacctgacaaaaacacgtaggggcagggacggtccccacccccagggacacaacccctggtcttggaccagtagaggacacggagggttcagacccctcctcagaccctccccacatctgaaactgcctccccccaaccaccagcagcagcagggccctcctcccccaccagctctccccacagggcccctcagcatcatggagacccgcaggcggggcttagccacccctcaaacccagggccccctggcacctggctctggccgtgttttctggccagaggcccccactttcctaactcgtgctcccttccgccttcttttccgtactgtgaagaaagaactctccaccccagctcccaccctgccctggcctgggtggaggaactgtgcctccatccccagaagaaacagccccctctgctgctggggtgggactgtctgtgtgccctgtgggggtccgtgtgagcaggcccacctggctccagacccgcccccaacctgagacagaaccaggctgagccaggcctccacccccacccccgtttgctgggggctcctccagccgcccccatgggaagaggcctggtaccgcctcacccacagaggtctgtgccaggtgcgcttctgcaggtggagccaagctctccctgaggccagaggcggggcctgggccgggagcccaggggaaggccaggctggaccccggctccacacccacatccagcctgcaggcctctctgcagtcctctcaccctccctcagctccccttcctctgcagtcaccctcagctccccttccttgcccgcctctccccccgccgccccaccagttaaacggatgaccaaagacctttcttatgccggaagcaaaaacc

SEQ ID NO: 4663 - protein, 679 aa, Homo sapiens
MMVESASETIRSAPSGQNGVGSLSGQADGSSGGATGTTASGTGREVTTGADSNGEMSPAELLHFQQQQALQVARQFLLQQASGLSSPGNNDSKQSASAVQVPVSVAMMSPQMLTPQQMQQILSPPQLQALLQQQQALMLQQLQEYYKKQQEQLHLQLLTQQQAGKPQPKEALGNKQLAFQQQLLQMQQLQQQHLLNLQRQGLVSLQPNQASGPLQTLPQAVCPTDLPQLWKGEGAPGQPAEDSVKQEGLDLTGTAATATSFAAPPKVSPPLSHHTLPNGQPTVLTSRRDSSSHEETPGSHPLYGHGECKWPGCETLCEDLGQFIKHLNTEHALDDRSTAQCRVQMQVVQQLEIQLAKESERLQAMMAHLHMRPSEPKPFSQPLNPVPGSSSFSKVTVSAADSFPDGLVHPPTSAAAPVTPLRPPGLGSASLHGGGPARRRSSDKFCSPISSELAQNHEFYKNADVRPPFTYASLIRQAILETPDRQLTLNEIYNWFTRMFAYFRRNTATWKNAVRHNLSLHKCFVRVENVKGAVWTVDEREYQKRRPPKMTGSPTLVKNMISGLSYGALNASYQAALAESSFPLLNSPGMLNPGSASSLLPLSHDDVGAPVEPLPSNGSSSPPRLSPPQYSHQVQVKEEPAEAEEDRQPGPPLGAPNPSASGPPEDRDLEEELPGEELS

SEQ ID NO: 4664 - DNA, 2122 bp, Homo sapiens
gctctccgcgcgctccctccttccctctccaccctcctcctcccccgccccctcccgccccgcccgcgcgccgcccgctcgcagccactcgcagcccaggctcagtcgcagcccctcggagtccggagcccgccgtccctgcggaccggacagtgcggccggcggccggcggccgggacggagcccccagcccgcgaggagggcgcggcgcaggcggcggcggcgcggcggggaggagcccgggccggaaccagggctgggccgggggcggggacgccggggtccgggagcccgggagccggagcgagctgacgagcgtcgcggaaggaccgggaaggaagagcggagccggagcgagccaagcagcccacaaagtgccatgccccggcggggttgaggcgcgcggcggtcggcccggcgcgctgggaggacgcccgggagctgcgcgacgcggggcggcgcggaagggcagccccggcgggcggcggcgggcccgggctgcgaccggagcgagccccatgccccgcgcgggctgacgggccggagcccgcacggagcggccgggcgggacagaaacactgccacctggaagaacgccgtgcgccacaacctcagcctgcacaagtgcttcgtccgcgtggagaacgtcaagggtgccgtgtggactgtggacgagcgggagtatcagaagcggagaccgccaaagatgacagggagccccaccctggtgaagaacatgatctctggcctcagctatggagcacttaatgccagctaccaggccgccctggccgagagcagcttccccctcctcaacagccctggcatgctgaaccctggctccgccagcagcctgctgcccctcagccacgatgacgtgggtgcccccgtggagccgctgcccagcaacggcagcagcagccctcctcgcctctccccgccccagtacagccaccaggtgcaggtgaaggaggagccagcagaggcagaggaagacaggcagcccgggcctcccctgggcgcccctaaccccagcgcctcggggcctccggaagacagggacctggaggaggagctgccgggagaagaactgtcctaagggcctgtagtgaccggcagggctggggtgagacccctcccttccagaatccaggccccatctcccccaactccacagcccctcccgagcctcaaggcaagtccaggactcagaccggggaggcccgggccagcagctcccagtgtgacctgacaaaaacacgtaggggcagggacggtccccacccccagggacacaacccctggtcttggaccagtagaggacacggagggttcagacccctcctcagaccctccccacatctgaaactgcctccccccaaccaccagcagcagcagggccctcctcccccaccagctctccccacagggcccctcagcatcatggagacccgcaggcggggcttagccacccctcaaacccagggccccctggcacctggctctggccgtgttttctggccagaggcccccactttcctaactcgtgctcccttccgccttcttttccgtactgtgaagaaagaactctccaccccagctcccaccctgccctggcctgggtggaggaactgtgcctccatccccagaagaaacagccccctctgctgctggggtgggactgtctgtgtgccctgtgggggtccgtgtgagcaggcccacctggctccagacccgcccccaacctgagacagaaccaggctgagccaggcctccacccccacccccgtttgctgggggctcctccagccgcccccatgggaagaggcctggtaccgcctcacccacagaggtctgtgccaggtgcgcttctgcaggtggagccaagctctccctgaggccagaggcggggcctgggccgggagcccaggggaaggccaggctggaccccggctccacacccacatccagcctgcaggcctctctgcagtcctctcaccctccctcagctccccttcctctgcagtcaccctcagctccccttccttgcccgcctctccccccgccgccccaccagttaaacggatgaccaaagacctttcttatgccggaagcaaaaacc

SEQ ID NO: 4665 - protein, 130 aa, Homo sapiens [sequence omitted]

SEQ ID NO: 4666 - DNA, 1478 bp, Homo sapiens
gctctccgcgcgctccctccttccctctccaccctcctcctcccccgccccctcccgccccgcccgcgcgccgcccgctcgcagccactcgcagcccaggctcagtcgcagcccctcggagtccggagcccgccgtccctgcggaccggacagtgcggccggcggccggcggccgggacggagcccccagcccgcgaggagggcgcggcgcaggcggcggcggcgcggcggggaggagcccgggccggaaccagggctgggccgggggcggggacgccggggtccgggagcccgggagccggagcgagctgacgagcgtcgcggaaggaccgggaaggaagagcggagccggagcgagccaagcagcccacaaagtgccatgccccggcggggttgaggcgcgcggcggtcggcccggcgcgctgggaggacgcccgggagctgcgcgacgcggggcggcgcggaagggcagccccggcgggcggcggcgggcccgggctgcgaccggagcgagccccatgccccgcgcgggctgacgggccggagcccgcacggagcggccgggcgggacaggtaccgctagagcgacatgatggcggggcctgggccgggagcccaggggaaggccaggctggaccccggctccacacccacatccagcctgcaggcctctctgcagtcctctcaccctccctcagctccccttcctctgcagtcaccctcagctccccttccttgcccgcctctccccccgccgccccaccagttaaacggatgaccaaagacctttcttatgccggaagcaaaaaccaaaactttttgttggctttttcctttgtcgcctccccagcacctgccctcccagtctcccaccccggccccaggctggaagccctccctccacttaagttattgttttaaaccaaagtttacagtgtctgttggtggccaagaccttctctctccacccctcctccatccaccctgaggaccctggggctcagtggaggcagggccctgcccccctcccttccgctcctgcccagcctgggggaaggagaaaggaggggagaaagcgggctctcaccccctcaggagtgggcacgggagcccttctccctgaccctgggctgcttcctgggggctctccagacccctctctaggaccaagtcacccgtcgtgctgggagtgtggattctagcaaaagagctggaaaaaagtcagactctccacagaccccctatgggggacccccaactcaaggccaaggactgggcgtatcggatgctcataacacccctggcctggcccctttactgagaagactccttggatatttcccaagaaccccccacatacacccctcacaagccacccctcctgagaggcagggggccctccgccccctccccatgtattccccacctgtgttccgtttgaccagcacagaaatattaaacgtcctctattcaccggg

SEQ ID NO: 4667 - protein, 62 aa, Homo sapiens [sequence omitted]

SEQ ID NO: 4668 - DNA, 2789 bp, Homo sapiens
gctctccgcgcgctccctccttccctctccaccctcctcctcccccgccccctcccgccccgcccgcgcgccgcccgctcgcagccactcgcagcccaggctcagtcgcagcccctcggagtccggagcccgccgtccctgcggaccggacagtgcggccggcggccggcggccgggacggagcccccagcccgcgaggagggcgcggcgcaggcggcggcggcgcggcggggaggagcccgggccggaaccagggctgggccgggggcggggacgccggggtccgggagcccgggagccggagcgagctgacgagcgtcgcggaaggaccgggaaggaagagcggagccggagcgagccaagcagcccacaaagtgccatgccccggcggggttgaggcgcgcggcggtcggcccggcgcgctgggaggacgcccgggagctgcgcgacgcggggcggcgcggaagggcagccccggcgggcggcggcgggcccgggctgcgaccggagcgagccccatgccccgcgcgggctgacgggccggagcccgcacggagcggccgggcgggacagaaacactgccacctggaagaacgccgtgcgccacaacctcagcctgcacaagtgcttcgtccgcgtggagaacgtcaagggtgccgtgtggactgtggacgagcgggagtatcagaagcggagaccgccaaagatgacagggagccccaccctggtgaagaacatgatctctggcctcagctatggagcacttaatgccagctaccaggccgccctggccgagagcagcttccccctcctcaacagccctggcatgctgaaccctggctccgccagcagcctgctgcccctcagccacgatgacgtgggtgcccccgtggagccgctgcccagcaacggcagcagcagccctcctcgcctctccccgccccagtacagccaccaggtgcaggtgaaggaggagccagcagaggcagaggaagacaggcagcccgggcctcccctgggcgcccctaaccccagcgcctcggggcctccggaagacagggacctggaggaggagctgccgggagaagaactgtcctaagggcctgtagtgaccggcagggctggggtgagacccctcccttccagaatccaggccccatctcccccaactccacagcccctcccgagcctcaaggcaagtccaggactcagaccggggaggcccgggccagcagctcccagtgtgacctgacaaaaacacgtaggggcagggacggtccccacccccagggacacaacccctggtcttggaccagtagaggacacggagggttcagacccctcctcagaccctccccacatctgaaactgcctccccccaaccaccagcagcagcagggccctcctcccccaccagctctccccacagggcccctcagcatcatggagacccgcaggcggggcttagccacccctcaaacccagggccccctggcacctggctctggccgtgttttctggccagaggcccccactttcctaactcgtgctcccttccgccttcttttccgtactgtgaagaaagaactctccaccccagctcccaccctgccctggcctgggtggaggaactgtgcctccatccccagaagaaacagccccctctgctgctggggtgggactgtctgtgtgccctgtgggggtccgtgtgagcaggcccacctggctccagacccgcccccaacctgagacagaaccaggctgagccaggcctccacccccacccccgtttgctgggggctcctccagccgcccccatgggaagaggcctggtaccgcctcacccacagaggtctgtgccaggtgcgcttctgcaggtggagccaagctctccctgaggccagaggcggggcctgggccgggagcccaggggaaggccaggctggaccccggctccacacccacatccagcctgcaggcctctctgcagtcctctcaccctccctcagctccccttcctctgcagtcaccctcagctccccttccttgcccgcctctccccccgccgccccaccagttaaacggatgaccaaagacctttcttatgccggaagcaaaaaccaaaactttttgttggctttttcctttgtcgcctccccagcacctgccctcccagtctcccaccccggccccaggctggaagccctccctccacttaagttattgttttaaaccaaagtttacagtgtctgttggtggccaagaccttctctctccacccctcctccatccaccctgaggaccctggggctcagtggaggcagggccctgcccccctcccttccgctcctgcccagcctgggggaaggagaaaggaggggagaaagcgggctctcaccccctcaggagtgggcacgggagcccttctccctgaccctgggctgcttcctgggggctctccagacccctctctaggaccaagtcacccgtcgtgctgggagtgtggattctagcaaaagagctggaaaaaagtcagactctccacagaccccctatgggggacccccaactcaaggccaaggactgggcgtatcggatgctcataacacccctggcctggcccctttactgagaagactccttggatatttcccaagaaccccccacatacacccctcacaagccacccctcctgagaggcagggggccctccgccccctccccatgtattccccacctgtgttccgtttgaccagcacagaaatattaaacgtcctctattcaccggg

SEQ ID NO: 4669 - protein, 130 aa, Homo sapiens [sequence omitted]

SEQ ID NO: 4670 - DNA, 4283 bp, Homo sapiens
gctctccgcgcgctccctccttccctctccaccctcctcctcccccgccccctcccgccccgcccgcgcgccgcccgctcgcagccactcgcagcccaggctcagtcgcagcccctcggagtccggagcccgccgtccctgcggaccggacagtgcggccggcggccggcggccgggacggagcccccagcccgcgaggagggcgcggcgcaggcggcggcggcgcggcggggaggagcccgggccggaaccagggctgggccgggggcggggacgccggggtccgggagcccgggagccggagcgagctgacgagcgtcgcggaaggaccgggaaggaagagcggagccggagcgagccaagcagcccacaaagtgccatgccccggcggggttgaggcgcgcggcggtcggcccggcgcgctgggaggacgcccgggagctgcgcgacgcggggcggcgcggaagggcagccccggcgggcggcggcgggcccgggctgcgaccggagcgagccccatgccccgcgcgggctgacgggccggagcccgcacggagcggccgggcgggacaggtaccgctagagcgacatgatggtggaatctgcctcggagacaatcaggtcggctccatctggtcagaatggcgtgggcagcctctctgggcaagccgatggcagcagcggcggggccacagggacaactgcaagtggcacgggcagggaagtgaccacgggtgcagacagcaatggtgagatgagtcccgcagagctgctgcacttccagcagcaacaggctctccaagtggcccggcagttcctgctgcagcaggcctcaggcctgagctccccagggaacaatgacagcaaacagtctgcctctgctgtgcaggtgcctgtgtcggtggccatgatgtcgccgcagatgcttaccccgcaacagatgcagcagatcctgtcgcccccgcagctgcaggccttgctccagcagcagcaagccctcatgctccagcagctacaggagtactacaagaagcagcaggagcagctccacctgcagctcctcacccagcagcaggctgggaaaccgcagcccaaagaggcactggggaacaagcagctggccttccagcagcagctcctgcaaatgcaacagttgcagcagcagcacctgctcaacctgcagaggcaggggctggtcagcctgcagcccaaccaagcctcggggcccctccagacccttccgcaagctgtttgcccaacagacctgccccagctgtggaagggcgagggtgcccccgggcagcctgccgaggacagcgtcaagcaggaggggctggacctcactggcacggccgccaccgctacctcgtttgccgctccccccaaggtctcaccccccctctcccaccataccctgcccaacggacagcctactgtgctcacatctcggagagacagctcttcccacgaggagacccccggctcccaccccctgtacggacacggagagtgcaagtggccaggctgtgagaccctgtgtgaagacctgggccagtttatcaaacacctcaacacagagcacgccctggatgaccggagtacagcccagtgccgggtacagatgcaggtggtgcagcagctggagatccagctcgccaaggagagcgagcggctgcaggccatgatggcccacctgcacatgcggccctcggagcccaagcccttcagccagccagtgaccgtctctgcagcagactcattcccagatggtctcgtgcaccccccgacctcggccgcagcccctgtcacccctctacggccccctggcctgggctctgcctccctgcatggtgggggcccagcccgtcggagaagcagtgacaagttctgctcccccatctcctcagagctggcccagaatcatgagttctacaagaacgccgacgtccggccccccttcacctacgcctccctcatccgccaggccatcctggaaacccctgacaggcagctgaccctgaatgagatctataactggttcaccaggatgttcgcctatttccgcagaaacactgccacctggaagaacgccgtgcgccacaacctcagcctgcacaagtgcttcgtccgcgtggagaacgtcaagggtgccgtgtggactgtggacgagcgggagtatcagaagcggagaccgccaaagatgacagggagccccaccctggtgaagaacatgatctctggcctcagctatggagcacttaatgccagctaccaggccgccctggccgagagcagcttccccctcctcaacagccctggcatgctgaaccctggctccgccagcagcctgctgcccctcagccacgatgacgtgggtgcccccgtggagccgctgcccagcaacggcagcagcagccctcctcgcctctccccgccccagtacagccaccaggtgcaggtgaaggaggagccagcagaggcagaggaagacaggcagcccgggcctcccctgggcgcccctaaccccagcgcctcggggcctccggaagacagggacctggaggaggagctgccgggagaagaactgtcctaagggcctgtagtgaccggcagggctggggtgagacccctcccttccagaatccaggccccatctcccccaactccacagcccctcccgagcctcaaggcaagtccaggactcagaccggggaggcccgggccagcagctcccagtgtgacctgacaaaaacacgtaggggcagggacggtccccacccccagggacacaacccctggtcttggaccagtagaggacacggagggttcagacccctcctcagaccctccccacatctgaaactgcctccccccaaccaccagcagcagcagggccctcctcccccaccagctctccccacagggcccctcagcatcatggagacccgcaggcggggcttagccacccctcaaacccagggccccctggcacctggctctggccgtgttttctggccagaggcccccactttcctaactcgtgctcccttccgccttcttttccgtactgtgaagaaagaactctccaccccagctcccaccctgccctggcctgggtggaggaactgtgcctccatccccagaagaaacagccccctctgctgctggggtgggactgtctgtgtgccctgtgggggtccgtgtgagcaggcccacctggctccagacccgcccccaacctgagacagaaccaggctgagccaggcctccacccccacccccgtttgctgggggctcctccagccgcccccatgggaagaggcctggtaccgcctcacccacagaggtctgtgccaggtgcgcttctgcaggtggagccaagctctccctgaggccagaggcggggcctgggccgggagcccaggggaaggccaggctggaccccggctccacacccacatccagcctgcaggcctctctgcagtcctctcaccctccctcagctccccttcctctgcagtcaccctcagctccccttccttgcccgcctctccccccgccgccccaccagttaaacggatgaccaaagacctttcttatgccggaagcaaaaaccaaaactttttgttggctttttcctttgtcgcctccccagcacctgccctcccagtctcccaccccggccccaggctggaagccctccctccacttaagttattgttttaaaccaaagtttacagtgtctgttggtggccaagaccttctctctccacccctcctccatccaccctgaggaccctggggctcagtggaggcagggccctgcccccctcccttccgctcctgcccagcctgggggaaggagaaaggaggggagaaagcgggctctcaccccctcaggagtgggcacgggagcccttctccctgaccctgggctgcttcctgggggctctccagacccctctctaggaccaagtcacccgtcgtgctgggagtgtggattctagcaaaagagctggaaaaaagtcagactctccacagaccccctatgggggacccccaactcaaggccaaggactgggcgtatcggatgctcataacacccctggcctggcccctttactgagaagactccttggatatttcccaagaaccccccacatacacccctcacaagccacccctcctgagaggcagggggccctccgccccctccccatgtattccccacctgtgttccgtttgaccagcacagaaatattaaacgtcctctattcaccggg

SEQ ID NO: 4671 - protein, 667 aa, Homo sapiens; identical to SEQ ID NO: 590

SEQ ID NO: 4672 - DNA, 2493 bp, Homo sapiens
gctctccgcgcgctccctccttccctctccaccctcctcctcccccgccccctcccgccccgcccgcgcgccgcccgctcgcagccactcgcagcccaggctcagtcgcagcccctcggagtccggagcccgccgtccctgcggaccggacagtgcggccggcggccggcggccgggacggagcccccagcccgcgaggagggcgcggcgcaggcggcggcggcgcggcggggaggagcccgggccggaaccagggctgggccgggggcggggacgccggggtccgggagcccgggagccggagcgagctgacgagcgtcgcggaaggaccgggaaggaagagcggagccggagcgagccaagcagcccacaaagtgccatgccccggcggggttgaggcgcgcggcggtcggcccggcgcgctgggaggacgcccgggagctgcgcgacgcggggcggcgcggaagggcagccccggcgggcggcggcgggcccgggctgcgaccggagcgagccccatgccccgcgcgggctgacgggccggagcccgcacggagcggccgggcgggacaggtaccgctagagcgacatgatggcggggcctgggccgggagcccaggggaaggccaggctggaccccggctccacacccacatccagcctgcaggcctctctgcagtcctctcaccctccctcagctccccttcctctgcagtcaccctcagctccccttccttgcccgcctctccccccgccgccccaccagttaaacggatgaccaaagacctttcttatgccggaagcaaaaaccaaaactttttgttggctttttcctttgtcgcctccccagcacctgccctcccagtctcccaccccggccccaggctggaagccctccctccacttaagttattgttttaaaccaaagtttacagtgtctgttggtggccaagaccttctctctccacccctcctccatccaccctgaggaccctggggctcagtggaggcagggccctgcccccctcccttccgctcctgcccagcctgggggaaggagaaaggaggggagaaagcgggctctcaccccctcaggagtgggcacgggagcccttctccctgaccctgggctgcttcctgggggctctccagacccctctctaggaccaagtcacccgtcgtgctgggagtgtggattctagcaaaagagctggaaaaaagtcagactctccacagaccccctatgggggacccccaactcaaggccaaggactgggcgtatcggatgctcataacacccctggcctggcccctttactgagaagactccttggatatttcccaagaaccccccacatacacccctcacaagccacccctcctgagaggcagggggccctccgccccctccccatgtattccccacctgtgttccgtttgaccagcacagaaatattaaacgtcctctattcaccgggccctgtgtgtgtcaccgaggtgcgggaggggaggagcattaaagctgaaagatcgctctgctcggggagcctgggcagagcagcagcaacgtgagggtcgctgtggtggtggtttctgtgagtggatggaatgagcagccctgcaggggcgctgggcatgtgccctcactgtggacagggcccacccacctccggttcccctgtgcctcctgtcccttccacgcttaaacagggttctctgtcattttcctgttttcttccagagtcccaatcctttgccctagttctttcactagtttgaaatccaagttcttgccagagtgttggagcaaggcagctgatttgctgcagggatggagaggaccaccgccgcagggttcttttacctgtgccaccagctctggagacatccacacccattcccaggtgtccttccaggcccattgtccacgtcttcaagggggctgcctggataggcgtgtgtgtgtgtagtgcccaggtgtggtggtggcatcctgaagcagtaggaccattagtgtgcgtgcacacccacgtggcacactgtgtggtgaccatggtcatcatagtgggctcacggcggaaacgggatcattcaacctatacaaaggggaccctggataggctgcaaggaaagaggccaagggccaagctgctaagccaaagatggcccctgacacctcccccagccccagcacaccagcctgcacctcttatcccgtgttaagtcctggttccccacctgctgcccctcctcaacacagagcccctcccgccgcctcagacccctgtgcacatccccagggcctcagccgtctcattggtctttattttttattttttttaagatggagtttcgctcttattgcccagactggagtgcagtgatgctatctcggctcactgcaacctttgcctcccaggttcaagtgattctcctgcctcagcctcccaagtagctgggattacaggcgtgcaccaccacgccgggctaaat

SEQ ID NO: 4673 - protein, 62 aa, Homo sapiens [sequence omitted]

SEQ ID NO: 4674 - DNA, 3804 bp, Homo sapiens
gctctccgcgcgctccctccttccctctccaccctcctcctcccccgccccctcccgccccgcccgcgcgccgcccgctcgcagccactcgcagcccaggctcagtcgcagcccctcggagtccggagcccgccgtccctgcggaccggacagtgcggccggcggccggcggccgggacggagcccccagcccgcgaggagggcgcggcgcaggcggcggcggcgcggcggggaggagcccgggccggaaccagggctgggccgggggcggggacgccggggtccgggagcccgggagccggagcgagctgacgagcgtcgcggaaggaccgggaaggaagagcggagccggagcgagccaagcagcccacaaagtgccatgccccggcggggttgaggcgcgcggcggtcggcccggcgcgctgggaggacgcccgggagctgcgcgacgcggggcggcgcggaagggcagccccggcgggcggcggcgggcccgggctgcgaccggagcgagccccatgccccgcgcgggctgacgggccggagcccgcacggagcggccgggcgggacagaaacactgccacctggaagaacgccgtgcgccacaacctcagcctgcacaagtgcttcgtccgcgtggagaacgtcaagggtgccgtgtggactgtggacgagcgggagtatcagaagcggagaccgccaaagatgacagggagccccaccctggtgaagaacatgatctctggcctcagctatggagcacttaatgccagctaccaggccgccctggccgagagcagcttccccctcctcaacagccctggcatgctgaaccctggctccgccagcagcctgctgcccctcagccacgatgacgtgggtgcccccgtggagccgctgcccagcaacggcagcagcagccctcctcgcctctccccgccccagtacagccaccaggtgcaggtgaaggaggagccagcagaggcagaggaagacaggcagcccgggcctcccctgggcgcccctaaccccagcgcctcggggcctccggaagacagggacctggaggaggagctgccgggagaagaactgtcctaagggcctgtagtgaccggcagggctggggtgagacccctcccttccagaatccaggccccatctcccccaactccacagcccctcccgagcctcaaggcaagtccaggactcagaccggggaggcccgggccagcagctcccagtgtgacctgacaaaaacacgtaggggcagggacggtccccacccccagggacacaacccctggtcttggaccagtagaggacacggagggttcagacccctcctcagaccctccccacatctgaaactgcctccccccaaccaccagcagcagcagggccctcctcccccaccagctctccccacagggcccctcagcatcatggagacccgcaggcggggcttagccacccctcaaacccagggccccctggcacctggctctggccgtgttttctggccagaggcccccactttcctaactcgtgctcccttccgccttcttttccgtactgtgaagaaagaactctccaccccagctcccaccctgccctggcctgggtggaggaactgtgcctccatccccagaagaaacagccccctctgctgctggggtgggactgtctgtgtgccctgtgggggtccgtgtgagcaggcccacctggctccagacccgcccccaacctgagacagaaccaggctgagccaggcctccacccccacccccgtttgctgggggctcctccagccgcccccatgggaagaggcctggtaccgcctcacccacagaggtctgtgccaggtgcgcttctgcaggtggagccaagctctccctgaggccagaggcggggcctgggccgggagcccaggggaaggccaggctggaccccggctccacacccacatccagcctgcaggcctctctgcagtcctctcaccctccctcagctccccttcctctgcagtcaccctcagctccccttccttgcccgcctctccccccgccgccccaccagttaaacggatgaccaaagacctttcttatgccggaagcaaaaaccaaaactttttgttggctttttcctttgtcgcctccccagcacctgccctcccagtctcccaccccggccccaggctggaagccctccctccacttaagttattgttttaaaccaaagtttacagtgtctgttggtggccaagaccttctctctccacccctcctccatccaccctgaggaccctggggctcagtggaggcagggccctgcccccctcccttccgctcctgcccagcctgggggaaggagaaaggaggggagaaagcgggctctcaccccctcaggagtgggcacgggagcccttctccctgaccctgggctgcttcctgggggctctccagacccctctctaggaccaagtcacccgtcgtgctgggagtgtggattctagcaaaagagctggaaaaaagtcagactctccacagaccccctatgggggacccccaactcaaggccaaggactgggcgtatcggatgctcataacacccctggcctggcccctttactgagaagactccttggatatttcccaagaaccccccacatacacccctcacaagccacccctcctgagaggcagggggccctccgccccctccccatgtattccccacctgtgttccgtttgaccagcacagaaatattaaacgtcctctattcaccgggccctgtgtgtgtcaccgaggtgcgggaggggaggagcattaaagctgaaagatcgctctgctcggggagcctgggcagagcagcagcaacgtgagggtcgctgtggtggtggtttctgtgagtggatggaatgagcagccctgcaggggcgctgggcatgtgccctcactgtggacagggcccacccacctccggttcccctgtgcctcctgtcccttccacgcttaaacagggttctctgtcattttcctgttttcttccagagtcccaatcctttgccctagttctttcactagtttgaaatccaagttcttgccagagtgttggagcaaggcagctgatttgctgcagggatggagaggaccaccgccgcagggttcttttacctgtgccaccagctctggagacatccacacccattcccaggtgtccttccaggcccattgtccacgtcttcaagggggctgcctggataggcgtgtgtgtgtgtagtgcccaggtgtggtggtggcatcctgaagcagtaggaccattagtgtgcgtgcacacccacgtggcacactgtgtggtgaccatggtcatcatagtgggctcacggcggaaacgggatcattcaacctatacaaaggggaccctggataggctgcaaggaaagaggccaagggccaagctgctaagccaaagatggcccctgacacctcccccagccccagcacaccagcctgcacctcttatcccgtgttaagtcctggttccccacctgctgcccctcctcaacacagagcccctcccgccgcctcagacccctgtgcacatccccagggcctcagccgtctcattggtctttattttttattttttttaagatggagtttcgctcttattgcccagactggagtgcagtgatgctatctcggctcactgcaacctttgcctcccaggttcaagtgattctcctgcctcagcctcccaagtagctgggattacaggcgtgcaccaccacgccgggctaaat

SEQ ID NO: 4675 - protein, 130 aa, Homo sapiens [sequence omitted]

SEQ ID NO: 4676 - DNA, 6078 bp, Homo sapiens
gctctccgcgcgctccctccttccctctccaccctcctcctcccccgccccctcccgccccgcccgcgcgccgcccgctcgcagccactcgcagcccaggctcagtcgcagcccctcggagtccggagcccgccgtccctgcggaccggacagtgcggccggcggccggcggccgggacggagcccccagcccgcgaggagggcgcggcgcaggcggcggcggcgcggcggggaggagcccgggccggaaccagggctgggccgggggcggggacgccggggtccgggagcccgggagccggagcgagctgacgagcgtcgcggaaggaccgggaaggaagagcggagccggagcgagccaagcagcccacaaagtgccatgccccggcggggttgaggcgcgcggcggtcggcccggcgcgctgggaggacgcccgggagctgcgcgacgcggggcggcgcggaagggcagccccggcgggcggcggcgggcccgggctgcgaccggagcgagccccatgccccgcgcgggctgacgggccggagcccgcacggagcggccgggcgggacaggtaccgctagagcgacatgatggtggaatctgcctcggagacaatcaggtcggctccatctggtcagaatggcgtgggcagcctctctgggcaagccgatggcagcagcggcggggccacagggacaactgcaagtggcacgggcagggaagtgaccacgggtgcagacagcaatggtgagatgagtcccgcagagctgctgcacttccagcagcaacaggctctccaagtggcccggcagttcctgctgcagcaggcctcaggcctgagctccccagggaacaatgacagcaaacagtctgcctctgctgtgcaggtgcctgtgtcggtggccatgatgtcgccgcagatgcttaccccgcaacagatgcagcagatcctgtcgcccccgcagctgcaggccttgctccagcagcagcaagccctcatgctccagcagctacaggagtactacaagaagcagcaggagcagctccacctgcagctcctcacccagcagcaggctgggaaaccgcagcccaaagaggcactggggaacaagcagctggccttccagcagcagctcctgcaaatgcaacagttgcagcagcagcacctgctcaacctgcagaggcaggggctggtcagcctgcagcccaaccaagcctcggggcccctccagacccttccgcaagctgtttgcccaacagacctgccccagctgtggaagggcgagggtgcccccgggcagcctgccgaggacagcgtcaagcaggaggggctggacctcactggcacggccgccaccgctacctcgtttgccgctccccccaaggtctcaccccccctctcccaccataccctgcccaacggacagcctactgtgctcacatctcggagagacagctcttcccacgaggagacccccggctcccaccccctgtacggacacggagagtgcaagtggccaggctgtgagaccctgtgtgaagacctgggccagtttatcaaacacctcaacacagagcacgccctggatgaccggagtacagcccagtgccgggtacagatgcaggtggtgcagcagctggagatccagctcgccaaggagagcgagcggctgcaggccatgatggcccacctgcacatgcggccctcggagcccaagcccttcagccagccactgaacccggtccccggctcctcctcattctccaaggtgaccgtctctgcagcagactcattcccagatggtctcgtgcaccccccgacctcggccgcagcccctgtcacccctctacggccccctggcctgggctctgcctccctgcatggtgggggcccagcccgtcggagaagcagtgacaagttctgctcccccatctcctcagagctggcccagaatcatgagttctacaagaacgccgacgtccggccccccttcacctacgcctccctcatccgccaggccatcctggaaacccctgacaggcagctgaccctgaatgagatctataactggttcaccaggatgttcgcctatttccgcagaaacactgccacctggaagaacgccgtgcgccacaacctcagcctgcacaagtgcttcgtccgcgtggagaacgtcaagggtgccgtgtggactgtggacgagcgggagtatcagaagcggagaccgccaaagatgacagggagccccaccctggtgaagaacatgatctctggcctcagctatggagcacttaatgccagctaccaggccgccctggccgagagcagcttccccctcctcaacagccctggcatgctgaaccctggctccgccagcagcctgctgcccctcagccacgatgacgtgggtgcccccgtggagccgctgcccagcaacggcagcagcagccctcctcgcctctccccgccccagtacagccaccaggtgcaggtgaaggaggagccagcagaggcagaggaagacaggcagcccgggcctcccctgggcgcccctaaccccagcgcctcggggcctccggaagacagggacctggaggaggagctgccgggagaagaactgtcctaagggcctgtagtgaccggcagggctggggtgagacccctcccttccagaatccaggccccatctcccccaactccacagcccctcccgagcctcaaggcaagtccaggactcagaccggggaggcccgggccagcagctcccagtgtgacctgacaaaaacacgtaggggcagggacggtccccacccccagggacacaacccctggtcttggaccagtagaggacacggagggttcagacccctcctcagaccctccccacatctgaaactgcctccccccaaccaccagcagcagcagggccctcctcccccaccagctctccccacagggcccctcagcatcatggagacccgcaggcggggcttagccacccctcaaacccagggccccctggcacctggctctggccgtgttttctggccagaggcccccactttcctaactcgtgctcccttccgccttcttttccgtactgtgaagaaagaactctccaccccagctcccaccctgccctggcctgggtggaggaactgtgcctccatccccagaagaaacagccccctctgctgctggggtgggactgtctgtgtgccctgtgggggtccgtgtgagcaggcccacctggctccagacccgcccccaacctgagacagaaccaggctgagccaggcctccacccccacccccgtttgctgggggctcctccagccgcccccatgggaagaggcctggtaccgcctcacccacagaggtctgtgccaggtgcgcttctgcaggtggagccaagctctccctgaggccagaggcggggcctgggccgggagcccaggggaaggccaggctggaccccggctccacacccacatccagcctgcaggcctctctgcagtcctctcaccctccctcagctccccttcctctgcagtcaccctcagctccccttccttgcccgcctctccccccgccgccccaccagttaaacggatgaccaaagacctttcttatgccggaagcaaaaaccaaaactttttgttggctttttcctttgtcgcctccccagcacctgccctcccagtctcccaccccggccccaggctggaagccctccctccacttaagttattgttttaaaccaaagtttacagtgtctgttggtggccaagaccttctctctccacccctcctccatccaccctgaggaccctggggctcagtggaggcagggccctgcccccctcccttccgctcctgcccagcctgggggaaggagaaaggaggggagaaagcgggctctcaccccctcaggagtgggcacgggagcccttctccctgaccctgggctgcttcctgggggctctccagacccctctctaggaccaagtcacccgtcgtgctgggagtgtggattctagcaaaagagctggaaaaaagtcagactctccacagaccccctatgggggacccccaactcaaggccaaggactgggcgtatcggatgctcataacacccctggcctggcccctttactgagaagactccttggatatttcccaagaaccccccacatacacccctcacaagccacccctcctgagaggcagggggccctccgccccctccccatgtattccccacctgtgttccgtttgaccagcacagaaatattaaacgtcctctattcaccgggccctgtgtgtgtcaccgaggtgcgggaggggaggagcattaaagctgaaagatcgctctgctcggggagcctgggcagagcagcagcaacgtgagggtcgctgtggtggtggtttctgtgagtggatggaatgagcagccctgcaggggcgctgggcatgtgccctcactgtggacagggcccacccacctccggttcccctgtgcctcctgtcccttccacgcttaaacagggttctctgtcattttcctgttttcttccagagtcccaatcctttgccctagttctttcactagtttgaaatccaagttcttgccagagtgttggagcaaggcagctgatttgctgcagggatggagaggaccaccgccgcagggttcttttacctgtgccaccagctctggagacatccacacccattcccaggtgtccttccaggcccattgtccacgtcttcaagggggctgcctggataggcgtgtgtgtgtgtagtgcccaggtgtggtggtggcatcctgaagcagtaggaccattagtgtgcgtgcacacccacgtggcacactgtgtggtgaccatggtcatcatagtgggctcacggcggaaacgggatcattcaacctatacaaaggggaccctggataggctgcaaggaaagaggccaagggccaagctgctaagccaaagatggcccctgacacctcccccagccccagcacaccagcctgcacctcttatcccgtgttaagtcctggttccccacctgctgcccctcctcaacacagagcccctcccgccgcctcagacccctgtgcacatccccagggcctcagccgtctcattggtctttattttttattttttttaagatggagtttcgctcttattgcccagactggagtgcagtgatgctatctcggctcactgcaacctttgcctcccaggttcaagtgattctcctgcctcagcctcccaagtagctgggattacaggcgtgcaccaccacgccgggctaaatttttttgtatttttagtagagacggggtttctctatgttggtcaggctgatctcgaactcccgacctcaggtgatccgccagcctcagcctcccaaagtgctgggattacaggcgtgagccactgcacccggctctcactggtcttacgccaccttctggacactccctccttgagggcagaaaggagtcccaggcctgtccctagggacaaggcccagggaagagtgtatttggggagcaggggaggggagggtgttgagaaagctgaactggagtcaatcacccttcccacaaatcaccaaactgctggaactctccagccaaatgctgggagaaggacctggagggtgagtctttgctgacctctctctactctcaggcatgtcttttgtccttttcgtccatctatttctgtctgtcgctcactcgccccgctttctctgtctcaccttcatccactctgcaggcctgctccaccacagccctaatcctctggacgcttgtgtagggcctggggtgaattccctgtcccccatggtacctcgagaggggctggggagctcagcttggtctcagagtctccccaccagatactgtttaaaaaagtagcactgatgtgttttgtaatctgcccctcccagccctccgtggaggctgccagggccttgtacggtaaacctagctgcatgtaatctgtggacaatggcattctctacaatgcaataaaaacaattacccatgat

SEQ ID NO: 4677 - protein, 679 aa, Homo sapiens; identical to SEQ ID NO: 4663

SEQ ID NO: 4678 - DNA, 6042 bp, Homo sapiens
gctctccgcgcgctccctccttccctctccaccctcctcctcccccgccccctcccgccccgcccgcgcgccgcccgctcgcagccactcgcagcccaggctcagtcgcagcccctcggagtccggagcccgccgtccctgcggaccggacagtgcggccggcggccggcggccgggacggagcccccagcccgcgaggagggcgcggcgcaggcggcggcggcgcggcggggaggagcccgggccggaaccagggctgggccgggggcggggacgccggggtccgggagcccgggagccggagcgagctgacgagcgtcgcggaaggaccgggaaggaagagcggagccggagcgagccaagcagcccacaaagtgccatgccccggcggggttgaggcgcgcggcggtcggcccggcgcgctgggaggacgcccgggagctgcgcgacgcggggcggcgcggaagggcagccccggcgggcggcggcgggcccgggctgcgaccggagcgagccccatgccccgcgcgggctgacgggccggagcccgcacggagcggccgggcgggacaggtaccgctagagcgacatgatggtggaatctgcctcggagacaatcaggtcggctccatctggtcagaatggcgtgggcagcctctctgggcaagccgatggcagcagcggcggggccacagggacaactgcaagtggcacgggcagggaagtgaccacgggtgcagacagcaatggtgagatgagtcccgcagagctgctgcacttccagcagcaacaggctctccaagtggcccggcagttcctgctgcagcaggcctcaggcctgagctccccagggaacaatgacagcaaacagtctgcctctgctgtgcaggtgcctgtgtcggtggccatgatgtcgccgcagatgcttaccccgcaacagatgcagcagatcctgtcgcccccgcagctgcaggccttgctccagcagcagcaagccctcatgctccagcagctacaggagtactacaagaagcagcaggagcagctccacctgcagctcctcacccagcagcaggctgggaaaccgcagcccaaagaggcactggggaacaagcagctggccttccagcagcagctcctgcaaatgcaacagttgcagcagcagcacctgctcaacctgcagaggcaggggctggtcagcctgcagcccaaccaagcctcggggcccctccagacccttccgcaagctgtttgcccaacagacctgccccagctgtggaagggcgagggtgcccccgggcagcctgccgaggacagcgtcaagcaggaggggctggacctcactggcacggccgccaccgctacctcgtttgccgctccccccaaggtctcaccccccctctcccaccataccctgcccaacggacagcctactgtgctcacatctcggagagacagctcttcccacgaggagacccccggctcccaccccctgtacggacacggagagtgcaagtggccaggctgtgagaccctgtgtgaagacctgggccagtttatcaaacacctcaacacagagcacgccctggatgaccggagtacagcccagtgccgggtacagatgcaggtggtgcagcagctggagatccagctcgccaaggagagcgagcggctgcaggccatgatggcccacctgcacatgcggccctcggagcccaagcccttcagccagccagtgaccgtctctgcagcagactcattcccagatggtctcgtgcaccccccgacctcggccgcagcccctgtcacccctctacggccccctggcctgggctctgcctccctgcatggtgggggcccagcccgtcggagaagcagtgacaagttctgctcccccatctcctcagagctggcccagaatcatgagttctacaagaacgccgacgtccggccccccttcacctacgcctccctcatccgccaggccatcctggaaacccctgacaggcagctgaccctgaatgagatctataactggttcaccaggatgttcgcctatttccgcagaaacactgccacctggaagaacgccgtgcgccacaacctcagcctgcacaagtgcttcgtccgcgtggagaacgtcaagggtgccgtgtggactgtggacgagcgggagtatcagaagcggagaccgccaaagatgacagggagccccaccctggtgaagaacatgatctctggcctcagctatggagcacttaatgccagctaccaggccgccctggccgagagcagcttccccctcctcaacagccctggcatgctgaaccctggctccgccagcagcctgctgcccctcagccacgatgacgtgggtgcccccgtggagccgctgcccagcaacggcagcagcagccctcctcgcctctccccgccccagtacagccaccaggtgcaggtgaaggaggagccagcagaggcagaggaagacaggcagcccgggcctcccctgggcgcccctaaccccagcgcctcggggcctccggaagacagggacctggaggaggagctgccgggagaagaactgtcctaagggcctgtagtgaccggcagggctggggtgagacccctcccttccagaatccaggccccatctcccccaactccacagcccctcccgagcctcaaggcaagtccaggactcagaccggggaggcccgggccagcagctcccagtgtgacctgacaaaaacacgtaggggcagggacggtccccacccccagggacacaacccctggtcttggaccagtagaggacacggagggttcagacccctcctcagaccctccccacatctgaaactgcctccccccaaccaccagcagcagcagggccctcctcccccaccagctctccccacagggcccctcagcatcatggagacccgcaggcggggcttagccacccctcaaacccagggccccctggcacctggctctggccgtgttttctggccagaggcccccactttcctaactcgtgctcccttccgccttcttttccgtactgtgaagaaagaactctccaccccagctcccaccctgccctggcctgggtggaggaactgtgcctccatccccagaagaaacagccccctctgctgctggggtgggactgtctgtgtgccctgtgggggtccgtgtgagcaggcccacctggctccagacccgcccccaacctgagacagaaccaggctgagccaggcctccacccccacccccgtttgctgggggctcctccagccgcccccatgggaagaggcctggtaccgcctcacccacagaggtctgtgccaggtgcgcttctgcaggtggagccaagctctccctgaggccagaggcggggcctgggccgggagcccaggggaaggccaggctggaccccggctccacacccacatccagcctgcaggcctctctgcagtcctctcaccctccctcagctccccttcctctgcagtcaccctcagctccccttccttgcccgcctctccccccgccgccccaccagttaaacggatgaccaaagacctttcttatgccggaagcaaaaaccaaaactttttgttggctttttcctttgtcgcctccccagcacctgccctcccagtctcccaccccggccccaggctggaagccctccctccacttaagttattgttttaaaccaaagtttacagtgtctgttggtggccaagaccttctctctccacccctcctccatccaccctgaggaccctggggctcagtggaggcagggccctgcccccctcccttccgctcctgcccagcctgggggaaggagaaaggaggggagaaagcgggctctcaccccctcaggagtgggcacgggagcccttctccctgaccctgggctgcttcctgggggctctccagacccctctctaggaccaagtcacccgtcgtgctgggagtgtggattctagcaaaagagctggaaaaaagtcagactctccacagaccccctatgggggacccccaactcaaggccaaggactgggcgtatcggatgctcataacacccctggcctggcccctttactgagaagactccttggatatttcccaagaaccccccacatacacccctcacaagccacccctcctgagaggcagggggccctccgccccctccccatgtattccccacctgtgttccgtttgaccagcacagaaatattaaacgtcctctattcaccgggccctgtgtgtgtcaccgaggtgcgggaggggaggagcattaaagctgaaagatcgctctgctcggggagcctgggcagagcagcagcaacgtgagggtcgctgtggtggtggtttctgtgagtggatggaatgagcagccctgcaggggcgctgggcatgtgccctcactgtggacagggcccacccacctccggttcccctgtgcctcctgtcccttccacgcttaaacagggttctctgtcattttcctgttttcttccagagtcccaatcctttgccctagttctttcactagtttgaaatccaagttcttgccagagtgttggagcaaggcagctgatttgctgcagggatggagaggaccaccgccgcagggttcttttacctgtgccaccagctctggagacatccacacccattcccaggtgtccttccaggcccattgtccacgtcttcaagggggctgcctggataggcgtgtgtgtgtgtagtgcccaggtgtggtggtggcatcctgaagcagtaggaccattagtgtgcgtgcacacccacgtggcacactgtgtggtgaccatggtcatcatagtgggctcacggcggaaacgggatcattcaacctatacaaaggggaccctggataggctgcaaggaaagaggccaagggccaagctgctaagccaaagatggcccctgacacctcccccagccccagcacaccagcctgcacctcttatcccgtgttaagtcctggttccccacctgctgcccctcctcaacacagagcccctcccgccgcctcagacccctgtgcacatccccagggcctcagccgtctcattggtctttattttttattttttttaagatggagtttcgctcttattgcccagactggagtgcagtgatgctatctcggctcactgcaacctttgcctcccaggttcaagtgattctcctgcctcagcctcccaagtagctgggattacaggcgtgcaccaccacgccgggctaaatttttttgtatttttagtagagacggggtttctctatgttggtcaggctgatctcgaactcccgacctcaggtgatccgccagcctcagcctcccaaagtgctgggattacaggcgtgagccactgcacccggctctcactggtcttacgccaccttctggacactccctccttgagggcagaaaggagtcccaggcctgtccctagggacaaggcccagggaagagtgtatttggggagcaggggaggggagggtgttgagaaagctgaactggagtcaatcacccttcccacaaatcaccaaactgctggaactctccagccaaatgctgggagaaggacctggagggtgagtctttgctgacctctctctactctcaggcatgtcttttgtccttttcgtccatctatttctgtctgtcgctcactcgccccgctttctctgtctcaccttcatccactctgcaggcctgctccaccacagccctaatcctctggacgcttgtgtagggcctggggtgaattccctgtcccccatggtacctcgagaggggctggggagctcagcttggtctcagagtctccccaccagatactgtttaaaaaagtagcactgatgtgttttgtaatctgcccctcccagccctccgtggaggctgccagggccttgtacggtaaacctagctgcatgtaatctgtggacaatggcattctctacaatgcaataaaaacaattacccatgat

SEQ ID NO: 4679 - protein, 667 aa, Homo sapiens; identical to SEQ ID NO: 590

SEQ ID NO: 4680 - DNA, 867 bp, Homo sapiens
agcgtcaagcaggaggggctggacctcactggcacggccgccaccgctacctcgtttgccgctccccccaaggtctcaccccccctctcccaccataccctgcccaacggacagcctactgtgctcacatctcggagagacagggccctcctcccccaccagctctccccacagggcccctcagcatcatggagacccgcaggcggggcttagccacccctcaaacccagggccccctggcacctggctctggccgtgttttctggccagaggcccccactttcctaactcgtgctcccttccgccttcttttccgtactgtgaagaaagaactctccaccccagctcccaccctgccctggcctgggtggaggaactgtgcctccatccccagaagaaacagccccctctgctgctggggtgggactgtctgtgtgccctgtgggggtccgtgtgagcaggcccacctggctccagacccgcccccaacctgagacagaaccaggctgagccaggcctccacccccacccccgtttgctgggggctcctccagccgcccccatgggaagaggcctggtaccgcctcacccacagaggtctgtgccaggtgcgcttctgcaggtggagccaagctctccctgaggccagaggcggggcctgggccgggagcccaggggaaggccaggctggaccccggctccacacccacatccagcctgcaggcctctctgcagtcctctcaccctccctcagctccccttcctctgcagtcaccctcagctccccttccttgcccgcctctccccccgccgccccaccagttaaacggatgaccaaagacctttcttatgccggaagcaaaaacc

SEQ ID NO: 4681 - protein, 101 aa, Homo sapiens
METRRRGLATPQTQGPLAPGSGRVFWPEAPTFLTRAPFRLLFRTVKKELSTPAPTLPWPGWRNCASIPRRNSPLCCWGGTVCVPCGGPCEQAHLAPDPPPT

SEQ ID NO: 4682 - DNA, 1534 bp, Homo sapiens
agcgtcaagcaggaggggctggacctcactggcacggccgccaccgctacctcgtttgccgctccccccaaggtctcaccccccctctcccaccataccctgcccaacggacagcctactgtgctcacatctcggagagacagggccctcctcccccaccagctctccccacagggcccctcagcatcatggagacccgcaggcggggcttagccacccctcaaacccagggccccctggcacctggctctggccgtgttttctggccagaggcccccactttcctaactcgtgctcccttccgccttcttttccgtactgtgaagaaagaactctccaccccagctcccaccctgccctggcctgggtggaggaactgtgcctccatccccagaagaaacagccccctctgctgctggggtgggactgtctgtgtgccctgtgggggtccgtgtgagcaggcccacctggctccagacccgcccccaacctgagacagaaccaggctgagccaggcctccacccccacccccgtttgctgggggctcctccagccgcccccatgggaagaggcctggtaccgcctcacccacagaggtctgtgccaggtgcgcttctgcaggtggagccaagctctccctgaggccagaggcggggcctgggccgggagcccaggggaaggccaggctggaccccggctccacacccacatccagcctgcaggcctctctgcagtcctctcaccctccctcagctccccttcctctgcagtcaccctcagctccccttccttgcccgcctctccccccgccgccccaccagttaaacggatgaccaaagacctttcttatgccggaagcaaaaaccaaaactttttgttggctttttcctttgtcgcctccccagcacctgccctcccagtctcccaccccggccccaggctggaagccctccctccacttaagttattgttttaaaccaaagtttacagtgtctgttggtggccaagaccttctctctccacccctcctccatccaccctgaggaccctggggctcagtggaggcagggccctgcccccctcccttccgctcctgcccagcctgggggaaggagaaaggaggggagaaagcgggctctcaccccctcaggagtgggcacgggagcccttctccctgaccctgggctgcttcctgggggctctccagacccctctctaggaccaagtcacccgtcgtgctgggagtgtggattctagcaaaagagctggaaaaaagtcagactctccacagaccccctatgggggacccccaactcaaggccaaggactgggcgtatcggatgctcataacacccctggcctggcccctttactgagaagactccttggatatttcccaagaaccccccacatacacccctcacaagccacccctcctgagaggcagggggccctccgccccctccccatgtattccccacctgtgttccgtttgaccagcacagaaatattaaacgtcctctattcaccggg

SEQ ID NO: 4683 - protein, 101 aa, Homo sapiens; identical to SEQ ID NO: 4681

SEQ ID NO: 4684 - DNA, 2549 bp, Homo sapiens
agcgtcaagcaggaggggctggacctcactggcacggccgccaccgctacctcgtttgccgctccccccaaggtctcaccccccctctcccaccataccctgcccaacggacagcctactgtgctcacatctcggagagacagggccctcctcccccaccagctctccccacagggcccctcagcatcatggagacccgcaggcggggcttagccacccctcaaacccagggccccctggcacctggctctggccgtgttttctggccagaggcccccactttcctaactcgtgctcccttccgccttcttttccgtactgtgaagaaagaactctccaccccagctcccaccctgccctggcctgggtggaggaactgtgcctccatccccagaagaaacagccccctctgctgctggggtgggactgtctgtgtgccctgtgggggtccgtgtgagcaggcccacctggctccagacccgcccccaacctgagacagaaccaggctgagccaggcctccacccccacccccgtttgctgggggctcctccagccgcccccatgggaagaggcctggtaccgcctcacccacagaggtctgtgccaggtgcgcttctgcaggtggagccaagctctccctgaggccagaggcggggcctgggccgggagcccaggggaaggccaggctggaccccggctccacacccacatccagcctgcaggcctctctgcagtcctctcaccctccctcagctccccttcctctgcagtcaccctcagctccccttccttgcccgcctctccccccgccgccccaccagttaaacggatgaccaaagacctttcttatgccggaagcaaaaaccaaaactttttgttggctttttcctttgtcgcctccccagcacctgccctcccagtctcccaccccggccccaggctggaagccctccctccacttaagttattgttttaaaccaaagtttacagtgtctgttggtggccaagaccttctctctccacccctcctccatccaccctgaggaccctggggctcagtggaggcagggccctgcccccctcccttccgctcctgcccagcctgggggaaggagaaaggaggggagaaagcgggctctcaccccctcaggagtgggcacgggagcccttctccctgaccctgggctgcttcctgggggctctccagacccctctctaggaccaagtcacccgtcgtgctgggagtgtggattctagcaaaagagctggaaaaaagtcagactctccacagaccccctatgggggacccccaactcaaggccaaggactgggcgtatcggatgctcataacacccctggcctggcccctttactgagaagactccttggatatttcccaagaaccccccacatacacccctcacaagccacccctcctgagaggcagggggccctccgccccctccccatgtattccccacctgtgttccgtttgaccagcacagaaatattaaacgtcctctattcaccgggccctgtgtgtgtcaccgaggtgcgggaggggaggagcattaaagctgaaagatcgctctgctcggggagcctgggcagagcagcagcaacgtgagggtcgctgtggtggtggtttctgtgagtggatggaatgagcagccctgcaggggcgctgggcatgtgccctcactgtggacagggcccacccacctccggttcccctgtgcctcctgtcccttccacgcttaaacagggttctctgtcattttcctgttttcttccagagtcccaatcctttgccctagttctttcactagtttgaaatccaagttcttgccagagtgttggagcaaggcagctgatttgctgcagggatggagaggaccaccgccgcagggttcttttacctgtgccaccagctctggagacatccacacccattcccaggtgtccttccaggcccattgtccacgtcttcaagggggctgcctggataggcgtgtgtgtgtgtagtgcccaggtgtggtggtggcatcctgaagcagtaggaccattagtgtgcgtgcacacccacgtggcacactgtgtggtgaccatggtcatcatagtgggctcacggcggaaacgggatcattcaacctatacaaaggggaccctggataggctgcaaggaaagaggccaagggccaagctgctaagccaaagatggcccctgacacctcccccagccccagcacaccagcctgcacctcttatcccgtgttaagtcctggttccccacctgctgcccctcctcaacacagagcccctcccgccgcctcagacccctgtgcacatccccagggcctcagccgtctcattggtctttattttttattttttttaagatggagtttcgctcttattgcccagactggagtgcagtgatgctatctcggctcactgcaacctttgcctcccaggttcaagtgattctcctgcctcagcctcccaagtagctgggattacaggcgtgcaccaccacgccgggctaaat

SEQ ID NO: 4685 - protein, 101 aa, Homo sapiens; identical to SEQ ID NO: 4681

SEQ ID NO: 4686 - DNA, 1683 bp, Homo sapiens
aaaagtcggctggtagcggggaggatcgcggaggcttggggcagccgggtagctcggaggtcgtggcgctgggggctagcaccagcgctctgtcgggaggcgcagcggttaggtggaccggtcagcggactcaccggccagggcgctcggtgctggaatttgatattcattgatccgggttttatccctcttcttttttcttaaacatttttttttaaaactgtattgtttctcgttttaatttatttttgcttgccattccccacttgaatcgggccgacggcttggggagattgctctacttccccaaatcactgtggattttggaaaccagcagaaagaggaaagaggtagcaagagctccagagagaagtcgaggaagagagagacggggtcagagagagcgcgcgggcgtgcgagcagcgaaagcgacaggggcaaagtgagtgacctgcttttgggggtgaccgccggagcgcggcgtgagccctcccccttgggatcccgcagctgaccagtcgcgctgacggacagacagacagacaccgcccccagccccagctaccacctcctccccggccggcggcggacagtggacgcggcggcgagccgcgggcaggggccggagcccgcgcccggaggcggggtggagggggtcggggctcgcggcgtcgcactgaaacttttcgtccaacttctgggctgttctcgcttcggaggagccgtggtccgcgcgggggaagccgagccgagcggagccgcgagaagtgctagctcgggccgggaggagccgcagccggaggagggggaggaggaagaagagaaggaagaggagagggggccgcagtggcgactcggcgctcggaagccgggctcatggacgggtgaggcggcggtgtgcgcagacagtgctccagccgcgcgcgctccccaggccctggcccgggcctcgggccggggaggaagagtagctcgccgaggcgccgaggagagcgggccgccccacagcccgagccggagagggagcgcgagccgcgccggccccggtcgggcctccgaaaccatgaactttctgctgtcttgggtgcattggagccttgccttgctgctctacctccaccatgccaagtggtcccaggctgcacccatggcagaaggaggagggcagaatcatcacgaagtggtgaagttcatggatgtctatcagcgcagctactgccatccaatcgagaccctggtggacatcttccaggagtaccctgatgagatcgagtacatcttcaagccatcctgtgtgcccctgatgcgatgcgggggctgctgcaatgacgagggcctggagtgtgtgcccactgaggagtccaacatcaccatgcagattatgcggatcaaacctcaccaaggccagcacataggagagatgagcttcctacagcacaacaaatgtgaatgcaggtgaggatgtagtcacggattcattatcagcaagtggctgcagggtgcctgatctgtgccagggttaagcatgctgtactttttggcccccgtccagcttcccgctatgtgacctttggcattttacttcaatgtgcctcagtttctacatctgtaaaatgggcacaatagtagtatacttcatagcattgttataatgattaaacaagttatatatgaaaagattaa

SEQ ID NO: 4687 - protein, 131 aa, Homo sapiens
MNFLLSWVHWSLALLLYLHHAKWSQAAPMAEGGGQNHHEVVKFMDVYQRSYCHPIETLVDIFQEYPDEIEYIFKPSCVPLMRCGGCCNDEGLECVPTEESNITMQIMRIKPHQGQHIGEMSFLQHNKCECR

SEQ ID NO: 4688 - DNA, 2874 bp, Homo sapiens
aaaagtcggctggtagcggggaggatcgcggaggcttggggcagccgggtagctcggaggtcgtggcgctgggggctagcaccagcgctctgtcgggaggcgcagcggttaggtggaccggtcagcggactcaccggccagggcgctcggtgctggaatttgatattcattgatccgggttttatccctcttcttttttcttaaacatttttttttaaaactgtattgtttctcgttttaatttatttttgcttgccattccccacttgaatcgggccgacggcttggggagattgctctacttccccaaatcactgtggattttggaaaccagcagaaagaggaaagaggtagcaagagctccagagagaagtcgaggaagagagagacggggtcagagagagcgcgcgggcgtgcgagcagcgaaagcgacaggggcaaagtgagtgacctgcttttgggggtgaccgccggagcgcggcgtgagccctcccccttgggatcccgcagctgaccagtcgcgctgacggacagacagacagacaccgcccccagccccagctaccacctcctccccggccggcggcggacagtggacgcggcggcgagccgcgggcaggggccggagcccgcgcccggaggcggggtggagggggtcggggctcgcggcgtcgcactgaaacttttcgtccaacttctgggctgttctcgcttcggaggagccgtggtccgcgcgggggaagccgagccgagcggagccgcgagaagtgctagctcgggccgggaggagccgcagccggaggagggggaggaggaagaagagaaggaagaggagagggggccgcagtggcgactcggcgctcggaagccgggctcatggacgggtgaggcggcggtgtgcgcagacagtgctccagccgcgcgcgctccccaggccctggcccgggcctcgggccggggaggaagagtagctcgccgaggcgccgaggagagcgggccgccccacagcccgagccggagagggagcgcgagccgcgccggccccggtcgggcctccgaaaccatgaactttctgctgtcttgggtgcattggagccttgccttgctgctctacctccaccatgccaagtggtcccaggctgcacccatggcagaaggaggagggcagaatcatcacgaagtggtgaagttcatggatgtctatcagcgcagctactgccatccaatcgagaccctggtggacatcttccaggagtaccctgatgagatcgagtacatcttcaagccatcctgtgtgcccctgatgcgatgcgggggctgctgcaatgacgagggcctggagtgtgtgcccactgaggagtccaacatcaccatgcagattatgcggatcaaacctcaccaaggccagcacataggagagatgagcttcctacagcacaacaaatgtgaatgcagaccaaagaaagatagagcaagacaagaaaatccctgtgggccttgctcagagcggagaaagcatttgtttgtacaagatccgcagacgtgtaaatgttcctgcaaaaacacagactcgcgttgcaaggcgaggcagcttgagttaaacgaacgtacttgcagatctctcaccaggaaagactgatacagaacgatcgatacagaaaccacgctgccgccaccacaccatcaccatcgacagaacagtccttaatccagaaacctgaaatgaaggaagaggagactctgcgcagagcactttgggtccggagggcgagactccggcggaagcattcccgggcgggtgacccagcacggtccctcttggaattggattcgccattttatttttcttgctgctaaatcaccgagcccggaagattagagagttttatttctgggattcctgtagacacacccacccacatacatacatttatatatatatatattatatatatataaaaataaatatctctattttatatatataaaatatatatattctttttttaaattaacagtgctaatgttattggtgtcttcactggatgtatttgactgctgtggacttgagttgggaggggaatgttcccactcagatcctgacagggaagaggaggagatgagagactctggcatgatcttttttttgtcccacttggtggggccagggtcctctcccctgcccaggaatgtgcaaggccagggcatgggggcaaatatgacccagttttgggaacaccgacaaacccagccctggcgctgagcctctctaccccaggtcagacggacagaaagacagatcacaggtacagggatgaggacaccggctctgaccaggagtttggggagcttcaggacattgctgtgctttggggattccctccacatgctgcacgcgcatctcgcccccaggggcactgcctggaagattcaggagcctgggcggccttcgcttactctcacctgcttctgagttgcccaggagaccactggcagatgtcccggcgaagagaagagacacattgttggaagaagcagcccatgacagctccccttcctgggactcgccctcatcctcttcctgctccccttcctggggtgcagcctaaaaggacctatgtcctcacaccattgaaaccactagttctgtccccccaggagacctggttgtgtgtgtgtgagtggttgaccttcctccatcccctggtccttcccttcccttcccgaggcacagagagacagggcaggatccacgtgcccattgtggaggcagagaaaagagaaagtgttttatatacggtacttatttaatatccctttttaattagaaattaaaacagttaatttaattaaagagtagggttttttttcagt

SEQ ID NO: 4689 - protein, 191 aa, Homo sapiens
MNFLLSWVHWSLALLLYLHHAKWSQAAPMAEGGGQNHHEVVKFMDVYQRSYCHPIETLVDIFQEYPDEIEYIFKPSCVPLMRCGGCCNDEGLECVPTEESNITMQIMRIKPHQGQHIGEMSFLQHNKCECRPKKDRARQENPCGPCSERRKHLFVQDPQTCKCSCKNTDSRCKARQLELNERTCRSLTRKD

SEQ ID NO: 4690 - DNA, 3012 bp, Homo sapiens
aaaagtcggctggtagcggggaggatcgcggaggcttggggcagccgggtagctcggaggtcgtggcgctgggggctagcaccagcgctctgtcgggaggcgcagcggttaggtggaccggtcagcggactcaccggccagggcgctcggtgctggaatttgatattcattgatccgggttttatccctcttcttttttcttaaacatttttttttaaaactgtattgtttctcgttttaatttatttttgcttgccattccccacttgaatcgggccgacggcttggggagattgctctacttccccaaatcactgtggattttggaaaccagcagaaagaggaaagaggtagcaagagctccagagagaagtcgaggaagagagagacggggtcagagagagcgcgcgggcgtgcgagcagcgaaagcgacaggggcaaagtgagtgacctgcttttgggggtgaccgccggagcgcggcgtgagccctcccccttgggatcccgcagctgaccagtcgcgctgacggacagacagacagacaccgcccccagccccagctaccacctcctccccggccggcggcggacagtggacgcggcggcgagccgcgggcaggggccggagcccgcgcccggaggcggggtggagggggtcggggctcgcggcgtcgcactgaaacttttcgtccaacttctgggctgttctcgcttcggaggagccgtggtccgcgcgggggaagccgagccgagcggagccgcgagaagtgctagctcgggccgggaggagccgcagccggaggagggggaggaggaagaagagaaggaagaggagagggggccgcagtggcgactcggcgctcggaagccgggctcatggacgggtgaggcggcggtgtgcgcagacagtgctccagccgcgcgcgctccccaggccctggcccgggcctcgggccggggaggaagagtagctcgccgaggcgccgaggagagcgggccgccccacagcccgagccggagagggagcgcgagccgcgccggccccggtcgggcctccgaaaccatgaactttctgctgtcttgggtgcattggagccttgccttgctgctctacctccaccatgccaagtggtcccaggctgcacccatggcagaaggaggagggcagaatcatcacgaagtggtgaagttcatggatgtctatcagcgcagctactgccatccaatcgagaccctggtggacatcttccaggagtaccctgatgagatcgagtacatcttcaagccatcctgtgtgcccctgatgcgatgcgggggctgctgcaatgacgagggcctggagtgtgtgcccactgaggagtccaacatcaccatgcagattatgcggatcaaacctcaccaaggccagcacataggagagatgagcttcctacagcacaacaaatgtgaatgcagaccaaagaaagatagagcaagacaagaaaaaaaatcagttcgaggaaagggaaaggggcaaaaacgaaagcgcaagaaatcccggtataagtcctggagcgttccctgtgggccttgctcagagcggagaaagcatttgtttgtacaagatccgcagacgtgtaaatgttcctgcaaaaacacagactcgcgttgcaaggcgaggcagcttgagttaaacgaacgtacttgcagatgtgacaagccgaggcggtgagccgggcaggaggaaggagcctccctcagggtttcgggaaccagatctctcaccaggaaagactgatacagaacgatcgatacagaaaccacgctgccgccaccacaccatcaccatcgacagaacagtccttaatccagaaacctgaaatgaaggaagaggagactctgcgcagagcactttgggtccggagggcgagactccggcggaagcattcccgggcgggtgacccagcacggtccctcttggaattggattcgccattttatttttcttgctgctaaatcaccgagcccggaagattagagagttttatttctgggattcctgtagacacacccacccacatacatacatttatatatatatatattatatatatataaaaataaatatctctattttatatatataaaatatatatattctttttttaaattaacagtgctaatgttattggtgtcttcactggatgtatttgactgctgtggacttgagttgggaggggaatgttcccactcagatcctgacagggaagaggaggagatgagagactctggcatgatcttttttttgtcccacttggtggggccagggtcctctcccctgcccaggaatgtgcaaggccagggcatgggggcaaatatgacccagttttgggaacaccgacaaacccagccctggcgctgagcctctctaccccaggtcagacggacagaaagacagatcacaggtacagggatgaggacaccggctctgaccaggagtttggggagcttcaggacattgctgtgctttggggattccctccacatgctgcacgcgcatctcgcccccaggggcactgcctggaagattcaggagcctgggcggccttcgcttactctcacctgcttctgagttgcccaggagaccactggcagatgtcccggcgaagagaagagacacattgttggaagaagcagcccatgacagctccccttcctgggactcgccctcatcctcttcctgctccccttcctggggtgcagcctaaaaggacctatgtcctcacaccattgaaaccactagttctgtccccccaggagacctggttgtgtgtgtgtgagtggttgaccttcctccatcccctggtccttcccttcccttcccgaggcacagagagacagggcaggatccacgtgcccattgtggaggcagagaaaagagaaagtgttttatatacggtacttatttaatatccctttttaattagaaattaaaacagttaatttaattaaagagtagggttttttttcagt

SEQ ID NO: 4691 - protein, 215 aa, Homo sapiens
MNFLLSWVHWSLALLLYLHHAKWSQAAPMAEGGGQNHHEVVKFMDVYQRSYCHPIETLVDIFQEYPDEIEYIFKPSCVPLMRCGGCCNDEGLECVPTEESNITMQIMRIKPHQGQHIGEMSFLQHNKCECRPKKDRARQEKKSVRGKGKGQKRKRKKSRYKSWSVPCGPCSERRKHLFVQDPQTCKCSCKNTDSRCKARQLELNERTCRCDKPRR

SEQ ID NO: 4692 - DNA, 3063 bp, Homo sapiens
aaaagtcggctggtagcggggaggatcgcggaggcttggggcagccgggtagctcggaggtcgtggcgctgggggctagcaccagcgctctgtcgggaggcgcagcggttaggtggaccggtcagcggactcaccggccagggcgctcggtgctggaatttgatattcattgatccgggttttatccctcttcttttttcttaaacatttttttttaaaactgtattgtttctcgttttaatttatttttgcttgccattccccacttgaatcgggccgacggcttggggagattgctctacttccccaaatcactgtggattttggaaaccagcagaaagaggaaagaggtagcaagagctccagagagaagtcgaggaagagagagacggggtcagagagagcgcgcgggcgtgcgagcagcgaaagcgacaggggcaaagtgagtgacctgcttttgggggtgaccgccggagcgcggcgtgagccctcccccttgggatcccgcagctgaccagtcgcgctgacggacagacagacagacaccgcccccagccccagctaccacctcctccccggccggcggcggacagtggacgcggcggcgagccgcgggcaggggccggagcccgcgcccggaggcggggtggagggggtcggggctcgcggcgtcgcactgaaacttttcgtccaacttctgggctgttctcgcttcggaggagccgtggtccgcgcgggggaagccgagccgagcggagccgcgagaagtgctagctcgggccgggaggagccgcagccggaggagggggaggaggaagaagagaaggaagaggagagggggccgcagtggcgactcggcgctcggaagccgggctcatggacgggtgaggcggcggtgtgcgcagacagtgctccagccgcgcgcgctccccaggccctggcccgggcctcgggccggggaggaagagtagctcgccgaggcgccgaggagagcgggccgccccacagcccgagccggagagggagcgcgagccgcgccggccccggtcgggcctccgaaaccatgaactttctgctgtcttgggtgcattggagccttgccttgctgctctacctccaccatgccaagtggtcccaggctgcacccatggcagaaggaggagggcagaatcatcacgaagtggtgaagttcatggatgtctatcagcgcagctactgccatccaatcgagaccctggtggacatcttccaggagtaccctgatgagatcgagtacatcttcaagccatcctgtgtgcccctgatgcgatgcgggggctgctgcaatgacgagggcctggagtgtgtgcccactgaggagtccaacatcaccatgcagattatgcggatcaaacctcaccaaggccagcacataggagagatgagcttcctacagcacaacaaatgtgaatgcagaccaaagaaagatagagcaagacaagaaaaaaaatcagttcgaggaaagggaaaggggcaaaaacgaaagcgcaagaaatcccggtataagtcctggagcgtgtacgttggtgcccgctgctgtctaatgccctggagcctccctggcccccatccctgtgggccttgctcagagcggagaaagcatttgtttgtacaagatccgcagacgtgtaaatgttcctgcaaaaacacagactcgcgttgcaaggcgaggcagcttgagttaaacgaacgtacttgcagatgtgacaagccgaggcggtgagccgggcaggaggaaggagcctccctcagggtttcgggaaccagatctctcaccaggaaagactgatacagaacgatcgatacagaaaccacgctgccgccaccacaccatcaccatcgacagaacagtccttaatccagaaacctgaaatgaaggaagaggagactctgcgcagagcactttgggtccggagggcgagactccggcggaagcattcccgggcgggtgacccagcacggtccctcttggaattggattcgccattttatttttcttgctgctaaatcaccgagcccggaagattagagagttttatttctgggattcctgtagacacacccacccacatacatacatttatatatatatatattatatatatataaaaataaatatctctattttatatatataaaatatatatattctttttttaaattaacagtgctaatgttattggtgtcttcactggatgtatttgactgctgtggacttgagttgggaggggaatgttcccactcagatcctgacagggaagaggaggagatgagagactctggcatgatcttttttttgtcccacttggtggggccagggtcctctcccctgcccaggaatgtgcaaggccagggcatgggggcaaatatgacccagttttgggaacaccgacaaacccagccctggcgctgagcctctctaccccaggtcagacggacagaaagacagatcacaggtacagggatgaggacaccggctctgaccaggagtttggggagcttcaggacattgctgtgctttggggattccctccacatgctgcacgcgcatctcgcccccaggggcactgcctggaagattcaggagcctgggcggccttcgcttactctcacctgcttctgagttgcccaggagaccactggcagatgtcccggcgaagagaagagacacattgttggaagaagcagcccatgacagctccccttcctgggactcgccctcatcctcttcctgctccccttcctggggtgcagcctaaaaggacctatgtcctcacaccattgaaaccactagttctgtccccccaggagacctggttgtgtgtgtgtgagtggttgaccttcctccatcccctggtccttcccttcccttcccgaggcacagagagacagggcaggatccacgtgcccattgtggaggcagagaaaagagaaagtgttttatatacggtacttatttaatatccctttttaattagaaattaaaacagttaatttaattaaagagtagggttttttttcagt

SEQ ID NO: 4693 - protein, 232 aa, Homo sapiens
MNFLLSWVHWSLALLLYLHHAKWSQAAPMAEGGGQNHHEVVKFMDVYQRSYCHPIETLVDIFQEYPDEIEYIFKPSCVPLMRCGGCCNDEGLECVPTEESNITMQIMRIKPHQGQHIGEMSFLQHNKCECRPKKDRARQEKKSVRGKGKGQKRKRKKSRYKSWSVYVGARCCLMPWSLPGPHPCGPCSERRKHLFVQDPQTCKCSCKNTDSRCKARQLELNERTCRCDKPRR

SEQ ID NO: 4694 - DNA, 2940 bp, Homo sapiens
aaaagtcggctggtagcggggaggatcgcggaggcttggggcagccgggtagctcggaggtcgtggcgctgggggctagcaccagcgctctgtcgggaggcgcagcggttaggtggaccggtcagcggactcaccggccagggcgctcggtgctggaatttgatattcattgatccgggttttatccctcttcttttttcttaaacatttttttttaaaactgtattgtttctcgttttaatttatttttgcttgccattccccacttgaatcgggccgacggcttggggagattgctctacttccccaaatcactgtggattttggaaaccagcagaaagaggaaagaggtagcaagagctccagagagaagtcgaggaagagagagacggggtcagagagagcgcgcgggcgtgcgagcagcgaaagcgacaggggcaaagtgagtgacctgcttttgggggtgaccgccggagcgcggcgtgagccctcccccttgggatcccgcagctgaccagtcgcgctgacggacagacagacagacaccgcccccagccccagctaccacctcctccccggccggcggcggacagtggacgcggcggcgagccgcgggcaggggccggagcccgcgcccggaggcggggtggagggggtcggggctcgcggcgtcgcactgaaacttttcgtccaacttctgggctgttctcgcttcggaggagccgtggtccgcgcgggggaagccgagccgagcggagccgcgagaagtgctagctcgggccgggaggagccgcagccggaggagggggaggaggaagaagagaaggaagaggagagggggccgcagtggcgactcggcgctcggaagccgggctcatggacgggtgaggcggcggtgtgcgcagacagtgctccagccgcgcgcgctccccaggccctggcccgggcctcgggccggggaggaagagtagctcgccgaggcgccgaggagagcgggccgccccacagcccgagccggagagggagcgcgagccgcgccggccccggtcgggcctccgaaaccatgaactttctgctgtcttgggtgcattggagccttgccttgctgctctacctccaccatgccaagtggtcccaggctgcacccatggcagaaggaggagggcagaatcatcacgaagtggtgaagttcatggatgtctatcagcgcagctactgccatccaatcgagaccctggtggacatcttccaggagtaccctgatgagatcgagtacatcttcaagccatcctgtgtgcccctgatgcgatgcgggggctgctgcaatgacgagggcctggagtgtgtgcccactgaggagtccaacatcaccatgcagattatgcggatcaaacctcaccaaggccagcacataggagagatgagcttcctacagcacaacaaatgtgaatgcagaccaaagaaagatagagcaagacaagaaaatccctgtgggccttgctcagagcggagaaagcatttgtttgtacaagatccgcagacgtgtaaatgttcctgcaaaaacacagactcgcgttgcaaggcgaggcagcttgagttaaacgaacgtacttgcagatgtgacaagccgaggcggtgagccgggcaggaggaaggagcctccctcagggtttcgggaaccagatctctcaccaggaaagactgatacagaacgatcgatacagaaaccacgctgccgccaccacaccatcaccatcgacagaacagtccttaatccagaaacctgaaatgaaggaagaggagactctgcgcagagcactttgggtccggagggcgagactccggcggaagcattcccgggcgggtgacccagcacggtccctcttggaattggattcgccattttatttttcttgctgctaaatcaccgagcccggaagattagagagttttatttctgggattcctgtagacacacccacccacatacatacatttatatatatatatattatatatatataaaaataaatatctctattttatatatataaaatatatatattctttttttaaattaacagtgctaatgttattggtgtcttcactggatgtatttgactgctgtggacttgagttgggaggggaatgttcccactcagatcctgacagggaagaggaggagatgagagactctggcatgatcttttttttgtcccacttggtggggccagggtcctctcccctgcccaggaatgtgcaaggccagggcatgggggcaaatatgacccagttttgggaacaccgacaaacccagccctggcgctgagcctctctaccccaggtcagacggacagaaagacagatcacaggtacagggatgaggacaccggctctgaccaggagtttggggagcttcaggacattgctgtgctttggggattccctccacatgctgcacgcgcatctcgcccccaggggcactgcctggaagattcaggagcctgggcggccttcgcttactctcacctgcttctgagttgcccaggagaccactggcagatgtcccggcgaagagaagagacacattgttggaagaagcagcccatgacagctccccttcctgggactcgccctcatcctcttcctgctccccttcctggggtgcagcctaaaaggacctatgtcctcacaccattgaaaccactagttctgtccccccaggagacctggttgtgtgtgtgtgagtggttgaccttcctccatcccctggtccttcccttcccttcccgaggcacagagagacagggcaggatccacgtgcccattgtggaggcagagaaaagagaaagtgttttatatacggtacttatttaatatccctttttaattagaaattaaaacagttaatttaattaaagagtagggttttttttcagt

SEQ ID NO: 4695 - protein, 191 aa, Homo sapiens
MNFLLSWVHWSLALLLYLHHAKWSQAAPMAEGGGQNHHEVVKFMDVYQRSYCHPIETLVDIFQEYPDEIEYIFKPSCVPLMRCGGCCNDEGLECVPTEESNITMQIMRIKPHQGQHIGEMSFLQHNKCECRPKKDRARQENPCGPCSERRKHLFVQDPQTCKCSCKNTDSRCKARQLELNERTCRCDKPRR

SEQ ID NO: 4696 - DNA, 3480 bp, Homo sapiens
aaaagtcggctggtagcggggaggatcgcggaggcttggggcagccgggtagctcggaggtcgtggcgctgggggctagcaccagcgctctgtcgggaggcgcagcggttaggtggaccggtcagcggactcaccggccagggcgctcggtgctggaatttgatattcattgatccgggttttatccctcttcttttttcttaaacatttttttttaaaactgtattgtttctcgttttaatttatttttgcttgccattccccacttgaatcgggccgacggcttggggagattgctctacttccccaaatcactgtggattttggaaaccagcagaaagaggaaagaggtagcaagagctccagagagaagtcgaggaagagagagacggggtcagagagagcgcgcgggcgtgcgagcagcgaaagcgacaggggcaaagtgagtgacctgcttttgggggtgaccgccggagcgcggcgtgagccctcccccttgggatcccgcagctgaccagtcgcgctgacggacagacagacagacaccgcccccagccccagctaccacctcctccccggccggcggcggacagtggacgcggcggcgagccgcgggcaggggccggagcccgcgcccggaggcggggtggagggggtcggggctcgcggcgtcgcactgaaacttttcgtccaacttctgggctgttctcgcttcggaggagccgtggtccgcgcgggggaagccgagccgagcggagccgcgagaagtgctagctcgggccgggaggagccgcagccggaggagggggaggaggaagaagagaaggaagaggagagggggccgcagtggcgactcggcgctcggaagccgggctcatggacgggtgaggcggcggtgtgcgcagacagtgctccagccgcgcgcgctccccaggccctggcccgggcctcgggccggggaggaagagtagctcgccgaggcgccgaggagagcgggccgccccacagcccgagccggagagggagcgcgagccgcgccggccccggtcgggcctccgaaaccatgaactttctgctgtcttgggtgcattggagccttgccttgctgctctacctccaccatgccaagtggtcccaggctgcacccatggcagaaggaggagggcagaatcatcacgaagtggtgaagttcatggatgtctatcagcgcagctactgccatccaatcgagaccctggtggacatcttccaggagtaccctgatgagatcgagtacatcttcaagccatcctgtgtgcccctgatgcgatgcgggggctgctgcaatgacgagggcctggagtgtgtgcccactgaggagtccaacatcaccatgcagattatgcggatcaaacctcaccaaggccagcacataggagagatgagcttcctacagcacaacaaatgtgaatgcagaccaaagaaagatagagcaagacaagaaaaaaaatcagttcgaggaaagggaaaggggcaaaaacgaaagcgcaagaaatcccggtataagtcctggagcgtgtacgttggtgcccgctgctgtctaatgccctggagcctccctggcccccatccctgtgggccttgctcagagcggagaaagcatttgtttgtacaagatccgcagacgtgtaaatgttcctgcaaaaacacagactcgcgttgcaaggcgaggcagcttgagttaaacgaacgtacttgcagatgtgacaagccgaggcggtgagccgggcaggaggaaggagcctccctcagggtttcgggaaccagatctctcaccaggaaagactgatacagaacgatcgatacagaaaccacgctgccgccaccacaccatcaccatcgacagaacagtccttaatccagaaacctgaaatgaaggaagaggagactctgcgcagagcactttgggtccggagggcgagactccggcggaagcattcccgggcgggtgacccagcacggtccctcttggaattggattcgccattttatttttcttgctgctaaatcaccgagcccggaagattagagagttttatttctgggattcctgtagacacacccacccacatacatacatttatatatatatatattatatatatataaaaataaatatctctattttatatatataaaatatatatattctttttttaaattaacagtgctaatgttattggtgtcttcactggatgtatttgactgctgtggacttgagttgggaggggaatgttcccactcagatcctgacagggaagaggaggagatgagagactctggcatgatcttttttttgtcccacttggtggggccagggtcctctcccctgcccaggaatgtgcaaggccagggcatgggggcaaatatgacccagttttgggaacaccgacaaacccagccctggcgctgagcctctctaccccaggtcagacggacagaaagacagatcacaggtacagggatgaggacaccggctctgaccaggagtttggggagcttcaggacattgctgtgctttggggattccctccacatgctgcacgcgcatctcgcccccaggggcactgcctggaagattcaggagcctgggcggccttcgcttactctcacctgcttctgagttgcccaggagaccactggcagatgtcccggcgaagagaagagacacattgttggaagaagcagcccatgacagctccccttcctgggactcgccctcatcctcttcctgctccccttcctggggtgcagcctaaaaggacctatgtcctcacaccattgaaaccactagttctgtccccccaggagacctggttgtgtgtgtgtgagtggttgaccttcctccatcccctggtccttcccttcccttcccgaggcacagagagacagggcaggatccacgtgcccattgtggaggcagagaaaagagaaagtgttttatatacggtacttatttaatatccctttttaattagaaattaaaacagttaatttaattaaagagtagggttttttttcagtattcttggttaatatttaatttcaactatttatgagatgtatcttttgctctctcttgctctcttatttgtaccggtttttgtatataaaattcatgtttccaatctctctctccctgatcggtgacagtcactagcttatcttgaacagatatttaattttgctaacactcagctctgccctccccgatcccctggctccccagcacacattcctttgaaataaggtttcaatatacatctacatactatatatatatttggcaacttgtatttgtgtgtatatatatatatatatgtttatgtatatatgtgattctgataaaatagacattgctattctgttttttatatgtaaaaacaaaacaagaaaaaatagagaattctacatactaaatctctctccttttttaatttt

SEQ ID NO: 4697 - protein, 232 aa, Homo sapiens; identical to SEQ ID NO: 4693

SEQ ID NO: 4698 - DNA, 3429 bp, Homo sapiens
aaaagtcggctggtagcggggaggatcgcggaggcttggggcagccgggtagctcggaggtcgtggcgctgggggctagcaccagcgctctgtcgggaggcgcagcggttaggtggaccggtcagcggactcaccggccagggcgctcggtgctggaatttgatattcattgatccgggttttatccctcttcttttttcttaaacatttttttttaaaactgtattgtttctcgttttaatttatttttgcttgccattccccacttgaatcgggccgacggcttggggagattgctctacttccccaaatcactgtggattttggaaaccagcagaaagaggaaagaggtagcaagagctccagagagaagtcgaggaagagagagacggggtcagagagagcgcgcgggcgtgcgagcagcgaaagcgacaggggcaaagtgagtgacctgcttttgggggtgaccgccggagcgcggcgtgagccctcccccttgggatcccgcagctgaccagtcgcgctgacggacagacagacagacaccgcccccagccccagctaccacctcctccccggccggcggcggacagtggacgcggcggcgagccgcgggcaggggccggagcccgcgcccggaggcggggtggagggggtcggggctcgcggcgtcgcactgaaacttttcgtccaacttctgggctgttctcgcttcggaggagccgtggtccgcgcgggggaagccgagccgagcggagccgcgagaagtgctagctcgggccgggaggagccgcagccggaggagggggaggaggaagaagagaaggaagaggagagggggccgcagtggcgactcggcgctcggaagccgggctcatggacgggtgaggcggcggtgtgcgcagacagtgctccagccgcgcgcgctccccaggccctggcccgggcctcgggccggggaggaagagtagctcgccgaggcgccgaggagagcgggccgccccacagcccgagccggagagggagcgcgagccgcgccggccccggtcgggcctccgaaaccatgaactttctgctgtcttgggtgcattggagccttgccttgctgctctacctccaccatgccaagtggtcccaggctgcacccatggcagaaggaggagggcagaatcatcacgaagtggtgaagttcatggatgtctatcagcgcagctactgccatccaatcgagaccctggtggacatcttccaggagtaccctgatgagatcgagtacatcttcaagccatcctgtgtgcccctgatgcgatgcgggggctgctgcaatgacgagggcctggagtgtgtgcccactgaggagtccaacatcaccatgcagattatgcggatcaaacctcaccaaggccagcacataggagagatgagcttcctacagcacaacaaatgtgaatgcagaccaaagaaagatagagcaagacaagaaaaaaaatcagttcgaggaaagggaaaggggcaaaaacgaaagcgcaagaaatcccggtataagtcctggagcgttccctgtgggccttgctcagagcggagaaagcatttgtttgtacaagatccgcagacgtgtaaatgttcctgcaaaaacacagactcgcgttgcaaggcgaggcagcttgagttaaacgaacgtacttgcagatgtgacaagccgaggcggtgagccgggcaggaggaaggagcctccctcagggtttcgggaaccagatctctcaccaggaaagactgatacagaacgatcgatacagaaaccacgctgccgccaccacaccatcaccatcgacagaacagtccttaatccagaaacctgaaatgaaggaagaggagactctgcgcagagcactttgggtccggagggcgagactccggcggaagcattcccgggcgggtgacccagcacggtccctcttggaattggattcgccattttatttttcttgctgctaaatcaccgagcccggaagattagagagttttatttctgggattcctgtagacacacccacccacatacatacatttatatatatatatattatatatatataaaaataaatatctctattttatatatataaaatatatatattctttttttaaattaacagtgctaatgttattggtgtcttcactggatgtatttgactgctgtggacttgagttgggaggggaatgttcccactcagatcctgacagggaagaggaggagatgagagactctggcatgatcttttttttgtcccacttggtggggccagggtcctctcccctgcccaggaatgtgcaaggccagggcatgggggcaaatatgacccagttttgggaacaccgacaaacccagccctggcgctgagcctctctaccccaggtcagacggacagaaagacagatcacaggtacagggatgaggacaccggctctgaccaggagtttggggagcttcaggacattgctgtgctttggggattccctccacatgctgcacgcgcatctcgcccccaggggcactgcctggaagattcaggagcctgggcggccttcgcttactctcacctgcttctgagttgcccaggagaccactggcagatgtcccggcgaagagaagagacacattgttggaagaagcagcccatgacagctccccttcctgggactcgccctcatcctcttcctgctccccttcctggggtgcagcctaaaaggacctatgtcctcacaccattgaaaccactagttctgtccccccaggagacctggttgtgtgtgtgtgagtggttgaccttcctccatcccctggtccttcccttcccttcccgaggcacagagagacagggcaggatccacgtgcccattgtggaggcagagaaaagagaaagtgttttatatacggtacttatttaatatccctttttaattagaaattaaaacagttaatttaattaaagagtagggttttttttcagtattcttggttaatatttaatttcaactatttatgagatgtatcttttgctctctcttgctctcttatttgtaccggtttttgtatataaaattcatgtttccaatctctctctccctgatcggtgacagtcactagcttatcttgaacagatatttaattttgctaacactcagctctgccctccccgatcccctggctccccagcacacattcctttgaaataaggtttcaatatacatctacatactatatatatatttggcaacttgtatttgtgtgtatatatatatatatatgtttatgtatatatgtgattctgataaaatagacattgctattctgttttttatatgtaaaaacaaaacaagaaaaaatagagaattctacatactaaatctctctccttttttaatttt

SEQ ID NO: 4699 - protein, 215 aa, Homo sapiens; identical to SEQ ID NO: 4691

SEQ ID NO: 4700 - DNA, 3357 bp, Homo sapiens
aaaagtcggctggtagcggggaggatcgcggaggcttggggcagccgggtagctcggaggtcgtggcgctgggggctagcaccagcgctctgtcgggaggcgcagcggttaggtggaccggtcagcggactcaccggccagggcgctcggtgctggaatttgatattcattgatccgggttttatccctcttcttttttcttaaacatttttttttaaaactgtattgtttctcgttttaatttatttttgcttgccattccccacttgaatcgggccgacggcttggggagattgctctacttccccaaatcactgtggattttggaaaccagcagaaagaggaaagaggtagcaagagctccagagagaagtcgaggaagagagagacggggtcagagagagcgcgcgggcgtgcgagcagcgaaagcgacaggggcaaagtgagtgacctgcttttgggggtgaccgccggagcgcggcgtgagccctcccccttgggatcccgcagctgaccagtcgcgctgacggacagacagacagacaccgcccccagccccagctaccacctcctccccggccggcggcggacagtggacgcggcggcgagccgcgggcaggggccggagcccgcgcccggaggcggggtggagggggtcggggctcgcggcgtcgcactgaaacttttcgtccaacttctgggctgttctcgcttcggaggagccgtggtccgcgcgggggaagccgagccgagcggagccgcgagaagtgctagctcgggccgggaggagccgcagccggaggagggggaggaggaagaagagaaggaagaggagagggggccgcagtggcgactcggcgctcggaagccgggctcatggacgggtgaggcggcggtgtgcgcagacagtgctccagccgcgcgcgctccccaggccctggcccgggcctcgggccggggaggaagagtagctcgccgaggcgccgaggagagcgggccgccccacagcccgagccggagagggagcgcgagccgcgccggccccggtcgggcctccgaaaccatgaactttctgctgtcttgggtgcattggagccttgccttgctgctctacctccaccatgccaagtggtcccaggctgcacccatggcagaaggaggagggcagaatcatcacgaagtggtgaagttcatggatgtctatcagcgcagctactgccatccaatcgagaccctggtggacatcttccaggagtaccctgatgagatcgagtacatcttcaagccatcctgtgtgcccctgatgcgatgcgggggctgctgcaatgacgagggcctggagtgtgtgcccactgaggagtccaacatcaccatgcagattatgcggatcaaacctcaccaaggccagcacataggagagatgagcttcctacagcacaacaaatgtgaatgcagaccaaagaaagatagagcaagacaagaaaatccctgtgggccttgctcagagcggagaaagcatttgtttgtacaagatccgcagacgtgtaaatgttcctgcaaaaacacagactcgcgttgcaaggcgaggcagcttgagttaaacgaacgtacttgcagatgtgacaagccgaggcggtgagccgggcaggaggaaggagcctccctcagggtttcgggaaccagatctctcaccaggaaagactgatacagaacgatcgatacagaaaccacgctgccgccaccacaccatcaccatcgacagaacagtccttaatccagaaacctgaaatgaaggaagaggagactctgcgcagagcactttgggtccggagggcgagactccggcggaagcattcccgggcgggtgacccagcacggtccctcttggaattggattcgccattttatttttcttgctgctaaatcaccgagcccggaagattagagagttttatttctgggattcctgtagacacacccacccacatacatacatttatatatatatatattatatatatataaaaataaatatctctattttatatatataaaatatatatattctttttttaaattaacagtgctaatgttattggtgtcttcactggatgtatttgactgctgtggacttgagttgggaggggaatgttcccactcagatcctgacagggaagaggaggagatgagagactctggcatgatcttttttttgtcccacttggtggggccagggtcctctcccctgcccaggaatgtgcaaggccagggcatgggggcaaatatgacccagttttgggaacaccgacaaacccagccctggcgctgagcctctctaccccaggtcagacggacagaaagacagatcacaggtacagggatgaggacaccggctctgaccaggagtttggggagcttcaggacattgctgtgctttggggattccctccacatgctgcacgcgcatctcgcccccaggggcactgcctggaagattcaggagcctgggcggccttcgcttactctcacctgcttctgagttgcccaggagaccactggcagatgtcccggcgaagagaagagacacattgttggaagaagcagcccatgacagctccccttcctgggactcgccctcatcctcttcctgctccccttcctggggtgcagcctaaaaggacctatgtcctcacaccattgaaaccactagttctgtccccccaggagacctggttgtgtgtgtgtgagtggttgaccttcctccatcccctggtccttcccttcccttcccgaggcacagagagacagggcaggatccacgtgcccattgtggaggcagagaaaagagaaagtgttttatatacggtacttatttaatatccctttttaattagaaattaaaacagttaatttaattaaagagtagggttttttttcagtattcttggttaatatttaatttcaactatttatgagatgtatcttttgctctctcttgctctcttatttgtaccggtttttgtatataaaattcatgtttccaatctctctctccctgatcggtgacagtcactagcttatcttgaacagatatttaattttgctaacactcagctctgccctccccgatcccctggctccccagcacacattcctttgaaataaggtttcaatatacatctacatactatatatatatttggcaacttgtatttgtgtgtatatatatatatatatgtttatgtatatatgtgattctgataaaatagacattgctattctgttttttatatgtaaaaacaaaacaagaaaaaatagagaattctacatactaaatctctctccttttttaatttt

SEQ ID NO: 4701 - protein, 191 aa, Homo sapiens; identical to SEQ ID NO: 4695

SEQ ID NO: 4702 - DNA, 3291 bp, Homo sapiens
aaaagtcggctggtagcggggaggatcgcggaggcttggggcagccgggtagctcggaggtcgtggcgctgggggctagcaccagcgctctgtcgggaggcgcagcggttaggtggaccggtcagcggactcaccggccagggcgctcggtgctggaatttgatattcattgatccgggttttatccctcttcttttttcttaaacatttttttttaaaactgtattgtttctcgttttaatttatttttgcttgccattccccacttgaatcgggccgacggcttggggagattgctctacttccccaaatcactgtggattttggaaaccagcagaaagaggaaagaggtagcaagagctccagagagaagtcgaggaagagagagacggggtcagagagagcgcgcgggcgtgcgagcagcgaaagcgacaggggcaaagtgagtgacctgcttttgggggtgaccgccggagcgcggcgtgagccctcccccttgggatcccgcagctgaccagtcgcgctgacggacagacagacagacaccgcccccagccccagctaccacctcctccccggccggcggcggacagtggacgcggcggcgagccgcgggcaggggccggagcccgcgcccggaggcggggtggagggggtcggggctcgcggcgtcgcactgaaacttttcgtccaacttctgggctgttctcgcttcggaggagccgtggtccgcgcgggggaagccgagccgagcggagccgcgagaagtgctagctcgggccgggaggagccgcagccggaggagggggaggaggaagaagagaaggaagaggagagggggccgcagtggcgactcggcgctcggaagccgggctcatggacgggtgaggcggcggtgtgcgcagacagtgctccagccgcgcgcgctccccaggccctggcccgggcctcgggccggggaggaagagtagctcgccgaggcgccgaggagagcgggccgccccacagcccgagccggagagggagcgcgagccgcgccggccccggtcgggcctccgaaaccatgaactttctgctgtcttgggtgcattggagccttgccttgctgctctacctccaccatgccaagtggtcccaggctgcacccatggcagaaggaggagggcagaatcatcacgaagtggtgaagttcatggatgtctatcagcgcagctactgccatccaatcgagaccctggtggacatcttccaggagtaccctgatgagatcgagtacatcttcaagccatcctgtgtgcccctgatgcgatgcgggggctgctgcaatgacgagggcctggagtgtgtgcccactgaggagtccaacatcaccatgcagattatgcggatcaaacctcaccaaggccagcacataggagagatgagcttcctacagcacaacaaatgtgaatgcagaccaaagaaagatagagcaagacaagaaaatccctgtgggccttgctcagagcggagaaagcatttgtttgtacaagatccgcagacgtgtaaatgttcctgcaaaaacacagactcgcgttgcaaggcgaggcagcttgagttaaacgaacgtacttgcagatctctcaccaggaaagactgatacagaacgatcgatacagaaaccacgctgccgccaccacaccatcaccatcgacagaacagtccttaatccagaaacctgaaatgaaggaagaggagactctgcgcagagcactttgggtccggagggcgagactccggcggaagcattcccgggcgggtgacccagcacggtccctcttggaattggattcgccattttatttttcttgctgctaaatcaccgagcccggaagattagagagttttatttctgggattcctgtagacacacccacccacatacatacatttatatatatatatattatatatatataaaaataaatatctctattttatatatataaaatatatatattctttttttaaattaacagtgctaatgttattggtgtcttcactggatgtatttgactgctgtggacttgagttgggaggggaatgttcccactcagatcctgacagggaagaggaggagatgagagactctggcatgatcttttttttgtcccacttggtggggccagggtcctctcccctgcccaggaatgtgcaaggccagggcatgggggcaaatatgacccagttttgggaacaccgacaaacccagccctggcgctgagcctctctaccccaggtcagacggacagaaagacagatcacaggtacagggatgaggacaccggctctgaccaggagtttggggagcttcaggacattgctgtgctttggggattccctccacatgctgcacgcgcatctcgcccccaggggcactgcctggaagattcaggagcctgggcggccttcgcttactctcacctgcttctgagttgcccaggagaccactggcagatgtcccggcgaagagaagagacacattgttggaagaagcagcccatgacagctccccttcctgggactcgccctcatcctcttcctgctccccttcctggggtgcagcctaaaaggacctatgtcctcacaccattgaaaccactagttctgtccccccaggagacctggttgtgtgtgtgtgagtggttgaccttcctccatcccctggtccttcccttcccttcccgaggcacagagagacagggcaggatccacgtgcccattgtggaggcagagaaaagagaaagtgttttatatacggtacttatttaatatccctttttaattagaaattaaaacagttaatttaattaaagagtagggttttttttcagtattcttggttaatatttaatttcaactatttatgagatgtatcttttgctctctcttgctctcttatttgtaccggtttttgtatataaaattcatgtttccaatctctctctccctgatcggtgacagtcactagcttatcttgaacagatatttaattttgctaacactcagctctgccctccccgatcccctggctccccagcacacattcctttgaaataaggtttcaatatacatctacatactatatatatatttggcaacttgtatttgtgtgtatatatatatatatatgtttatgtatatatgtgattctgataaaatagacattgctattctgttttttatatgtaaaaacaaaacaagaaaaaatagagaattctacatactaaatctctctccttttttaatttt

SEQ ID NO: 4703 - protein, 191 aa, Homo sapiens; identical to SEQ ID NO: 4689

SEQ ID NO: 4704 - DNA, 3564 bp, Homo sapiens
aaaagtcggctggtagcggggaggatcgcggaggcttggggcagccgggtagctcggaggtcgtggcgctgggggctagcaccagcgctctgtcgggaggcgcagcggttaggtggaccggtcagcggactcaccggccagggcgctcggtgctggaatttgatattcattgatccgggttttatccctcttcttttttcttaaacatttttttttaaaactgtattgtttctcgttttaatttatttttgcttgccattccccacttgaatcgggccgacggcttggggagattgctctacttccccaaatcactgtggattttggaaaccagcagaaagaggaaagaggtagcaagagctccagagagaagtcgaggaagagagagacggggtcagagagagcgcgcgggcgtgcgagcagcgaaagcgacaggggcaaagtgagtgacctgcttttgggggtgaccgccggagcgcggcgtgagccctcccccttgggatcccgcagctgaccagtcgcgctgacggacagacagacagacaccgcccccagccccagctaccacctcctccccggccggcggcggacagtggacgcggcggcgagccgcgggcaggggccggagcccgcgcccggaggcggggtggagggggtcggggctcgcggcgtcgcactgaaacttttcgtccaacttctgggctgttctcgcttcggaggagccgtggtccgcgcgggggaagccgagccgagcggagccgcgagaagtgctagctcgggccgggaggagccgcagccggaggagggggaggaggaagaagagaaggaagaggagagggggccgcagtggcgactcggcgctcggaagccgggctcatggacgggtgaggcggcggtgtgcgcagacagtgctccagccgcgcgcgctccccaggccctggcccgggcctcgggccggggaggaagagtagctcgccgaggcgccgaggagagcgggccgccccacagcccgagccggagagggagcgcgagccgcgccggccccggtcgggcctccgaaaccatgaactttctgctgtcttgggtgcattggagccttgccttgctgctctacctccaccatgccaagtggtcccaggctgcacccatggcagaaggaggagggcagaatcatcacgaagtggtgaagttcatggatgtctatcagcgcagctactgccatccaatcgagaccctggtggacatcttccaggagtaccctgatgagatcgagtacatcttcaagccatcctgtgtgcccctgatgcgatgcgggggctgctgcaatgacgagggcctggagtgtgtgcccactgaggagtccaacatcaccatgcagattatgcggatcaaacctcaccaaggccagcacataggagagatgagcttcctacagcacaacaaatgtgaatgcagaccaaagaaagatagagcaagacaagaaaatccctgtgggccttgctcagagcggagaaagcatttgtttgtacaagatccgcagacgtgtaaatgttcctgcaaaaacacagactcgcgttgcaaggcgaggcagcttgagttaaacgaacgtacttgcagatgtgacaagccgaggcggtgagccgggcaggaggaaggagcctccctcagggtttcgggaaccagatctctcaccaggaaagactgatacagaacgatcgatacagaaaccacgctgccgccaccacaccatcaccatcgacagaacagtccttaatccagaaacctgaaatgaaggaagaggagactctgcgcagagcactttgggtccggagggcgagactccggcggaagcattcccgggcgggtgacccagcacggtccctcttggaattggattcgccattttatttttcttgctgctaaatcaccgagcccggaagattagagagttttatttctgggattcctgtagacacacccacccacatacatacatttatatatatatatattatatatatataaaaataaatatctctattttatatatataaaatatatatattctttttttaaattaacagtgctaatgttattggtgtcttcactggatgtatttgactgctgtggacttgagttgggaggggaatgttcccactcagatcctgacagggaagaggaggagatgagagactctggcatgatcttttttttgtcccacttggtggggccagggtcctctcccctgcccaggaatgtgcaaggccagggcatgggggcaaatatgacccagttttgggaacaccgacaaacccagccctggcgctgagcctctctaccccaggtcagacggacagaaagacagatcacaggtacagggatgaggacaccggctctgaccaggagtttggggagcttcaggacattgctgtgctttggggattccctccacatgctgcacgcgcatctcgcccccaggggcactgcctggaagattcaggagcctgggcggccttcgcttactctcacctgcttctgagttgcccaggagaccactggcagatgtcccggcgaagagaagagacacattgttggaagaagcagcccatgacagctccccttcctgggactcgccctcatcctcttcctgctccccttcctggggtgcagcctaaaaggacctatgtcctcacaccattgaaaccactagttctgtccccccaggagacctggttgtgtgtgtgtgagtggttgaccttcctccatcccctggtccttcccttcccttcccgaggcacagagagacagggcaggatccacgtgcccattgtggaggcagagaaaagagaaagtgttttatatacggtacttatttaatatccctttttaattagaaattaaaacagttaatttaattaaagagtagggttttttttcagtattcttggttaatatttaatttcaactatttatgagatgtatcttttgctctctcttgctctcttatttgtaccggtttttgtatataaaattcatgtttccaatctctctctccctgatcggtgacagtcactagcttatcttgaacagatatttaattttgctaacactcagctctgccctccccgatcccctggctccccagcacacattcctttgaaataaggtttcaatatacatctacatactatatatatatttggcaacttgtatttgtgtgtatatatatatatatatgtttatgtatatatgtgattctgataaaatagacattgctattctgttttttatatgtaaaaacaaaacaagaaaaaatagagaattctacatactaaatctctctccttttttaattttaatatttgttatcatttatttattggtgctactgtttatccgtaataattgtggggaaaagatattaacatcacgtctttgtctctagtgcagtttttcgagatattccgtagtacatatttatttttaaacaacgacaaagaaatacagatatatcttaaaaaaaaaaaagcattttgtattaaagaatttaattctgatctcaaa

SEQ ID NO: 4705 - protein, 191 aa, Homo sapiens; identical to SEQ ID NO: 4695

SEQ ID NO: 4706 - DNA, 3432 bp, Homo sapiens
aaaagtcggctggtagcggggaggatcgcggaggcttggggcagccgggtagctcggaggtcgtggcgctgggggctagcaccagcgctctgtcgggaggcgcagcggttaggtggaccggtcagcggactcaccggccagggcgctcggtgctggaatttgatattcattgatccgggttttatccctcttcttttttcttaaacatttttttttaaaactgtattgtttctcgttttaatttatttttgcttgccattccccacttgaatcgggccgacggcttggggagattgctctacttccccaaatcactgtggattttggaaaccagcagaaagaggaaagaggtagcaagagctccagagagaagtcgaggaagagagagacggggtcagagagagcgcgcgggcgtgcgagcagcgaaagcgacaggggcaaagtgagtgacctgcttttgggggtgaccgccggagcgcggcgtgagccctcccccttgggatcccgcagctgaccagtcgcgctgacggacagacagacagacaccgcccccagccccagctaccacctcctccccggccggcggcggacagtggacgcggcggcgagccgcgggcaggggccggagcccgcgcccggaggcggggtggagggggtcggggctcgcggcgtcgcactgaaacttttcgtccaacttctgggctgttctcgcttcggaggagccgtggtccgcgcgggggaagccgagccgagcggagccgcgagaagtgctagctcgggccgggaggagccgcagccggaggagggggaggaggaagaagagaaggaagaggagagggggccgcagtggcgactcggcgctcggaagccgggctcatggacgggtgaggcggcggtgtgcgcagacagtgctccagccgcgcgcgctccccaggccctggcccgggcctcgggccggggaggaagagtagctcgccgaggcgccgaggagagcgggccgccccacagcccgagccggagagggagcgcgagccgcgccggccccggtcgggcctccgaaaccatgaactttctgctgtcttgggtgcattggagccttgccttgctgctctacctccaccatgccaagtggtcccaggctgcacccatggcagaaggaggagggcagaatcatcacgaagtggtgaagttcatggatgtctatcagcgcagctactgccatccaatcgagaccctggtggacatcttccaggagtaccctgatgagatcgagtacatcttcaagccatcctgtgtgcccctgatgcgatgcgggggctgctgcaatgacgagggcctggagtgtgtgcccactgaggagtccaacatcaccatgcagattatgcggatcaaacctcaccaaggccagcacataggagagatgagcttcctacagcacaacaaatgtgaatgcagaccaaagaaagatagagcaagacaagaaaaatgtgacaagccgaggcggtgagccgggcaggaggaaggagcctccctcagggtttcgggaaccagatctctcaccaggaaagactgatacagaacgatcgatacagaaaccacgctgccgccaccacaccatcaccatcgacagaacagtccttaatccagaaacctgaaatgaaggaagaggagactctgcgcagagcactttgggtccggagggcgagactccggcggaagcattcccgggcgggtgacccagcacggtccctcttggaattggattcgccattttatttttcttgctgctaaatcaccgagcccggaagattagagagttttatttctgggattcctgtagacacacccacccacatacatacatttatatatatatatattatatatatataaaaataaatatctctattttatatatataaaatatatatattctttttttaaattaacagtgctaatgttattggtgtcttcactggatgtatttgactgctgtggacttgagttgggaggggaatgttcccactcagatcctgacagggaagaggaggagatgagagactctggcatgatcttttttttgtcccacttggtggggccagggtcctctcccctgcccaggaatgtgcaaggccagggcatgggggcaaatatgacccagttttgggaacaccgacaaacccagccctggcgctgagcctctctaccccaggtcagacggacagaaagacagatcacaggtacagggatgaggacaccggctctgaccaggagtttggggagcttcaggacattgctgtgctttggggattccctccacatgctgcacgcgcatctcgcccccaggggcactgcctggaagattcaggagcctgggcggccttcgcttactctcacctgcttctgagttgcccaggagaccactggcagatgtcccggcgaagagaagagacacattgttggaagaagcagcccatgacagctccccttcctgggactcgccctcatcctcttcctgctccccttcctggggtgcagcctaaaaggacctatgtcctcacaccattgaaaccactagttctgtccccccaggagacctggttgtgtgtgtgtgagtggttgaccttcctccatcccctggtccttcccttcccttcccgaggcacagagagacagggcaggatccacgtgcccattgtggaggcagagaaaagagaaagtgttttatatacggtacttatttaatatccctttttaattagaaattaaaacagttaatttaattaaagagtagggttttttttcagtattcttggttaatatttaatttcaactatttatgagatgtatcttttgctctctcttgctctcttatttgtaccggtttttgtatataaaattcatgtttccaatctctctctccctgatcggtgacagtcactagcttatcttgaacagatatttaattttgctaacactcagctctgccctccccgatcccctggctccccagcacacattcctttgaaataaggtttcaatatacatctacatactatatatatatttggcaacttgtatttgtgtgtatatatatatatatatgtttatgtatatatgtgattctgataaaatagacattgctattctgttttttatatgtaaaaacaaaacaagaaaaaatagagaattctacatactaaatctctctccttttttaattttaatatttgttatcatttatttattggtgctactgtttatccgtaataattgtggggaaaagatattaacatcacgtctttgtctctagtgcagtttttcgagatattccgtagtacatatttatttttaaacaacgacaaagaaatacagatatatcttaaaaaaaaaaaagcattttgtattaaagaatttaattctgatctcaaa

SEQ ID NO: 4707 - protein, 147 aa, Homo sapiens
MNFLLSWVHWSLALLLYLHHAKWSQAAPMAEGGGQNHHEVVKFMDVYQRSYCHPIETLVDIFQEYPDEIEYIFKPSCVPLMRCGGCCNDEGLECVPTEESNITMQIMRIKPHQGQHIGEMSFLQHNKCECRPKKDRARQEKCDKPRR

SEQ ID NO: 4708 - DNA, 3636 bp, Homo sapiens
aaaagtcggctggtagcggggaggatcgcggaggcttggggcagccgggtagctcggaggtcgtggcgctgggggctagcaccagcgctctgtcgggaggcgcagcggttaggtggaccggtcagcggactcaccggccagggcgctcggtgctggaatttgatattcattgatccgggttttatccctcttcttttttcttaaacatttttttttaaaactgtattgtttctcgttttaatttatttttgcttgccattccccacttgaatcgggccgacggcttggggagattgctctacttccccaaatcactgtggattttggaaaccagcagaaagaggaaagaggtagcaagagctccagagagaagtcgaggaagagagagacggggtcagagagagcgcgcgggcgtgcgagcagcgaaagcgacaggggcaaagtgagtgacctgcttttgggggtgaccgccggagcgcggcgtgagccctcccccttgggatcccgcagctgaccagtcgcgctgacggacagacagacagacaccgcccccagccccagctaccacctcctccccggccggcggcggacagtggacgcggcggcgagccgcgggcaggggccggagcccgcgcccggaggcggggtggagggggtcggggctcgcggcgtcgcactgaaacttttcgtccaacttctgggctgttctcgcttcggaggagccgtggtccgcgcgggggaagccgagccgagcggagccgcgagaagtgctagctcgggccgggaggagccgcagccggaggagggggaggaggaagaagagaaggaagaggagagggggccgcagtggcgactcggcgctcggaagccgggctcatggacgggtgaggcggcggtgtgcgcagacagtgctccagccgcgcgcgctccccaggccctggcccgggcctcgggccggggaggaagagtagctcgccgaggcgccgaggagagcgggccgccccacagcccgagccggagagggagcgcgagccgcgccggccccggtcgggcctccgaaaccatgaactttctgctgtcttgggtgcattggagccttgccttgctgctctacctccaccatgccaagtggtcccaggctgcacccatggcagaaggaggagggcagaatcatcacgaagtggtgaagttcatggatgtctatcagcgcagctactgccatccaatcgagaccctggtggacatcttccaggagtaccctgatgagatcgagtacatcttcaagccatcctgtgtgcccctgatgcgatgcgggggctgctgcaatgacgagggcctggagtgtgtgcccactgaggagtccaacatcaccatgcagattatgcggatcaaacctcaccaaggccagcacataggagagatgagcttcctacagcacaacaaatgtgaatgcagaccaaagaaagatagagcaagacaagaaaaaaaatcagttcgaggaaagggaaaggggcaaaaacgaaagcgcaagaaatcccggtataagtcctggagcgttccctgtgggccttgctcagagcggagaaagcatttgtttgtacaagatccgcagacgtgtaaatgttcctgcaaaaacacagactcgcgttgcaaggcgaggcagcttgagttaaacgaacgtacttgcagatgtgacaagccgaggcggtgagccgggcaggaggaaggagcctccctcagggtttcgggaaccagatctctcaccaggaaagactgatacagaacgatcgatacagaaaccacgctgccgccaccacaccatcaccatcgacagaacagtccttaatccagaaacctgaaatgaaggaagaggagactctgcgcagagcactttgggtccggagggcgagactccggcggaagcattcccgggcgggtgacccagcacggtccctcttggaattggattcgccattttatttttcttgctgctaaatcaccgagcccggaagattagagagttttatttctgggattcctgtagacacacccacccacatacatacatttatatatatatatattatatatatataaaaataaatatctctattttatatatataaaatatatatattctttttttaaattaacagtgctaatgttattggtgtcttcactggatgtatttgactgctgtggacttgagttgggaggggaatgttcccactcagatcctgacagggaagaggaggagatgagagactctggcatgatcttttttttgtcccacttggtggggccagggtcctctcccctgcccaggaatgtgcaaggccagggcatgggggcaaatatgacccagttttgggaacaccgacaaacccagccctggcgctgagcctctctaccccaggtcagacggacagaaagacagatcacaggtacagggatgaggacaccggctctgaccaggagtttggggagcttcaggacattgctgtgctttggggattccctccacatgctgcacgcgcatctcgcccccaggggcactgcctggaagattcaggagcctgggcggccttcgcttactctcacctgcttctgagttgcccaggagaccactggcagatgtcccggcgaagagaagagacacattgttggaagaagcagcccatgacagctccccttcctgggactcgccctcatcctcttcctgctccccttcctggggtgcagcctaaaaggacctatgtcctcacaccattgaaaccactagttctgtccccccaggagacctggttgtgtgtgtgtgagtggttgaccttcctccatcccctggtccttcccttcccttcccgaggcacagagagacagggcaggatccacgtgcccattgtggaggcagagaaaagagaaagtgttttatatacggtacttatttaatatccctttttaattagaaattaaaacagttaatttaattaaagagtagggttttttttcagtattcttggttaatatttaatttcaactatttatgagatgtatcttttgctctctcttgctctcttatttgtaccggtttttgtatataaaattcatgtttccaatctctctctccctgatcggtgacagtcactagcttatcttgaacagatatttaattttgctaacactcagctctgccctccccgatcccctggctccccagcacacattcctttgaaataaggtttcaatatacatctacatactatatatatatttggcaacttgtatttgtgtgtatatatatatatatatgtttatgtatatatgtgattctgataaaatagacattgctattctgttttttatatgtaaaaacaaaacaagaaaaaatagagaattctacatactaaatctctctccttttttaattttaatatttgttatcatttatttattggtgctactgtttatccgtaataattgtggggaaaagatattaacatcacgtctttgtctctagtgcagtttttcgagatattccgtagtacatatttatttttaaacaacgacaaagaaatacagatatatcttaaaaaaaaaaaagcattttgtattaaagaatttaattctgatctcaaa

SEQ ID NO: 4709 - protein, 215 aa, Homo sapiens; identical to SEQ ID NO: 4691

SEQ ID NO: 4710 - DNA, 3429 bp, Homo sapiens
aaaagtcggctggtagcggggaggatcgcggaggcttggggcagccgggtagctcggaggtcgtggcgctgggggctagcaccagcgctctgtcgggaggcgcagcggttaggtggaccggtcagcggactcaccggccagggcgctcggtgctggaatttgatattcattgatccgggttttatccctcttcttttttcttaaacatttttttttaaaactgtattgtttctcgttttaatttatttttgcttgccattccccacttgaatcgggccgacggcttggggagattgctctacttccccaaatcactgtggattttggaaaccagcagaaagaggaaagaggtagcaagagctccagagagaagtcgaggaagagagagacggggtcagagagagcgcgcgggcgtgcgagcagcgaaagcgacaggggcaaagtgagtgacctgcttttgggggtgaccgccggagcgcggcgtgagccctcccccttgggatcccgcagctgaccagtcgcgctgacggacagacagacagacaccgcccccagccccagctaccacctcctccccggccggcggcggacagtggacgcggcggcgagccgcgggcaggggccggagcccgcgcccggaggcggggtggagggggtcggggctcgcggcgtcgcactgaaacttttcgtccaacttctgggctgttctcgcttcggaggagccgtggtccgcgcgggggaagccgagccgagcggagccgcgagaagtgctagctcgggccgggaggagccgcagccggaggagggggaggaggaagaagagaaggaagaggagagggggccgcagtggcgactcggcgctcggaagccgggctcatggacgggtgaggcggcggtgtgcgcagacagtgctccagccgcgcgcgctccccaggccctggcccgggcctcgggccggggaggaagagtagctcgccgaggcgccgaggagagcgggccgccccacagcccgagccggagagggagcgcgagccgcgccggccccggtcgggcctccgaaaccatgaactttctgctgtcttgggtgcattggagccttgccttgctgctctacctccaccatgccaagtggtcccaggctgcacccatggcagaaggaggagggcagaatcatcacgaagtggtgaagttcatggatgtctatcagcgcagctactgccatccaatcgagaccctggtggacatcttccaggagtaccctgatgagatcgagtacatcttcaagccatcctgtgtgcccctgatgcgatgcgggggctgctgcaatgacgagggcctggagtgtgtgcccactgaggagtccaacatcaccatgcagattatgcggatcaaacctcaccaaggccagcacataggagagatgagcttcctacagcacaacaaatgtgaatgcagaccaaagaaagatagagcaagacaagaaaatccctgtgggccttgctcagagcggagaaagcatttgtttgtacaagatccgcagacgtgtaaatgttcctgcaaaatgtgacaagccgaggcggtgagccgggcaggaggaaggagcctccctcagggtttcgggaaccagatctctcaccaggaaagactgatacagaacgatcgatacagaaaccacgctgccgccaccacaccatcaccatcgacagaacagtccttaatccagaaacctgaaatgaaggaagaggagactctgcgcagagcactttgggtccggagggcgagactccggcggaagcattcccgggcgggtgacccagcacggtccctcttggaattggattcgccattttatttttcttgctgctaaatcaccgagcccggaagattagagagttttatttctgggattcctgtagacacacccacccactctttttttaaattaacagtgctaatgttattggtgtcttcactggatgtatttgactgctgtggacttgagttgggaggggaatgttcccactcagatcctgacagggaagaggaggagatgagagactctggcatgatcttttttttgtcccacttggtggggccagggtcctctcccctgcccaggaatgtgcaaggccagggcatgggggcaaatatgacccagttttgggaacaccgacaaacccagccctggcgctgagcctctctaccccaggtcagacggacagaaagacagatcacaggtacagggatgaggacaccggctctgaccaggagtttggggagcttcaggacattgctgtgctttggggattccctccacatgctgcacgcgcatctcgcccccaggggcactgcctggaagattcaggagcctgggcggccttcgcttactctcacctgcttctgagttgcccaggagaccactggcagatgtcccggcgaagagaagagacacattgttggaagaagcagcccatgacagctccccttcctgggactcgccctcatcctcttcctgctccccttcctggggtgcagcctaaaaggacctatgtcctcacaccattgaaaccactagttctgtccccccaggagacctggttgtgtgtgtgtgagtggttgaccttcctccatcccctggtccttcccttcccttcccgaggcacagagagacagggcaggatccacgtgcccattgtggaggcagagaaaagagaaagtgttttatatacggtacttatttaatatccctttttaattagaaattaaaacagttaatttaattaaagagtagggttttttttcagtattcttggttaatatttaatttcaactatttatgagatgtatcttttgctctctcttgctctcttatttgtaccggtttttgtatataaaattcatgtttccaatctctctctccctgatcggtgacagtcactagcttatcttgaacagatatttaattttgctaacactcagctctgccctccccgatcccctggctccccagcacacattcctttgaaataaggtttcaatatacatctacatactatatatatatttggcaacttgtatttgtgtgtatatatatatatatatgtttatgtatatatgtgattctgataaaatagacattgctattctgttttttatatgtaaaaacaaaacaagaaaaaatagagaattctacatactaaatctctctccttttttaattttaatatttgttatcatttatttattggtgctactgtttatccgtaataattgtggggaaaagatattaacatcacgtctttgtctctagtgcagtttttcgagatattccgtagtacatatttatttttaaacaacgacaaagaaatacagatatatcttaaaaaaaaaaaagcattttgtattaaagaatttaattctgatctcaaa

SEQ ID NO: 4711 - protein, 167 aa, Homo sapiens
MNFLLSWVHWSLALLLYLHHAKWSQAAPMAEGGGQNHHEVVKFMDVYQRSYCHPIETLVDIFQEYPDEIEYIFKPSCVPLMRCGGCCNDEGLECVPTEESNITMQIMRIKPHQGQHIGEMSFLQHNKCECRPKKDRARQENPCGPCSERRKHLFVQDPQTCKCSCKM

SEQ ID NO: 4712 - DNA, 3687 bp, Homo sapiens
aaaagtcggctggtagcggggaggatcgcggaggcttggggcagccgggtagctcggaggtcgtggcgctgggggctagcaccagcgctctgtcgggaggcgcagcggttaggtggaccggtcagcggactcaccggccagggcgctcggtgctggaatttgatattcattgatccgggttttatccctcttcttttttcttaaacatttttttttaaaactgtattgtttctcgttttaatttatttttgcttgccattccccacttgaatcgggccgacggcttggggagattgctctacttccccaaatcactgtggattttggaaaccagcagaaagaggaaagaggtagcaagagctccagagagaagtcgaggaagagagagacggggtcagagagagcgcgcgggcgtgcgagcagcgaaagcgacaggggcaaagtgagtgacctgcttttgggggtgaccgccggagcgcggcgtgagccctcccccttgggatcccgcagctgaccagtcgcgctgacggacagacagacagacaccgcccccagccccagctaccacctcctccccggccggcggcggacagtggacgcggcggcgagccgcgggcaggggccggagcccgcgcccggaggcggggtggagggggtcggggctcgcggcgtcgcactgaaacttttcgtccaacttctgggctgttctcgcttcggaggagccgtggtccgcgcgggggaagccgagccgagcggagccgcgagaagtgctagctcgggccgggaggagccgcagccggaggagggggaggaggaagaagagaaggaagaggagagggggccgcagtggcgactcggcgctcggaagccgggctcatggacgggtgaggcggcggtgtgcgcagacagtgctccagccgcgcgcgctccccaggccctggcccgggcctcgggccggggaggaagagtagctcgccgaggcgccgaggagagcgggccgccccacagcccgagccggagagggagcgcgagccgcgccggccccggtcgggcctccgaaaccatgaactttctgctgtcttgggtgcattggagccttgccttgctgctctacctccaccatgccaagtggtcccaggctgcacccatggcagaaggaggagggcagaatcatcacgaagtggtgaagttcatggatgtctatcagcgcagctactgccatccaatcgagaccctggtggacatcttccaggagtaccctgatgagatcgagtacatcttcaagccatcctgtgtgcccctgatgcgatgcgggggctgctgcaatgacgagggcctggagtgtgtgcccactgaggagtccaacatcaccatgcagattatgcggatcaaacctcaccaaggccagcacataggagagatgagcttcctacagcacaacaaatgtgaatgcagaccaaagaaagatagagcaagacaagaaaaaaaatcagttcgaggaaagggaaaggggcaaaaacgaaagcgcaagaaatcccggtataagtcctggagcgtgtacgttggtgcccgctgctgtctaatgccctggagcctccctggcccccatccctgtgggccttgctcagagcggagaaagcatttgtttgtacaagatccgcagacgtgtaaatgttcctgcaaaaacacagactcgcgttgcaaggcgaggcagcttgagttaaacgaacgtacttgcagatgtgacaagccgaggcggtgagccgggcaggaggaaggagcctccctcagggtttcgggaaccagatctctcaccaggaaagactgatacagaacgatcgatacagaaaccacgctgccgccaccacaccatcaccatcgacagaacagtccttaatccagaaacctgaaatgaaggaagaggagactctgcgcagagcactttgggtccggagggcgagactccggcggaagcattcccgggcgggtgacccagcacggtccctcttggaattggattcgccattttatttttcttgctgctaaatcaccgagcccggaagattagagagttttatttctgggattcctgtagacacacccacccacatacatacatttatatatatatatattatatatatataaaaataaatatctctattttatatatataaaatatatatattctttttttaaattaacagtgctaatgttattggtgtcttcactggatgtatttgactgctgtggacttgagttgggaggggaatgttcccactcagatcctgacagggaagaggaggagatgagagactctggcatgatcttttttttgtcccacttggtggggccagggtcctctcccctgcccaggaatgtgcaaggccagggcatgggggcaaatatgacccagttttgggaacaccgacaaacccagccctggcgctgagcctctctaccccaggtcagacggacagaaagacagatcacaggtacagggatgaggacaccggctctgaccaggagtttggggagcttcaggacattgctgtgctttggggattccctccacatgctgcacgcgcatctcgcccccaggggcactgcctggaagattcaggagcctgggcggccttcgcttactctcacctgcttctgagttgcccaggagaccactggcagatgtcccggcgaagagaagagacacattgttggaagaagcagcccatgacagctccccttcctgggactcgccctcatcctcttcctgctccccttcctggggtgcagcctaaaaggacctatgtcctcacaccattgaaaccactagttctgtccccccaggagacctggttgtgtgtgtgtgagtggttgaccttcctccatcccctggtccttcccttcccttcccgaggcacagagagacagggcaggatccacgtgcccattgtggaggcagagaaaagagaaagtgttttatatacggtacttatttaatatccctttttaattagaaattaaaacagttaatttaattaaagagtagggttttttttcagtattcttggttaatatttaatttcaactatttatgagatgtatcttttgctctctcttgctctcttatttgtaccggtttttgtatataaaattcatgtttccaatctctctctccctgatcggtgacagtcactagcttatcttgaacagatatttaattttgctaacactcagctctgccctccccgatcccctggctccccagcacacattcctttgaaataaggtttcaatatacatctacatactatatatatatttggcaacttgtatttgtgtgtatatatatatatatatgtttatgtatatatgtgattctgataaaatagacattgctattctgttttttatatgtaaaaacaaaacaagaaaaaatagagaattctacatactaaatctctctccttttttaattttaatatttgttatcatttatttattggtgctactgtttatccgtaataattgtggggaaaagatattaacatcacgtctttgtctctagtgcagtttttcgagatattccgtagtacatatttatttttaaacaacgacaaagaaatacagatatatcttaaaaaaaaaaaagcattttgtattaaagaatttaattctgatctcaaa

SEQ ID NO: 4713 - protein, 232 aa, Homo sapiens; identical to SEQ ID NO: 4693

SEQ ID NO: 4714 - DNA, 3498 bp, Homo sapiens
aaaagtcggctggtagcggggaggatcgcggaggcttggggcagccgggtagctcggaggtcgtggcgctgggggctagcaccagcgctctgtcgggaggcgcagcggttaggtggaccggtcagcggactcaccggccagggcgctcggtgctggaatttgatattcattgatccgggttttatccctcttcttttttcttaaacatttttttttaaaactgtattgtttctcgttttaatttatttttgcttgccattccccacttgaatcgggccgacggcttggggagattgctctacttccccaaatcactgtggattttggaaaccagcagaaagaggaaagaggtagcaagagctccagagagaagtcgaggaagagagagacggggtcagagagagcgcgcgggcgtgcgagcagcgaaagcgacaggggcaaagtgagtgacctgcttttgggggtgaccgccggagcgcggcgtgagccctcccccttgggatcccgcagctgaccagtcgcgctgacggacagacagacagacaccgcccccagccccagctaccacctcctccccggccggcggcggacagtggacgcggcggcgagccgcgggcaggggccggagcccgcgcccggaggcggggtggagggggtcggggctcgcggcgtcgcactgaaacttttcgtccaacttctgggctgttctcgcttcggaggagccgtggtccgcgcgggggaagccgagccgagcggagccgcgagaagtgctagctcgggccgggaggagccgcagccggaggagggggaggaggaagaagagaaggaagaggagagggggccgcagtggcgactcggcgctcggaagccgggctcatggacgggtgaggcggcggtgtgcgcagacagtgctccagccgcgcgcgctccccaggccctggcccgggcctcgggccggggaggaagagtagctcgccgaggcgccgaggagagcgggccgccccacagcccgagccggagagggagcgcgagccgcgccggccccggtcgggcctccgaaaccatgaactttctgctgtcttgggtgcattggagccttgccttgctgctctacctccaccatgccaagtggtcccaggctgcacccatggcagaaggaggagggcagaatcatcacgaagtggtgaagttcatggatgtctatcagcgcagctactgccatccaatcgagaccctggtggacatcttccaggagtaccctgatgagatcgagtacatcttcaagccatcctgtgtgcccctgatgcgatgcgggggctgctgcaatgacgagggcctggagtgtgtgcccactgaggagtccaacatcaccatgcagattatgcggatcaaacctcaccaaggccagcacataggagagatgagcttcctacagcacaacaaatgtgaatgcagaccaaagaaagatagagcaagacaagaaaatccctgtgggccttgctcagagcggagaaagcatttgtttgtacaagatccgcagacgtgtaaatgttcctgcaaaaacacagactcgcgttgcaaggcgaggcagcttgagttaaacgaacgtacttgcagatctctcaccaggaaagactgatacagaacgatcgatacagaaaccacgctgccgccaccacaccatcaccatcgacagaacagtccttaatccagaaacctgaaatgaaggaagaggagactctgcgcagagcactttgggtccggagggcgagactccggcggaagcattcccgggcgggtgacccagcacggtccctcttggaattggattcgccattttatttttcttgctgctaaatcaccgagcccggaagattagagagttttatttctgggattcctgtagacacacccacccacatacatacatttatatatatatatattatatatatataaaaataaatatctctattttatatatataaaatatatatattctttttttaaattaacagtgctaatgttattggtgtcttcactggatgtatttgactgctgtggacttgagttgggaggggaatgttcccactcagatcctgacagggaagaggaggagatgagagactctggcatgatcttttttttgtcccacttggtggggccagggtcctctcccctgcccaggaatgtgcaaggccagggcatgggggcaaatatgacccagttttgggaacaccgacaaacccagccctggcgctgagcctctctaccccaggtcagacggacagaaagacagatcacaggtacagggatgaggacaccggctctgaccaggagtttggggagcttcaggacattgctgtgctttggggattccctccacatgctgcacgcgcatctcgcccccaggggcactgcctggaagattcaggagcctgggcggccttcgcttactctcacctgcttctgagttgcccaggagaccactggcagatgtcccggcgaagagaagagacacattgttggaagaagcagcccatgacagctccccttcctgggactcgccctcatcctcttcctgctccccttcctggggtgcagcctaaaaggacctatgtcctcacaccattgaaaccactagttctgtccccccaggagacctggttgtgtgtgtgtgagtggttgaccttcctccatcccctggtccttcccttcccttcccgaggcacagagagacagggcaggatccacgtgcccattgtggaggcagagaaaagagaaagtgttttatatacggtacttatttaatatccctttttaattagaaattaaaacagttaatttaattaaagagtagggttttttttcagtattcttggttaatatttaatttcaactatttatgagatgtatcttttgctctctcttgctctcttatttgtaccggtttttgtatataaaattcatgtttccaatctctctctccctgatcggtgacagtcactagcttatcttgaacagatatttaattttgctaacactcagctctgccctccccgatcccctggctccccagcacacattcctttgaaataaggtttcaatatacatctacatactatatatatatttggcaacttgtatttgtgtgtatatatatatatatatgtttatgtatatatgtgattctgataaaatagacattgctattctgttttttatatgtaaaaacaaaacaagaaaaaatagagaattctacatactaaatctctctccttttttaattttaatatttgttatcatttatttattggtgctactgtttatccgtaataattgtggggaaaagatattaacatcacgtctttgtctctagtgcagtttttcgagatattccgtagtacatatttatttttaaacaacgacaaagaaatacagatatatcttaaaaaaaaaaaagcattttgtattaaagaatttaattctgatctcaaa

SEQ ID NO: 4715 - protein, 191 aa, Homo sapiens; identical to SEQ ID NO: 4689

SEQ ID NO: 4716 - DNA, 2449 bp, Homo sapiens
ccgggtagctcggaggtcgtggcgctgggggctagcaccagcgctctgtcgggaggcgcagcggttaggtggaccggtcagcggactcaccggccagggcgctcggtgctggaatttgatattcattgatccgggttttatccctcttcttttttcttaaacatttttttttaaaactgtattgtttctcgttttaatttatttttgcttgccattccccacttgaatcgggccgacggcttggggagattgctctacttccccaaatcactgtggattttggaaaccagcagaaagaggaaagaggtagcaagagctccagagagaagtcgaggaagagagagacggggtcagagagagcgcgcgggcgtgcgagcagcgaaagcgacaggggcaaagtgagtgacctgcttttgggggtgaccgccggagcgcggcgtgagccctcccccttgggatcccgcagctgaccagtcgcgctgacggacagacagacagacaccgcccccagccccagctaccacctcctccccggccggcggcggacagtggacgcggcggcgagccgcgggcaggggccggagcccgcgcccggaggcggggtggagggggtcggggctcgcggcgtcgcactgaaacttttcgtccaacttctgggctgttctcgcttcggaggagccgtggtccgcgcgggggaagccgagccgagcggagccgcgagaagtgctagctcgggccgggaggagccgcagccggaggagggggaggaggaagaagagaaggaagaggagagggggccgcagtggcgactcggcgctcggaagccgggctcatggacgggtgaggcggcggtgtgcgcagacagtgctccagccgcgcgcgctccccaggccctggcccgggcctcgggccggggaggaagagtagctcgccgaggcgccgaggagagcgggccgccccacagcccgagccggagagggagcgcgagccgcgccggccccggtcgggcctccgaaaccatgaactttctgctgtcttgggtgcattggagccttgccttgctgctctacctccaccatgccaagtggtcccaggctgcacccatggcagaaggaggagggcagaatcatcacgaagtggtgaagttcatggatgtctatcagcgcagctactgccatccaatcgagaccctggtggacatcttccaggagtaccctgatgagatcgagtacatcttcaagccatcctgtgtgcccctgatgcgatgcgggggctgctgcaatgacgagggcctggagtgtgtgcccactgaggagtccaacatcaccatgcaggtgggcatctttgggaagtggggcaagggggggatagggaggggggtaacactttgggaacaggtggtcccaggtcgtttcctggctagatttgccttgtctggctcctgcccctgagttgcacaggggaggtatggtggggtcttgccttctgtggagaagatgcttcattcccagcccaggttcccagcaagccccaaccatctccttctccctgatggttgcccatgggctcaggaggggacagatggatgcctgtgtcaggagcccctctctccctctcttggagagagtcctgagtgcccccccttcttgggggctttgtttgggaagctggatgagcctggtccatggagagtttaaaaagtcttttggtgttacctggtaatggggcacatctcagcccagatagggtgggagggagctgtgaaacacagggagggggttgctttcgggtatctactaggagtcagggtgaagcctagagaggatgaaagaaggggaggggatggggagtggtaagaacctaggatttgaattcccagcctggccaacccttgcagccatgtcttggcctcaagtggaacaagggctccttgaggccagcagggttgggggagttggggtgggcctgagcctctttcctgctagagctcttggtcctccctgcctccaccacccatccctgctctgcagaacccctgggtgctgagtggcaggagccccagggttgtcccatctgggtatggctggctgggtcactaacctctgtgatctgcttccttcctttccagattatgcggatcaaacctcaccaaggccagcacataggagagatgagcttcctacagcacaacaaatgtgaatgcaggtgaggatgtagtcacggattcattatcagcaagtggctgcagggtgcctgatctgtgccagggttaagcatgctgtactttttggcccccgtccagcttcccgctatgtgacctttggcattttacttcaatgtgcctcagtttctacatctgtaaaatgggcacaatagtagtatacttcatagcattgttataatgattaaacaagttatatatgaaaagattaaaacagtgttgctccat

SEQ ID NO: 4717 - protein, 143 aa, Homo sapiens
MNFLLSWVHWSLALLLYLHHAKWSQAAPMAEGGGQNHHEVVKFMDVYQRSYCHPIETLVDIFQEYPDEIEYIFKPSCVPLMRCGGCCNDEGLECVPTEESNITMQVGIFGKWGKGGIGRGVTLWEQVVPGRFLARFALSGSCP

SEQ ID NO: 4718 - DNA, 1921 bp, Homo sapiens
gcctggccggccgcgtgttcccggagcctcggctgcccgaatggggagcccagagtggcgagcggcacccctccccccgccagccctccgcgggaaggtgacctctcgagtggtcccaggctgcacccatggcagaaggaggagggcagaatcatcacgaagtggtgaagttcatggatgtctatcagcgcagctactgccatccaatcgagaccctggtggacatcttccaggagtaccctgatgagatcgagtacatcttcaagccatcctgtgtgcccctgatgcgatgcgggggctgctgcaatgacgagggcctggagtgtgtgcccactgaggagtccaacatcaccatgcagattatgcggatcaaacctcaccaaggccagcacataggagagatgagcttcctacagcacaacaaatgtgaatgcagaccaaagaaagatagagcaagacaagaaaatccctgtgggccttgctcagagcggagaaagcatttgtttgtacaagatccgcagacgtgtaaatgttcctgcaaaaacacagactcgcgttgcaaggcgaggcagcttgagttaaacgaacgtacttgcagatgtgacaagccgaggcggtgagccgggcaggaggaaggagcctccctcagggtttcgggaaccagatctctcaccaggaaagactgatacagaacgatcgatacagaaaccacgctgccgccaccacaccatcaccatcgacagaacagtccttaatccagaaacctgaaatgaaggaagaggagactctgcgcagagcactttgggtccggagggcgagactccggcggaagcattcccgggcgggtgacccagcacggtccctcttggaattggattcgccattttatttttcttgctgctaaatcaccgagcccggaagattagagagttttatttctgggattcctgtagacacacccacccacatacatacatttatatatatatatattatatatatataaaaataaatatctctattttatatatataaaatatatatattctttttttaaattaacagtgctaatgttattggtgtcttcactggatgtatttgactgctgtggacttgagttgggaggggaatgttcccactcagatcctgacagggaagaggaggagatgagagactctggcatgatcttttttttgtcccacttggtggggccagggtcctctcccctgcccaggaatgtgcaaggccagggcatgggggcaaatatgacccagttttgggaacaccgacaaacccagccctggcgctgagcctctctaccccaggtcagacggacagaaagacagatcacaggtacagggatgaggacaccggctctgaccaggagtttggggagcttcaggacattgctgtgctttggggattccctccacatgctgcacgcgcatctcgcccccaggggcactgcctggaagattcaggagcctgggcggccttcgcttactctcacctgcttctgagttgcccaggagaccactggcagatgtcccggcgaagagaagagacacattgttggaagaagcagcccatgacagctccccttcctgggactcgccctcatcctcttcctgctccccttcctggggtgcagcctaaaaggacctatgtcctcacaccattgaaaccactagttctgtccccccaggagacctggttgtgtgtgtgtgagtggttgaccttcctccatcccctggtccttcccttcccttcccgaggcacagagagacagggcaggatccacgtgcccattgtggaggcagagaaaagagaaagtgttttatatacggtacttatttaatatccctttttaattagaaattaaaacagttaatttaattaaagagtagggttttttttcagt

SEQ ID NO: 4719 - protein, 163 aa, Homo sapiens
MAEGGGQNHHEVVKFMDVYQRSYCHPIETLVDIFQEYPDEIEYIFKPSCVPLMRCGGCCNDEGLECVPTEESNITMQIMRIKPHQGQHIGEMSFLQHNKCECRPKKDRARQENPCGPCSERRKHLFVQDPQTCKCSCKNTDSRCKARQLELNERTCRCDKPRR

SEQ ID NO: 4720 - DNA, 2338 bp, Homo sapiens
gcctggccggccgcgtgttcccggagcctcggctgcccgaatggggagcccagagtggcgagcggcacccctccccccgccagccctccgcgggaaggtgacctctcgagtggtcccaggctgcacccatggcagaaggaggagggcagaatcatcacgaagtggtgaagttcatggatgtctatcagcgcagctactgccatccaatcgagaccctggtggacatcttccaggagtaccctgatgagatcgagtacatcttcaagccatcctgtgtgcccctgatgcgatgcgggggctgctgcaatgacgagggcctggagtgtgtgcccactgaggagtccaacatcaccatgcagattatgcggatcaaacctcaccaaggccagcacataggagagatgagcttcctacagcacaacaaatgtgaatgcagaccaaagaaagatagagcaagacaagaaaatccctgtgggccttgctcagagcggagaaagcatttgtttgtacaagatccgcagacgtgtaaatgttcctgcaaaaacacagactcgcgttgcaaggcgaggcagcttgagttaaacgaacgtacttgcagatgtgacaagccgaggcggtgagccgggcaggaggaaggagcctccctcagggtttcgggaaccagatctctcaccaggaaagactgatacagaacgatcgatacagaaaccacgctgccgccaccacaccatcaccatcgacagaacagtccttaatccagaaacctgaaatgaaggaagaggagactctgcgcagagcactttgggtccggagggcgagactccggcggaagcattcccgggcgggtgacccagcacggtccctcttggaattggattcgccattttatttttcttgctgctaaatcaccgagcccggaagattagagagttttatttctgggattcctgtagacacacccacccacatacatacatttatatatatatatattatatatatataaaaataaatatctctattttatatatataaaatatatatattctttttttaaattaacagtgctaatgttattggtgtcttcactggatgtatttgactgctgtggacttgagttgggaggggaatgttcccactcagatcctgacagggaagaggaggagatgagagactctggcatgatcttttttttgtcccacttggtggggccagggtcctctcccctgcccaggaatgtgcaaggccagggcatgggggcaaatatgacccagttttgggaacaccgacaaacccagccctggcgctgagcctctctaccccaggtcagacggacagaaagacagatcacaggtacagggatgaggacaccggctctgaccaggagtttggggagcttcaggacattgctgtgctttggggattccctccacatgctgcacgcgcatctcgcccccaggggcactgcctggaagattcaggagcctgggcggccttcgcttactctcacctgcttctgagttgcccaggagaccactggcagatgtcccggcgaagagaagagacacattgttggaagaagcagcccatgacagctccccttcctgggactcgccctcatcctcttcctgctccccttcctggggtgcagcctaaaaggacctatgtcctcacaccattgaaaccactagttctgtccccccaggagacctggttgtgtgtgtgtgagtggttgaccttcctccatcccctggtccttcccttcccttcccgaggcacagagagacagggcaggatccacgtgcccattgtggaggcagagaaaagagaaagtgttttatatacggtacttatttaatatccctttttaattagaaattaaaacagttaatttaattaaagagtagggttttttttcagtattcttggttaatatttaatttcaactatttatgagatgtatcttttgctctctcttgctctcttatttgtaccggtttttgtatataaaattcatgtttccaatctctctctccctgatcggtgacagtcactagcttatcttgaacagatatttaattttgctaacactcagctctgccctccccgatcccctggctccccagcacacattcctttgaaataaggtttcaatatacatctacatactatatatatatttggcaacttgtatttgtgtgtatatatatatatatatgtttatgtatatatgtgattctgataaaatagacattgctattctgttttttatatgtaaaaacaaaacaagaaaaaatagagaattctacatactaaatctctctccttttttaatttt

SEQ ID NO: 4721 - protein, 163 aa, Homo sapiens; identical to SEQ ID NO: 4719

SEQ ID NO: 4722 - DNA, 2545 bp, Homo sapiens
gcctggccggccgcgtgttcccggagcctcggctgcccgaatggggagcccagagtggcgagcggcacccctccccccgccagccctccgcgggaaggtgacctctcgagtggtcccaggctgcacccatggcagaaggaggagggcagaatcatcacgaagtggtgaagttcatggatgtctatcagcgcagctactgccatccaatcgagaccctggtggacatcttccaggagtaccctgatgagatcgagtacatcttcaagccatcctgtgtgcccctgatgcgatgcgggggctgctgcaatgacgagggcctggagtgtgtgcccactgaggagtccaacatcaccatgcagattatgcggatcaaacctcaccaaggccagcacataggagagatgagcttcctacagcacaacaaatgtgaatgcagaccaaagaaagatagagcaagacaagaaaatccctgtgggccttgctcagagcggagaaagcatttgtttgtacaagatccgcagacgtgtaaatgttcctgcaaaaacacagactcgcgttgcaaggcgaggcagcttgagttaaacgaacgtacttgcagatgtgacaagccgaggcggtgagccgggcaggaggaaggagcctccctcagggtttcgggaaccagatctctcaccaggaaagactgatacagaacgatcgatacagaaaccacgctgccgccaccacaccatcaccatcgacagaacagtccttaatccagaaacctgaaatgaaggaagaggagactctgcgcagagcactttgggtccggagggcgagactccggcggaagcattcccgggcgggtgacccagcacggtccctcttggaattggattcgccattttatttttcttgctgctaaatcaccgagcccggaagattagagagttttatttctgggattcctgtagacacacccacccacatacatacatttatatatatatatattatatatatataaaaataaatatctctattttatatatataaaatatatatattctttttttaaattaacagtgctaatgttattggtgtcttcactggatgtatttgactgctgtggacttgagttgggaggggaatgttcccactcagatcctgacagggaagaggaggagatgagagactctggcatgatcttttttttgtcccacttggtggggccagggtcctctcccctgcccaggaatgtgcaaggccagggcatgggggcaaatatgacccagttttgggaacaccgacaaacccagccctggcgctgagcctctctaccccaggtcagacggacagaaagacagatcacaggtacagggatgaggacaccggctctgaccaggagtttggggagcttcaggacattgctgtgctttggggattccctccacatgctgcacgcgcatctcgcccccaggggcactgcctggaagattcaggagcctgggcggccttcgcttactctcacctgcttctgagttgcccaggagaccactggcagatgtcccggcgaagagaagagacacattgttggaagaagcagcccatgacagctccccttcctgggactcgccctcatcctcttcctgctccccttcctggggtgcagcctaaaaggacctatgtcctcacaccattgaaaccactagttctgtccccccaggagacctggttgtgtgtgtgtgagtggttgaccttcctccatcccctggtccttcccttcccttcccgaggcacagagagacagggcaggatccacgtgcccattgtggaggcagagaaaagagaaagtgttttatatacggtacttatttaatatccctttttaattagaaattaaaacagttaatttaattaaagagtagggttttttttcagtattcttggttaatatttaatttcaactatttatgagatgtatcttttgctctctcttgctctcttatttgtaccggtttttgtatataaaattcatgtttccaatctctctctccctgatcggtgacagtcactagcttatcttgaacagatatttaattttgctaacactcagctctgccctccccgatcccctggctccccagcacacattcctttgaaataaggtttcaatatacatctacatactatatatatatttggcaacttgtatttgtgtgtatatatatatatatatgtttatgtatatatgtgattctgataaaatagacattgctattctgttttttatatgtaaaaacaaaacaagaaaaaatagagaattctacatactaaatctctctccttttttaattttaatatttgttatcatttatttattggtgctactgtttatccgtaataattgtggggaaaagatattaacatcacgtctttgtctctagtgcagtttttcgagatattccgtagtacatatttatttttaaacaacgacaaagaaatacagatatatcttaaaaaaaaaaaagcattttgtattaaagaatttaattctgatctcaaa

SEQ ID NO: 4723 - protein, 163 aa, Homo sapiens; identical to SEQ ID NO: 4719

SEQ ID NO: 4724 - DNA, 12170 bp, Homo sapiens
cttggctgtctctgggagcagggctggggtacctgagtggggtgcatttggggtgtgtgggaaggagagggaaagaaagatggacagtgggactctcccctagcagggtctggtgttccgtaggctagagtgcccctctgctctgcgagtgctgggcgggaggggagttggtgagagctggagacccccaggaagggctggcagaagcctttccttttgggtgctgtcaggtccgcatgtcttggcgtgttgaccttcacagcttctggcgaggggaggaatgatctgatgcgggtggggagggttagaggaggcctcaggcctaaggtggtgcagggggccccctaggggctgggcagtgccaaggcataaaagccttccctggtccctggtggcatttgaaggtgcccaggtgagaggggcttggcacctcctcaccctgggagggagaagaaaccagggaacaggtaggagtgggagacaggtgaggctttggaaatctattgaggctctggagagatttgtgtagagaggaaaatgtggttctcccccagggtctcctcctgggtttttaccctctaagcaacctgtgggcatgctgggttattcctaaggactagaagagcttggatgggggagggtggttggtgcccttcggtcctcggcacccccctccgtctccaacaccagctcaccctggtatttgtcatgtcagcaggagaaggtcaccatgttgtttttctcgcccctagtccttccttcctgccccagtccaaatttgtcctcctatttgaccttaatacttaccatggctttggaccagggaactagggggatagtgagagcagggagagggaagtgtggggaaggtacaggggacctcgacagtgaagcattctggggttttcctcctgcatttcgagctccccagcccccaacatctggttagtctttaacttcctcgggttcataaccatagcagtccaggagtggtgggcatattctgtgcccgtggggacccccggttgtgtcctgttcgactcagaagacttggagaagccagaggctgttggtgggagggaagtgaggagggaggaggggctgggtggctgggcctgtgcaccccagcccctgcccatgcccatgccttgctctctttctgtcctcagtggtcccaggctgcacccatggcagaaggaggagggcagaatcatcacgaaggtgagtccccctggctgttggatggggttccctgtcctctcaggggatgggtggatggcctaattcctttttcttcagaactgtggggaggaaggggaaggggcacaggaatataaggatcaagaaagaaagagctgggcaccacgaggttcaccctcagtttcgtgaggactctccgctgttcaggtctctgctagaagtaggacttgttgcctttttcttctgctctttccagtaaaattttatttggagaaggagtcgtgcgcacagagcaggaagacagtgttcagggatcctaggtgttgggggaagtgtcccttgtttcccctagctcccaggggagagtggacatttagtgtcatttcctatatagacatgtcccatttgtgggaactgtgacccttcctgtgtgagctggaggcacagagggctcagcctaatgggatctctcctcccttccctggtttgcattcctttgggggtggagaaaaccccatttgactatgttcgggtgctgtgaacttccctcccaggccagcagagggctggctgtagctcccaggcgccccgcccccctgcccaaccccgagtccgcctgccttttgttccgttgtggtttggatcctcccatttctctggggacaccctggctctccccaccactgactgtggcctgtgctctccacctctggggagggaaggccctggggtcttccttcccgcgagtttccctgacctaaatctggcgtggctgggtagtggccagcagtggtgatgcccagcctgttctgcctcctccttccccaccccaggagccctttccttggcctaggacctggcttctcagccactgaccggccccctgcttccagtgcgccacttaccccttccagcttcccagtggtctctggtctgggagaggcaggacaaaggtctttgtttgctggagaaaaggttgtctgcgataaataaggaaaaccacgaaagcctggttgttggagtgtacgtgtgtgctcccccaggcagtggaggccagccctccttggaggggcggctgcctgatgaaggatgcgggtgaggttccccgcctccacctcccatgggacttggggattcattccaaggggaagctttttgggggaattcctaccccaggtctttttaccctcagttaccaaccccttgcccaggccagaccttcctgctatcccctcctgggccacaagcctggccctcctctgtcccaattgtgatgaaggggcagttcaaaacttcttgattagtcatcttctcccctatcgacttggctttaaaaaatgaccttttcagacttctagtctcgttcactctttttgatgatgctttgccgtaacccttcgtgggtagagaaggattctgtgcccattggtggtctggataaaagaaatagagacctcacaggaagcagtggactggcctgtttccccactgttctttctgttttcacacctgtggccttctccccaccttcttcccaatcaacctattgtgtacatagcccccctcattgtcctttattcttctggaaagcagaccttggagggaggagtgagggggaggctcagctgtggtctctggggggtgggggttgggagctggggtggaagtccacgaagcatacacttaagatgctttggtgaagttctaaacttcatattacccaggctgaaaaaagagcacttgttcctagggctggaaatggaagccaaaacaccacctttttcagcctgtttcagcatctttagagatcagcccaacccacttacacagttgagcagagttggaggcctagagaggggagggactggcccaaggtcataccaactcatggccagagcctgggcctcctcactggccaggtgttatttcttccctctgggtagggaacctatttcagggacaggattgctatgtggtagtggtggtggggtgcgataggcgtggcaggctgggccacaatttggagtagtcatgccagagtcctgcatttatttattctcaagggccccgcctctgtggcccagaattaccccttcatgctccagtgcaccccaggcttcgtggccagcctgggaaactgtctctaccctggtctcccttcagatcagcttctagaaatgtttcgtggctacagtggcagcactgttttttccatgatgcaagcagtttgccctcttgggcggggttatcagtggctggcagggctggcacagcgtgtccgcccactgccacctgtgggttccaggagggcccagcccctgtgctgatgcccaccaccttctcagctcatgtctggggaagaggactggcagggggaaaggtgcctcctcctgaaaggtgcctcctctgtttttgcctaatataggcttgggaacactttgatgtcagctaattctgactcctttacttactagctgtgcggccttggggcaacttacttagcctctttgagcctcctgttccccatctgtaaaatggaatctcaatagtgtctaatagtaccatgtggagaaacttgtgtgaaatgatagctgtggactactgtacacagtactcaggatgtagtaagtgctcaataaacagctgttggtatggttgacgttatggtagtggttgtggggaggacgtaggaaactggagactagcttggcaaagctggctcttcctccttttagggaaagcttagagcatccccatggggtatacccatactcagactgtcctctggcatcgaggttggcccaggattcagttcagctgtcacagtgaggtggcgggatcagatgtggcaggccatgtcccttggaacttgagtacatcgtgtgatctctggaatgaaaacaggccttcaccagtgttgatggtggaaagcttagggaagtgcttcaaacacagtaggagggacttacgttagattttggaaggacttgcctgattcggaagctccaaagagtggcattacagagctgggtggagagaggggctagccatcttttgtgtcgcccaccgggctcatgtgtcatcgcctctcatgcagtggtgaagttcatggatgtctatcagcgcagctactgccatccaatcgagaccctggtggacatcttccaggagtaccctgatgagatcgagtacatcttcaagccatcctgtgtgcccctgatgcgatgcgggggctgctgcaatgacgagggcctggagtgtgtgcccactgaggagtccaacatcaccatgcagattatgcggatcaaacctcaccaaggccagcacataggagagatgagcttcctacagcacaacaaatgtgaatgcagaccaaagaaagatagagcaagacaagaaaagtaagtggccctgactttagcacttctccctctccatggccggttgtcttggtttggggctcttggctacctctgttgggggctcccatagcctccctgggtcagggacttggtcttgtgggggacttgtggtggcagcaacaatgggatggagccaactccaggatgatggctctagggctagtgagaaaacatagccaggagcctggcacttcctttggaagggacaatgccttctgggtctccagatcattcctgaccaggacttgctgtttcggtgtgtcagggggcactgtggacactggctcactggcttgctctaggacacccacagtggggagagggagtgggtggcagagaggccagcttttgtgtgtcagaggaaatggcctcttttggtggctgctgtgacggtgcagttggatgcgaggccggctggagggtggtttctcagtgcatgccctcctgtaggcggcaggcggcagacacacagccctcttggccagggagaaaaagttgaatgttggtcattttcagaggcttgtgagtgctccgtgttaaggggcaggtaggatggggtgggggacaaggtctggcggcagtaacccttcaagacagggtgggcggctggcatcagcaagagcttgcagggaaagagagactgagagagagcacctgtgccctgccctttcccccacaccatcttgtctgcctccagtgctgtgcggacattgaagcccccaccaggcctcaaccccttgcctcttccctcagctcccagcttccagagcgaggggatgcggaaaccttccttccaccctttggtgctttctcctaagggggacagacttgccctctctggtcccttctccccctcctttcttccctgtgacagacatcctgaggtgtgttctcttgggcttggcaggcatggagagctctggttctcttgaaggggacaggctacagcctgccccccttcctgtttccccaaatgactgctctgccatggggagagtagggggctcgcctgggctcggaagagtgtctggtgagatggtgtagcaggctttgacaggctggggagagaactccctgccaagtaccgcccaagcctctcctccccagacctccttaactcccaccccatcctgctgcctgcccagggctccaggacacccagccctgcctcccagtccaggtcgtgctgagcaggctggtgttgctcttggttccgtgccagctcccaaggtagccgcttcccccacaccgggattcccagaggttctgtcgcagttgcaaatgaaggcacaaggcctgatacacagccctccctcccactcctgctccccatccaggcaggtctctgaccttctccccaaagtctggcctaccttttatcacccccggaccttcagggtcagacttggacagggctgctgggcaaagagccttccctcaggctttgccccctgccggggactgggagccactgtgagtgtggagacctttgggtcctgtgccctccacccagtctcggcttcccaccaaagccttgtcaggggctgggtttgccatcccatggtgggcagcgtgaggagaagaaagagccatcgagtgcttgctgcccagacacgcctgtgtgcgcccgcgcatgcctccccagagaccacctgcctcctgacacttcctccgggaagcggccctgtgtggctttgctttggtcgttcccccatccctgcccaccttaccacttcttttactccccccaccgcccccgctctctctctgtctctgtttttttattttccagaaaatcagttcgaggaaagggaaaggggcaaaaacgaaagcgcaagaaatcccggtataagtcctggagcgtgtacgttggtgcccgctgctgtctaatgccctggagcctccctggcccccagtacaacctccgcctgccattccctgtaaccctgcctccctcccctggtccttccctggctctcatcctcctggcccgtgtctctctctcactctctcactccactaattggcaccaacgggtagatttggtggtggcattgctggtccagggttggggtgaatgggggtgccgacttggcctggaggattaagggaggggaccctggcttggctgggcaccgattttctctcacccactgggcactggtggcgggcccatgttggcacaggtgcctgctcacccaactggtttccattgctctaggcttctgcactcgtctggaagctgagggtggtggggagggcagacatggcccaagaagggctgtgaatgactggaggcagcttgctgaatgactccttggctgaaggaggagcttgggtgggatcagacaccatgtggcggcctcccttcatctggtggaagtgccctggctcctcacggaggtggggcctctggaggggagccccctattccggcccaacccatggcacccacagaggcctccttgcagggcagcctcttcctctgggtcggaggctgtggtgggccctgccctgggccctctggccaccagcggcctggcctggggacaccgcctccgggcttagcctcccatcacaccctactttagcccaccttggtggaagggcctggacatgagccttgcacggggagaaggtggcccctgattgccatccccagcaggtgaagagtcaaggcgtgctccgatgggggcaacagcagttgggtccctgtggcctgagactcacccttgtctcccagagacacagcattgccccttatggcagcctctccctgcactctctgcccgtctgtgcccgcctcttcctgcggcaggtgtcctagccagtgctgcctctttccgccgctctctctgtcttttgctgtagcgctcggatccttccagggcctgggggctgaccggctgggtgggggtgcagctgcggacatgttagggggtgttgcatggtgattttttttctctctctctgctgatgctctagcttagatgtctttccttttgcctttttgcagtccctgtgggccttgctcagagcggagaaagcatttgtttgtacaagatccgcagacgtgtaaatgttcctgcaaaaacacagactcgcgttgcaaggcgaggcagcttgagttaaacgaacgtacttgcaggttggttcccagagggcaagcaagtcagagaggggcatcacacagagatggggagagagagagagaaagagagtgagcgagcgagcgagcgggagagcgcctgagaggggccagctgcttgctcagtttctagctgcctgcctggtgactgctgccttctctgcttttaaggcccctgtggtgggctgcaggcactggtccagcctggcggggcctgttccgaggttgccctggttgcctgagtggtaggctggtgtggcttagtgtagtggtgtggacgcaagctgtgtgttgtgtcctgtggtccttctgctcatagtggctgttggtcctgatgttattactacctctggtagtaatgctgagaagctgaaagccgattccaggtgtggacaatgtcaacaaagcacagatgctctcgctggggccttgcctcggccctttgaagtctgcatggctgggcttctcactcactcagtgtttcttgctgggggaaggaattgagtctcccacttcagactgggcctccctgaggaaagggttgtgtctccccactcagactgaggttccctgagggtagggctgtgtctctcccctccgacctgggctccctgatagggctgtctccccgctcagactgaggctccctcaggccagggctatgtctccctcctcagactggggctctgagggcaaggggtctggctgttcgtttaggatggggcacttttgcctacacactgaaggagctgtagcatccaagaatactagatacctttaatcctccaccagtcatggtgacaaccccaagcagcccacacattttcaagtgcccccaggatgcgtggagggaggggtctgtgcccattctcctgacattagcctgtgagctccgtaagcccgggcctcgtttacgtacctttgtgagccccgggcatctgtacctctttcctttgcccatactggggaccaaggaagtgtcaagtgcatgagtgaatgtgtgactcagttcagagggtgaggtcaggagcacagggtcgggacaggtggctggcatcttttaatgccttagcttatgttctttataccaacttggcctgtgctcagagtgagggaggccctgggggtcagggtaagcgtcagtcagggaggcaagactttgtggggatttcctagacagggccaaggcacccccagctcaccccgaggctgtgttagggaagtccttggagtgtctcccctcccccagcaatgttcttgtggcttgtgtgtgctcaggggatgctgggaaccaggcctgggtagttggtgtggggtgctgtctgtcttggccctatgtgaaaccaagagggcgtatattagtgctggggtgggggctctgcctaacttcagggctggatgaggggagtctcagttccccaggggtccttgggaaagataagggacttgacattttagggtttttaggtgattattctgctgatgggggtttgtgtgaagtgacctgggagctaactgaagttactctaacctcccaatacctttacccaacccccaagctggctgtatctgggaatatcagtttccaaaattggaggcttaggactccgtttcggggctccccagaagggtagggcctgttctgcctccttctcacaatcacccaggggcaggggcatgctgagaaagttcttggaggccccctttgcttcagctggagtagtgaagccgccgaattgtctctccccatcctaagtgaagcagcatatttgaaaggaaagacaacctgttacctgggcctgcaacctccaggcagctcaagagagatgaggcctacagccacagtgggaggggacatggggaatggagatggtccctcaccttcctggggcctcctgctctacgctaccccctcgggagcctcctgtccccagggcaggcccttgccattgttggtcacccggccaagcctctctgcctcaggcgttctcccagaagatctgcccactctcttccccacaccagcccctagagactgaactgaaaaccctcctcagcagggagcctcttctgattaacttcatccagctctggtcacccatcagctcttaaaatgtcaagtggggactgttctttggtatccgttcatttgttgctttgtaaagtgttcccatgtccttgtcttgtctcaagtagattgcaagctcaggagggtagactgggagcccctgagtggagctgctgctcaggccggggctccctgagggcagggctggggctgttctcatactggggctttctgccccaggaccacaccttcctgtcctctctgctcttatggtgccggaggctgcagtgacccaggggcccccaggaatggggaggccgcctgcctcatcgccaggcctcctcacttggccctaaccccagcctttgttttccatttccctcagatgtgacaagccgaggcggtgagccgggcaggaggaaggagcctccctcagggtttcgggaaccagatctctcaccaggaaagactgatacagaacgatcgatacagaaaccacgctgccgccaccacaccatcaccatcgacagaacagtccttaatccagaaacctgaaatgaaggaagaggagactctgcgcagagcactttgggtccggagggcgagactccggcggaagcattcccgggcgggtgacccagcacggtccctcttggaattggattcgccattttatttttcttgctgctaaatcaccgagcccggaagattagagagttttatttctgggattcctgtagacacacccacccacatacatacatttatatatatatatattatatatatataaaaataaatatctctattttatatatataaaatatatatattctttttttaaattaacagtgctaatgttattggtgtcttcactggatgtatttgactgctgtggacttgagttgggaggggaatgttcccactcagatcctgacagggaagaggaggagatgagagactctggcatgatcttttttttgtcccacttggtggggccagggtcctctcccctgcccaggaatgtgcaaggccagggcatgggggcaaatatgacccagttttgggaacaccgacaaacccagccctggcgctgagcctctctaccccaggtcagacggacagaaagacagatcacaggtacagggatgaggacaccggctctgaccaggagtttggggagcttcaggacattgctgtgctttggggattccctccacatgctgcacgcgcatctcgcccccaggggcactgcctggaagattcaggagcctgggcggccttcgcttactctcacctgcttctgagttgcccaggagaccactggcagatgtcccggcgaagagaagagacacattgttggaagaagcagcccatgacagctccccttcctgggactcgccctcatcctcttcctgctccccttcctggggtgcagcctaaaaggacctatgtcctcacaccattgaaaccactagttctgtccccccaggagacctggttgtgtgtgtgtgagtggttgaccttcctccatcccctggtccttcccttcccttcccgaggcacagagagacagggcaggatccacgtgcccattgtggaggcagagaaaagagaaagtgttttatatacggtacttatttaatatccctttttaattagaaattaaaacagttaatttaattaaagagtagggttttttttcagtattcttggttaatatttaatttcaactatttatgagatgtatcttttgctctctcttgctctcttatttgtaccggtttttgtatataaaattcatgtttccaatctctctctccctgatcggtgacagtcactagcttatcttgaacagatatttaattttgctaacactcagctctgccctccccgatcccctggctccccagcacacattcctttgaaataaggtttcaatatacatctacatactatatatatatttggcaacttgtatttgtgtgtatatatatatatatatgtttatgtatatatgtgattctgataaaatagacattgctattctgttttttatatgtaaaaacaaaacaagaaaaaatagagaattctacatactaaatctctctccttttttaattttaatatttgttatcatttatttattggtgctactgtttatccgtaataattgtggggaaaagatattaacatcacgtctttgtctctagtgcagtttttcgagatattccgtagtacatatttatttttaaacaacgacaaagaaatacagatatatcttaaaaaaaaaaaagcattttgtattaaagaatttaattctgatctcaaa

SEQ ID NO: 4725 - protein, 98 aa, Homo sapiens
MDVYQRSYCHPIETLVDIFQEYPDEIEYIFKPSCVPLMRCGGCCNDEGLECVPTEESNITMQIMRIKPHQGQHIGEMSFLQHNKCECRPKKDRARQEK

SEQ ID NO: 4726 - DNA, 2209 bp, Homo sapiens
ttgccttgtctggctcctgcccctgagttgcacaggggaggtatggtggggtcttgccttctgtggagaagatgcttcattcccagcccaggttcccagcaagccccaaccatctccttctccctgatggttgcccatgggctcaggaggggacagatggatgcctgtgtcaggagcccctctctccctctcttggagagagtcctgagtgcccccccttcttgggggctttgtttgggaagctggatgagcctggtccatggagagtttaaaaagtcttttggtgttacctggtaatggggcacatctcagcccagatagggtgggagggagctgtgaaacacagggagggggttgctttcgggtatctactaggagtcagggtgaagcctagagaggatgaaagaaggggaggggatggggagtggtaagaacctaggatttgaattcccagcctggccaacccttgcagccatgtcttggcctcaagtggaacaagggctccttgaggccagcagggttgggggagttggggtgggcctgagcctctttcctgctagagctcttggtcctccctgcctccaccacccatccctgctctgcagaacccctgggtgctgagtggcaggagccccagggttgtcccatctgggtatggctggctgggtcactaacctctgtgatctgcttccttcctttccagattatgcggatcaaacctcaccaaggccagcacataggagagatgagcttcctacagcacaacaaatgtgaatgcagaccaaagaaagatagagcaagacaagaaaatccctgtgggccttgctcagagcggagaaagcatttgtttgtacaagatccgcagacgtgtaaatgttcctgcaaaatgtgacaagccgaggcggtgagccgggcaggaggaaggagcctccctcagggtttcgggaaccagatctctcaccaggaaagactgatacagaacgatcgatacagaaaccacgctgccgccaccacaccatcaccatcgacagaacagtccttaatccagaaacctgaaatgaaggaagaggagactctgcgcagagcactttgggtccggagggcgagactccggcggaagcattcccgggcgggtgacccagcacggtccctcttggaattggattcgccattttatttttcttgctgctaaatcaccgagcccggaagattagagagttttatttctgggattcctgtagacacacccacccacatacatacatttatatatatatatattatatatatataaaaataaatatctctattttatatatataaaatatatatattctttttttaaattaacagtgctaatgttattggtgtcttcactggatgtatttgactgctgtggacttgagttgggaggggaatgttcccactcagatcctgacagggaagaggaggagatgagagactctggcatgatcttttttttgtcccacttggtggggccagggtcctctcccctgcccaggaatgtgcaaggccagggcatgggggcaaatatgacccagttttgggaacaccgacaaacccagccctggcgctgagcctctctaccccaggtcagacggacagaaagacagatcacaggtacagggatgaggacaccggctctgaccaggagtttggggagcttcaggacattgctgtgctttggggattccctccacatgctgcacgcgcatctcgcccccaggggcactgcctggaagattcaggagcctgggcggccttcgcttactctcacctgcttctgagttgcccaggagaccactggcagatgtcccggcgaagagaagagacacattgttggaagaagcagcccatgacagctccccttcctgggactcgccctcatcctcttcctgctccccttcctggggtgcagcctaaaaggacctatgtcctcacaccattgaaaccactagttctgtccccccaggagacctggttgtgtgtgtgtgagtggttgaccttcctccatcccctggtccttcccttcccttcccgaggcacagagagacagggcaggatccacgtgcccattgtggaggcagagaaaagagaaagtgttttatatacggtacttatttaatatccctttttaattagaaattaaaacagttaatttaattaaagagtagggttttttttcagt

SEQ ID NO: 4727 - protein, 61 aa, Homo sapiens
MRIKPHQGQHIGEMSFLQHNKCECRPKKDRARQENPCGPCSERRKHLFVQDPQTCKCSCKM

SEQ ID NO: 4728 - DNA, 2133 bp, Homo sapiens
ttgccttgtctggctcctgcccctgagttgcacaggggaggtatggtggggtcttgccttctgtggagaagatgcttcattcccagcccaggttcccagcaagccccaaccatctccttctccctgatggttgcccatgggctcaggaggggacagatggatgcctgtgtcaggagcccctctctccctctcttggagagagtcctgagtgcccccccttcttgggggctttgtttgggaagctggatgagcctggtccatggagagtttaaaaagtcttttggtgttacctggtaatggggcacatctcagcccagatagggtgggagggagctgtgaaacacagggagggggttgctttcgggtatctactaggagtcagggtgaagcctagagaggatgaaagaaggggaggggatggggagtggtaagaacctaggatttgaattcccagcctggccaacccttgcagccatgtcttggcctcaagtggaacaagggctccttgaggccagcagggttgggggagttggggtgggcctgagcctctttcctgctagagctcttggtcctccctgcctccaccacccatccctgctctgcagaacccctgggtgctgagtggcaggagccccagggttgtcccatctgggtatggctggctgggtcactaacctctgtgatctgcttccttcctttccagattatgcggatcaaacctcaccaaggccagcacataggagagatgagcttcctacagcacaacaaatgtgaatgcagaccaaagaaagatagagcaagacaagaaaaatgtgacaagccgaggcggtgagccgggcaggaggaaggagcctccctcagggtttcgggaaccagatctctcaccaggaaagactgatacagaacgatcgatacagaaaccacgctgccgccaccacaccatcaccatcgacagaacagtccttaatccagaaacctgaaatgaaggaagaggagactctgcgcagagcactttgggtccggagggcgagactccggcggaagcattcccgggcgggtgacccagcacggtccctcttggaattggattcgccattttatttttcttgctgctaaatcaccgagcccggaagattagagagttttatttctgggattcctgtagacacacccacccacatacatacatttatatatatatatattatatatatataaaaataaatatctctattttatatatataaaatatatatattctttttttaaattaacagtgctaatgttattggtgtcttcactggatgtatttgactgctgtggacttgagttgggaggggaatgttcccactcagatcctgacagggaagaggaggagatgagagactctggcatgatcttttttttgtcccacttggtggggccagggtcctctcccctgcccaggaatgtgcaaggccagggcatgggggcaaatatgacccagttttgggaacaccgacaaacccagccctggcgctgagcctctctaccccaggtcagacggacagaaagacagatcacaggtacagggatgaggacaccggctctgaccaggagtttggggagcttcaggacattgctgtgctttggggattccctccacatgctgcacgcgcatctcgcccccaggggcactgcctggaagattcaggagcctgggcggccttcgcttactctcacctgcttctgagttgcccaggagaccactggcagatgtcccggcgaagagaagagacacattgttggaagaagcagcccatgacagctccccttcctgggactcgccctcatcctcttcctgctccccttcctggggtgcagcctaaaaggacctatgtcctcacaccattgaaaccactagttctgtccccccaggagacctggttgtgtgtgtgtgagtggttgaccttcctccatcccctggtccttcccttcccttcccgaggcacagagagacagggcaggatccacgtgcccattgtggaggcagagaaaagagaaagtgttttatatacggtacttatttaatatccctttttaattagaaattaaaacagttaatttaattaaagagtagggttttttttcagt

SEQ ID NO: 4729 - protein, 41 aa, Homo sapiens
MRIKPHQGQHIGEMSFLQHNKCECRPKKDRARQEKCDKPRR

SEQ ID NO: 4730 - DNA, 2550 bp, Homo sapiens
ttgccttgtctggctcctgcccctgagttgcacaggggaggtatggtggggtcttgccttctgtggagaagatgcttcattcccagcccaggttcccagcaagccccaaccatctccttctccctgatggttgcccatgggctcaggaggggacagatggatgcctgtgtcaggagcccctctctccctctcttggagagagtcctgagtgcccccccttcttgggggctttgtttgggaagctggatgagcctggtccatggagagtttaaaaagtcttttggtgttacctggtaatggggcacatctcagcccagatagggtgggagggagctgtgaaacacagggagggggttgctttcgggtatctactaggagtcagggtgaagcctagagaggatgaaagaaggggaggggatggggagtggtaagaacctaggatttgaattcccagcctggccaacccttgcagccatgtcttggcctcaagtggaacaagggctccttgaggccagcagggttgggggagttggggtgggcctgagcctctttcctgctagagctcttggtcctccctgcctccaccacccatccctgctctgcagaacccctgggtgctgagtggcaggagccccagggttgtcccatctgggtatggctggctgggtcactaacctctgtgatctgcttccttcctttccagattatgcggatcaaacctcaccaaggccagcacataggagagatgagcttcctacagcacaacaaatgtgaatgcagaccaaagaaagatagagcaagacaagaaaaatgtgacaagccgaggcggtgagccgggcaggaggaaggagcctccctcagggtttcgggaaccagatctctcaccaggaaagactgatacagaacgatcgatacagaaaccacgctgccgccaccacaccatcaccatcgacagaacagtccttaatccagaaacctgaaatgaaggaagaggagactctgcgcagagcactttgggtccggagggcgagactccggcggaagcattcccgggcgggtgacccagcacggtccctcttggaattggattcgccattttatttttcttgctgctaaatcaccgagcccggaagattagagagttttatttctgggattcctgtagacacacccacccacatacatacatttatatatatatatattatatatatataaaaataaatatctctattttatatatataaaatatatatattctttttttaaattaacagtgctaatgttattggtgtcttcactggatgtatttgactgctgtggacttgagttgggaggggaatgttcccactcagatcctgacagggaagaggaggagatgagagactctggcatgatcttttttttgtcccacttggtggggccagggtcctctcccctgcccaggaatgtgcaaggccagggcatgggggcaaatatgacccagttttgggaacaccgacaaacccagccctggcgctgagcctctctaccccaggtcagacggacagaaagacagatcacaggtacagggatgaggacaccggctctgaccaggagtttggggagcttcaggacattgctgtgctttggggattccctccacatgctgcacgcgcatctcgcccccaggggcactgcctggaagattcaggagcctgggcggccttcgcttactctcacctgcttctgagttgcccaggagaccactggcagatgtcccggcgaagagaagagacacattgttggaagaagcagcccatgacagctccccttcctgggactcgccctcatcctcttcctgctccccttcctggggtgcagcctaaaaggacctatgtcctcacaccattgaaaccactagttctgtccccccaggagacctggttgtgtgtgtgtgagtggttgaccttcctccatcccctggtccttcccttcccttcccgaggcacagagagacagggcaggatccacgtgcccattgtggaggcagagaaaagagaaagtgttttatatacggtacttatttaatatccctttttaattagaaattaaaacagttaatttaattaaagagtagggttttttttcagtattcttggttaatatttaatttcaactatttatgagatgtatcttttgctctctcttgctctcttatttgtaccggtttttgtatataaaattcatgtttccaatctctctctccctgatcggtgacagtcactagcttatcttgaacagatatttaattttgctaacactcagctctgccctccccgatcccctggctccccagcacacattcctttgaaataaggtttcaatatacatctacatactatatatatatttggcaacttgtatttgtgtgtatatatatatatatatgtttatgtatatatgtgattctgataaaatagacattgctattctgttttttatatgtaaaaacaaaacaagaaaaaatagagaattctacatactaaatctctctccttttttaatttt

SEQ ID NO: 4731 - protein, 41 aa, Homo sapiens; identical to SEQ ID NO: 4729

SEQ ID NO: 4732 - DNA, 2626 bp, Homo sapiens
ttgccttgtctggctcctgcccctgagttgcacaggggaggtatggtggggtcttgccttctgtggagaagatgcttcattcccagcccaggttcccagcaagccccaaccatctccttctccctgatggttgcccatgggctcaggaggggacagatggatgcctgtgtcaggagcccctctctccctctcttggagagagtcctgagtgcccccccttcttgggggctttgtttgggaagctggatgagcctggtccatggagagtttaaaaagtcttttggtgttacctggtaatggggcacatctcagcccagatagggtgggagggagctgtgaaacacagggagggggttgctttcgggtatctactaggagtcagggtgaagcctagagaggatgaaagaaggggaggggatggggagtggtaagaacctaggatttgaattcccagcctggccaacccttgcagccatgtcttggcctcaagtggaacaagggctccttgaggccagcagggttgggggagttggggtgggcctgagcctctttcctgctagagctcttggtcctccctgcctccaccacccatccctgctctgcagaacccctgggtgctgagtggcaggagccccagggttgtcccatctgggtatggctggctgggtcactaacctctgtgatctgcttccttcctttccagattatgcggatcaaacctcaccaaggccagcacataggagagatgagcttcctacagcacaacaaatgtgaatgcagaccaaagaaagatagagcaagacaagaaaatccctgtgggccttgctcagagcggagaaagcatttgtttgtacaagatccgcagacgtgtaaatgttcctgcaaaatgtgacaagccgaggcggtgagccgggcaggaggaaggagcctccctcagggtttcgggaaccagatctctcaccaggaaagactgatacagaacgatcgatacagaaaccacgctgccgccaccacaccatcaccatcgacagaacagtccttaatccagaaacctgaaatgaaggaagaggagactctgcgcagagcactttgggtccggagggcgagactccggcggaagcattcccgggcgggtgacccagcacggtccctcttggaattggattcgccattttatttttcttgctgctaaatcaccgagcccggaagattagagagttttatttctgggattcctgtagacacacccacccacatacatacatttatatatatatatattatatatatataaaaataaatatctctattttatatatataaaatatatatattctttttttaaattaacagtgctaatgttattggtgtcttcactggatgtatttgactgctgtggacttgagttgggaggggaatgttcccactcagatcctgacagggaagaggaggagatgagagactctggcatgatcttttttttgtcccacttggtggggccagggtcctctcccctgcccaggaatgtgcaaggccagggcatgggggcaaatatgacccagttttgggaacaccgacaaacccagccctggcgctgagcctctctaccccaggtcagacggacagaaagacagatcacaggtacagggatgaggacaccggctctgaccaggagtttggggagcttcaggacattgctgtgctttggggattccctccacatgctgcacgcgcatctcgcccccaggggcactgcctggaagattcaggagcctgggcggccttcgcttactctcacctgcttctgagttgcccaggagaccactggcagatgtcccggcgaagagaagagacacattgttggaagaagcagcccatgacagctccccttcctgggactcgccctcatcctcttcctgctccccttcctggggtgcagcctaaaaggacctatgtcctcacaccattgaaaccactagttctgtccccccaggagacctggttgtgtgtgtgtgagtggttgaccttcctccatcccctggtccttcccttcccttcccgaggcacagagagacagggcaggatccacgtgcccattgtggaggcagagaaaagagaaagtgttttatatacggtacttatttaatatccctttttaattagaaattaaaacagttaatttaattaaagagtagggttttttttcagtattcttggttaatatttaatttcaactatttatgagatgtatcttttgctctctcttgctctcttatttgtaccggtttttgtatataaaattcatgtttccaatctctctctccctgatcggtgacagtcactagcttatcttgaacagatatttaattttgctaacactcagctctgccctccccgatcccctggctccccagcacacattcctttgaaataaggtttcaatatacatctacatactatatatatatttggcaacttgtatttgtgtgtatatatatatatatatgtttatgtatatatgtgattctgataaaatagacattgctattctgttttttatatgtaaaaacaaaacaagaaaaaatagagaattctacatactaaatctctctccttttttaatttt

SEQ ID NO: 4733 - protein, 61 aa, Homo sapiens; identical to SEQ ID NO: 4727

SEQ ID NO: 4734 - DNA, 2833 bp, Homo sapiens
ttgccttgtctggctcctgcccctgagttgcacaggggaggtatggtggggtcttgccttctgtggagaagatgcttcattcccagcccaggttcccagcaagccccaaccatctccttctccctgatggttgcccatgggctcaggaggggacagatggatgcctgtgtcaggagcccctctctccctctcttggagagagtcctgagtgcccccccttcttgggggctttgtttgggaagctggatgagcctggtccatggagagtttaaaaagtcttttggtgttacctggtaatggggcacatctcagcccagatagggtgggagggagctgtgaaacacagggagggggttgctttcgggtatctactaggagtcagggtgaagcctagagaggatgaaagaaggggaggggatggggagtggtaagaacctaggatttgaattcccagcctggccaacccttgcagccatgtcttggcctcaagtggaacaagggctccttgaggccagcagggttgggggagttggggtgggcctgagcctctttcctgctagagctcttggtcctccctgcctccaccacccatccctgctctgcagaacccctgggtgctgagtggcaggagccccagggttgtcccatctgggtatggctggctgggtcactaacctctgtgatctgcttccttcctttccagattatgcggatcaaacctcaccaaggccagcacataggagagatgagcttcctacagcacaacaaatgtgaatgcagaccaaagaaagatagagcaagacaagaaaatccctgtgggccttgctcagagcggagaaagcatttgtttgtacaagatccgcagacgtgtaaatgttcctgcaaaatgtgacaagccgaggcggtgagccgggcaggaggaaggagcctccctcagggtttcgggaaccagatctctcaccaggaaagactgatacagaacgatcgatacagaaaccacgctgccgccaccacaccatcaccatcgacagaacagtccttaatccagaaacctgaaatgaaggaagaggagactctgcgcagagcactttgggtccggagggcgagactccggcggaagcattcccgggcgggtgacccagcacggtccctcttggaattggattcgccattttatttttcttgctgctaaatcaccgagcccggaagattagagagttttatttctgggattcctgtagacacacccacccacatacatacatttatatatatatatattatatatatataaaaataaatatctctattttatatatataaaatatatatattctttttttaaattaacagtgctaatgttattggtgtcttcactggatgtatttgactgctgtggacttgagttgggaggggaatgttcccactcagatcctgacagggaagaggaggagatgagagactctggcatgatcttttttttgtcccacttggtggggccagggtcctctcccctgcccaggaatgtgcaaggccagggcatgggggcaaatatgacccagttttgggaacaccgacaaacccagccctggcgctgagcctctctaccccaggtcagacggacagaaagacagatcacaggtacagggatgaggacaccggctctgaccaggagtttggggagcttcaggacattgctgtgctttggggattccctccacatgctgcacgcgcatctcgcccccaggggcactgcctggaagattcaggagcctgggcggccttcgcttactctcacctgcttctgagttgcccaggagaccactggcagatgtcccggcgaagagaagagacacattgttggaagaagcagcccatgacagctccccttcctgggactcgccctcatcctcttcctgctccccttcctggggtgcagcctaaaaggacctatgtcctcacaccattgaaaccactagttctgtccccccaggagacctggttgtgtgtgtgtgagtggttgaccttcctccatcccctggtccttcccttcccttcccgaggcacagagagacagggcaggatccacgtgcccattgtggaggcagagaaaagagaaagtgttttatatacggtacttatttaatatccctttttaattagaaattaaaacagttaatttaattaaagagtagggttttttttcagtattcttggttaatatttaatttcaactatttatgagatgtatcttttgctctctcttgctctcttatttgtaccggtttttgtatataaaattcatgtttccaatctctctctccctgatcggtgacagtcactagcttatcttgaacagatatttaattttgctaacactcagctctgccctccccgatcccctggctccccagcacacattcctttgaaataaggtttcaatatacatctacatactatatatatatttggcaacttgtatttgtgtgtatatatatatatatatgtttatgtatatatgtgattctgataaaatagacattgctattctgttttttatatgtaaaaacaaaacaagaaaaaatagagaattctacatactaaatctctctccttttttaattttaatatttgttatcatttatttattggtgctactgtttatccgtaataattgtggggaaaagatattaacatcacgtctttgtctctagtgcagtttttcgagatattccgtagtacatatttatttttaaacaacgacaaagaaatacagatatatcttaaaaaaaaaaaagcattttgtattaaagaatttaattctgatctcaaa

SEQ ID NO: 4735 - protein, 61 aa, Homo sapiens; identical to SEQ ID NO: 4727

SEQ ID NO: 4736 - DNA, 2757 bp, Homo sapiens
ttgccttgtctggctcctgcccctgagttgcacaggggaggtatggtggggtcttgccttctgtggagaagatgcttcattcccagcccaggttcccagcaagccccaaccatctccttctccctgatggttgcccatgggctcaggaggggacagatggatgcctgtgtcaggagcccctctctccctctcttggagagagtcctgagtgcccccccttcttgggggctttgtttgggaagctggatgagcctggtccatggagagtttaaaaagtcttttggtgttacctggtaatggggcacatctcagcccagatagggtgggagggagctgtgaaacacagggagggggttgctttcgggtatctactaggagtcagggtgaagcctagagaggatgaaagaaggggaggggatggggagtggtaagaacctaggatttgaattcccagcctggccaacccttgcagccatgtcttggcctcaagtggaacaagggctccttgaggccagcagggttgggggagttggggtgggcctgagcctctttcctgctagagctcttggtcctccctgcctccaccacccatccctgctctgcagaacccctgggtgctgagtggcaggagccccagggttgtcccatctgggtatggctggctgggtcactaacctctgtgatctgcttccttcctttccagattatgcggatcaaacctcaccaaggccagcacataggagagatgagcttcctacagcacaacaaatgtgaatgcagaccaaagaaagatagagcaagacaagaaaaatgtgacaagccgaggcggtgagccgggcaggaggaaggagcctccctcagggtttcgggaaccagatctctcaccaggaaagactgatacagaacgatcgatacagaaaccacgctgccgccaccacaccatcaccatcgacagaacagtccttaatccagaaacctgaaatgaaggaagaggagactctgcgcagagcactttgggtccggagggcgagactccggcggaagcattcccgggcgggtgacccagcacggtccctcttggaattggattcgccattttatttttcttgctgctaaatcaccgagcccggaagattagagagttttatttctgggattcctgtagacacacccacccacatacatacatttatatatatatatattatatatatataaaaataaatatctctattttatatatataaaatatatatattctttttttaaattaacagtgctaatgttattggtgtcttcactggatgtatttgactgctgtggacttgagttgggaggggaatgttcccactcagatcctgacagggaagaggaggagatgagagactctggcatgatcttttttttgtcccacttggtggggccagggtcctctcccctgcccaggaatgtgcaaggccagggcatgggggcaaatatgacccagttttgggaacaccgacaaacccagccctggcgctgagcctctctaccccaggtcagacggacagaaagacagatcacaggtacagggatgaggacaccggctctgaccaggagtttggggagcttcaggacattgctgtgctttggggattccctccacatgctgcacgcgcatctcgcccccaggggcactgcctggaagattcaggagcctgggcggccttcgcttactctcacctgcttctgagttgcccaggagaccactggcagatgtcccggcgaagagaagagacacattgttggaagaagcagcccatgacagctccccttcctgggactcgccctcatcctcttcctgctccccttcctggggtgcagcctaaaaggacctatgtcctcacaccattgaaaccactagttctgtccccccaggagacctggttgtgtgtgtgtgagtggttgaccttcctccatcccctggtccttcccttcccttcccgaggcacagagagacagggcaggatccacgtgcccattgtggaggcagagaaaagagaaagtgttttatatacggtacttatttaatatccctttttaattagaaattaaaacagttaatttaattaaagagtagggttttttttcagtattcttggttaatatttaatttcaactatttatgagatgtatcttttgctctctcttgctctcttatttgtaccggtttttgtatataaaattcatgtttccaatctctctctccctgatcggtgacagtcactagcttatcttgaacagatatttaattttgctaacactcagctctgccctccccgatcccctggctccccagcacacattcctttgaaataaggtttcaatatacatctacatactatatatatatttggcaacttgtatttgtgtgtatatatatatatatatgtttatgtatatatgtgattctgataaaatagacattgctattctgttttttatatgtaaaaacaaaacaagaaaaaatagagaattctacatactaaatctctctccttttttaattttaatatttgttatcatttatttattggtgctactgtttatccgtaataattgtggggaaaagatattaacatcacgtctttgtctctagtgcagtttttcgagatattccgtagtacatatttatttttaaacaacgacaaagaaatacagatatatcttaaaaaaaaaaaagcattttgtattaaagaatttaattctgatctcaaa

SEQ ID NO: 4737 - protein, 41 aa, Homo sapiens; identical to SEQ ID NO: 4729

SEQ ID NO: 4738 - DNA, 1620 bp, Homo sapiens
gctgggtcactaacctctgtgatctgcttccttcctttccagattatgcggatcaaacctcaccaaggccagcacataggagagatgagcttcctacagcacaacaaatgtgaatgcagaccaaagaaagatagagcaagacaagaaaaaaaatcagttcgaggaaagggaaaggggcaaaaacgaaagcgcaagaaatcccggtataagtcctggagcgttccctgtgggccttgctcagagcggagaaagcatttgtttgtacaagatccgcagacgtgtaaatgttcctgcaaaatgtgacaagccgaggcggtgagccgggcaggaggaaggagcctccctcagggtttcgggaaccagatctctcaccaggaaagactgatacagaacgatcgatacagaaaccacgctgccgccaccacaccatcaccatcgacagaacagtccttaatccagaaacctgaaatgaaggaagaggagactctgcgcagagcactttgggtccggagggcgagactccggcggaagcattcccgggcgggtgacccagcacggtccctcttggaattggattcgccattttatttttcttgctgctaaatcaccgagcccggaagattagagagttttatttctgggattcctgtagacacacccacccacatacatacatttatatatatatatattatatatatataaaaataaatatctctattttatatatataaaatatatatattctttttttaaattaacagtgctaatgttattggtgtcttcactggatgtatttgactgctgtggacttgagttgggaggggaatgttcccactcagatcctgacagggaagaggaggagatgagagactctggcatgatcttttttttgtcccacttggtggggccagggtcctctcccctgcccaggaatgtgcaaggccagggcatgggggcaaatatgacccagttttgggaacaccgacaaacccagccctggcgctgagcctctctaccccaggtcagacggacagaaagacagatcacaggtacagggatgaggacaccggctctgaccaggagtttggggagcttcaggacattgctgtgctttggggattccctccacatgctgcacgcgcatctcgcccccaggggcactgcctggaagattcaggagcctgggcggccttcgcttactctcacctgcttctgagttgcccaggagaccactggcagatgtcccggcgaagagaagagacacattgttggaagaagcagcccatgacagctccccttcctgggactcgccctcatcctcttcctgctccccttcctggggtgcagcctaaaaggacctatgtcctcacaccattgaaaccactagttctgtccccccaggagacctggttgtgtgtgtgtgagtggttgaccttcctccatcccctggtccttcccttcccttcccgaggcacagagagacagggcaggatccacgtgcccattgtggaggcagagaaaagagaaagtgttttatatacggtacttatttaatatccctttttaattagaaattaaaacagttaatttaattaaagagtagggttttttttcagt

SEQ ID NO: 4739 - protein, 85 aa, Homo sapiens
MRIKPHQGQHIGEMSFLQHNKCECRPKKDRARQEKKSVRGKGKGQKRKRKKSRYKSWSVPCGPCSERRKHLFVQDPQTCKCSCKM

SEQ ID NO: 4740 - DNA, 2037 bp, Homo sapiens
gctgggtcactaacctctgtgatctgcttccttcctttccagattatgcggatcaaacctcaccaaggccagcacataggagagatgagcttcctacagcacaacaaatgtgaatgcagaccaaagaaagatagagcaagacaagaaaaaaaatcagttcgaggaaagggaaaggggcaaaaacgaaagcgcaagaaatcccggtataagtcctggagcgttccctgtgggccttgctcagagcggagaaagcatttgtttgtacaagatccgcagacgtgtaaatgttcctgcaaaatgtgacaagccgaggcggtgagccgggcaggaggaaggagcctccctcagggtttcgggaaccagatctctcaccaggaaagactgatacagaacgatcgatacagaaaccacgctgccgccaccacaccatcaccatcgacagaacagtccttaatccagaaacctgaaatgaaggaagaggagactctgcgcagagcactttgggtccggagggcgagactccggcggaagcattcccgggcgggtgacccagcacggtccctcttggaattggattcgccattttatttttcttgctgctaaatcaccgagcccggaagattagagagttttatttctgggattcctgtagacacacccacccacatacatacatttatatatatatatattatatatatataaaaataaatatctctattttatatatataaaatatatatattctttttttaaattaacagtgctaatgttattggtgtcttcactggatgtatttgactgctgtggacttgagttgggaggggaatgttcccactcagatcctgacagggaagaggaggagatgagagactctggcatgatcttttttttgtcccacttggtggggccagggtcctctcccctgcccaggaatgtgcaaggccagggcatgggggcaaatatgacccagttttgggaacaccgacaaacccagccctggcgctgagcctctctaccccaggtcagacggacagaaagacagatcacaggtacagggatgaggacaccggctctgaccaggagtttggggagcttcaggacattgctgtgctttggggattccctccacatgctgcacgcgcatctcgcccccaggggcactgcctggaagattcaggagcctgggcggccttcgcttactctcacctgcttctgagttgcccaggagaccactggcagatgtcccggcgaagagaagagacacattgttggaagaagcagcccatgacagctccccttcctgggactcgccctcatcctcttcctgctccccttcctggggtgcagcctaaaaggacctatgtcctcacaccattgaaaccactagttctgtccccccaggagacctggttgtgtgtgtgtgagtggttgaccttcctccatcccctggtccttcccttcccttcccgaggcacagagagacagggcaggatccacgtgcccattgtggaggcagagaaaagagaaagtgttttatatacggtacttatttaatatccctttttaattagaaattaaaacagttaatttaattaaagagtagggttttttttcagtattcttggttaatatttaatttcaactatttatgagatgtatcttttgctctctcttgctctcttatttgtaccggtttttgtatataaaattcatgtttccaatctctctctccctgatcggtgacagtcactagcttatcttgaacagatatttaattttgctaacactcagctctgccctccccgatcccctggctccccagcacacattcctttgaaataaggtttcaatatacatctacatactatatatatatttggcaacttgtatttgtgtgtatatatatatatatatgtttatgtatatatgtgattctgataaaatagacattgctattctgttttttatatgtaaaaacaaaacaagaaaaaatagagaattctacatactaaatctctctccttttttaatttt

SEQ ID NO: 4741 - protein, 85 aa, Homo sapiens; identical to SEQ ID NO: 4739

SEQ ID NO: 4742 - DNA, 2244 bp, Homo sapiens
gctgggtcactaacctctgtgatctgcttccttcctttccagattatgcggatcaaacctcaccaaggccagcacataggagagatgagcttcctacagcacaacaaatgtgaatgcagaccaaagaaagatagagcaagacaagaaaaaaaatcagttcgaggaaagggaaaggggcaaaaacgaaagcgcaagaaatcccggtataagtcctggagcgttccctgtgggccttgctcagagcggagaaagcatttgtttgtacaagatccgcagacgtgtaaatgttcctgcaaaatgtgacaagccgaggcggtgagccgggcaggaggaaggagcctccctcagggtttcgggaaccagatctctcaccaggaaagactgatacagaacgatcgatacagaaaccacgctgccgccaccacaccatcaccatcgacagaacagtccttaatccagaaacctgaaatgaaggaagaggagactctgcgcagagcactttgggtccggagggcgagactccggcggaagcattcccgggcgggtgacccagcacggtccctcttggaattggattcgccattttatttttcttgctgctaaatcaccgagcccggaagattagagagttttatttctgggattcctgtagacacacccacccacatacatacatttatatatatatatattatatatatataaaaataaatatctctattttatatatataaaatatatatattctttttttaaattaacagtgctaatgttattggtgtcttcactggatgtatttgactgctgtggacttgagttgggaggggaatgttcccactcagatcctgacagggaagaggaggagatgagagactctggcatgatcttttttttgtcccacttggtggggccagggtcctctcccctgcccaggaatgtgcaaggccagggcatgggggcaaatatgacccagttttgggaacaccgacaaacccagccctggcgctgagcctctctaccccaggtcagacggacagaaagacagatcacaggtacagggatgaggacaccggctctgaccaggagtttggggagcttcaggacattgctgtgctttggggattccctccacatgctgcacgcgcatctcgcccccaggggcactgcctggaagattcaggagcctgggcggccttcgcttactctcacctgcttctgagttgcccaggagaccactggcagatgtcccggcgaagagaagagacacattgttggaagaagcagcccatgacagctccccttcctgggactcgccctcatcctcttcctgctccccttcctggggtgcagcctaaaaggacctatgtcctcacaccattgaaaccactagttctgtccccccaggagacctggttgtgtgtgtgtgagtggttgaccttcctccatcccctggtccttcccttcccttcccgaggcacagagagacagggcaggatccacgtgcccattgtggaggcagagaaaagagaaagtgttttatatacggtacttatttaatatccctttttaattagaaattaaaacagttaatttaattaaagagtagggttttttttcagtattcttggttaatatttaatttcaactatttatgagatgtatcttttgctctctcttgctctcttatttgtaccggtttttgtatataaaattcatgtttccaatctctctctccctgatcggtgacagtcactagcttatcttgaacagatatttaattttgctaacactcagctctgccctccccgatcccctggctccccagcacacattcctttgaaataaggtttcaatatacatctacatactatatatatatttggcaacttgtatttgtgtgtatatatatatatatatgtttatgtatatatgtgattctgataaaatagacattgctattctgttttttatatgtaaaaacaaaacaagaaaaaatagagaattctacatactaaatctctctccttttttaattttaatatttgttatcatttatttattggtgctactgtttatccgtaataattgtggggaaaagatattaacatcacgtctttgtctctagtgcagtttttcgagatattccgtagtacatatttatttttaaacaacgacaaagaaatacagatatatcttaaaaaaaaaaaagcattttgtattaaagaatttaattctgatctcaaa

SEQ ID NO: 4743 - protein, 85 aa, Homo sapiens; identical to SEQ ID NO: 4739

SEQ ID NO: 4744 - DNA, 3513 bp, Homo sapiens
gcgcctcaccttcagcagcgcctaccagggcaacagcctcatgtaccatgacagcccctgctccaacggctatgtctacatccccctggccttcctgctcatgttgtacgccgtctacctggtggagtgttggcactgccaagcccgccatgagctgcagcaccgtgttgatgtgagcagtgtgcgggaacgtgtgggccgcatgcagcaagccacgccctgcatctggtggaaggccatcagctaccactatgtccgccgcacccgccaggtcaccagataccgcaatggagacgcctataccaccacccaggtaccaggctgcctaggaagccaggtggtgcctttaagatctccatggagaaacgcacagctcgacgcaggatccgacgaagaaccagcctaaaggggttcagagcccagacatgaatccccagcggctcatgcccttccagactcacgggggacctgacatcccagggaagatgccatcagagatgcagacactgagtgtgcggatgtggtcagccaccacgcggtacgctgtgtctgtgcgcccctcgtctgccacccctactcggcccaagtaagggggtgccctgcagccctgggaagcagaagagtcagccagtggccctgcctgacctggcccaggtgggtgctctttatcgcctctagagcatctgccctcagccctaaagccaaccacatccagaatggccttgccagtccagtcctgggctgagaagcctcacagatgagcacaagccaggccctgccctcacggggctcatatttggtgctacaagtgaacatatctgtgaccatttactgaatttctactatcagaactgggtgctaattgcagtgattttctggaatctaagggatgttttgccaacacaacaccctctggcaaaagtgtcagttcctcatcttctgtggaaacaggcccaagtgtcagtgagcctcctggcctccccagagtgtctgcttacgtagacaccactgctgacttggatcggaaactctccttctcacattctgatcactcctctgaaatgtcgttgcctgaagtccaaaaggataaatatcctgaggaattcagcctgcttaagttgcagacgaaagatgggcatcgtcctgagtggacattttacccaaggtttagcagcaacatccacacctaccacgtcggaaagcagtgcttctttaatggagtcttcctcggcaacaagaggtctctatcagagaggacggtggacaagtgctttgggagaaagaaatacgatattgatcccaggaatggaatcccaaagttaactccaggcgacaatccatatatgtacccagaacagagtaaaggcttccacaaagcaggatcaatgctcccaccagtgaatttttcaatagtgccttatgaaaagaaatttgatacatttattccacttgagcctcttccacaaattcccaacttgcctttctgggtgaaggagaaggccaacagtttgaaaaatgagatacaagaggttgaggagcttgacaactggcagccagcagtgcccttaatgcacatgctacacctttctggtgctttggactttccaagacaatcctgagcataaacaggcccacaaaacatgtgctgactgcactctggcgacccttttccagttgatgttttttgtcatgtgactgttctaaatccagtgtttgacccttatgaggaagtgttgtgctttgcttttttaaaactttatattttgaaaactttcacatttacataaaagttgcaagaattgtacaacaaacacctgcatatccttcacatagattctatcattgttaatatttgttcaaactttctctctctcacaatattacagttaccattttgctgaactctttgagagtgagtggcagatattgtaaccctttacacctgtatacctacatacctcagcatgtatcttctaaggtcaaggatgttgtctaacaaccacaacacaaataccaaactcacagaatttaacactgataaaatattattaacatttagtccacattcaattttagtcaattatatttagttttctaaggatgccctcaaatcaatcataaaatacagacatgatgtgagtgtcttagcctgttcaggctgctataacaaaacgccataaacagaatggcttataaacaataggaattcatttcttacagttctggaggctgggaagtccaagcgcagggtgctggcaggttcagtgtctgctgagggccagccttctggctcatagatagtaccttcttgctgtgtcctcatatgatagaaagggtgagctagtcctctggggtctcttttacaagggcactaatctcattcatgagggctctggtctcatgacctaatcgcctcccaatggccttacctcctaataccatcaccttggggattaggtttcgacatatgcattttggggtggggaggacaaacatttagaccatagcagtgaactttcattgcttttggtaaaacttttcattttattaataccttttggaatgtttctctaatgttaacttggtacatgtcagaaaaacatgaaggctggatctataccaggtaagtaatactattgccctgtagctgcattccccagtttagtattgcctatctacaatagccaagcagggtgagagctcagtgaccaccagtcatgagttttagggcctcctgtcaatcagacaagaagcaaacatttggaggaaaaggtgaaaacaaaagctgcctcacaggctttgacacagtcaaactagtgactcacggcatttttacagccaatctctttctccactagggaacccccttggctggctaatgaaggctgcagatctagtatctccaaaaccttaaagtggaaagagattggggtccatgctgagactccacatgtctatgacatgagcatgatttatttcccaaaatgtttgttgtctccagtcacagccaaagtgaatgaagcaggtttagaacacgatacatttagccaggtgtggtggctcatgcctgtaatcccagcacttttggaggccgaggcaggcgaatcacttgaggtcaggagttcgagaccagcctggtcaacatggcgaaacctgtctctactaaaatcacaaaaattagccaggcaagatggtgggcacctgtaatccctggtactcgggaggctgaggcaggagaatctcttgaacccaggaggcagaggttgcagtgagccaagaccatgccattgcactccagcctgggcgacaagagcgaaactccatcccaaaaacaaagaagcaaacaaaaaccacaatgcattcatggcaccttcatatgtgcctctagactaactggcagagagcatggtgccgactgccagctgctgtgcctgaccactccttgggttaacatcagcatacatccgtgctaatcctctggcccctgggtcacaggcccacccctgctcccaa

SEQ ID NO: 4745 - protein, 185 aa, Homo sapiens
MSLPEVQKDKYPEEFSLLKLQTKDGHRPEWTFYPRFSSNIHTYHVGKQCFFNGVFLGNKRSLSERTVDKCFGRKKYDIDPRNGIPKLTPGDNPYMYPEQSKGFHKAGSMLPPVNFSIVPYEKKFDTFIPLEPLPQIPNLPFWVKEKANSLKNEIQEVEELDNWQPAVPLMHMLHLSGALDFPRQS

SEQ ID NO: 4746 - DNA, 1354 bp, Homo sapiens
agttgccagttggttcgttggtccgtggaggcctctgagcacagacccgggcctcccctggggaagggggtgggaagaccccgaggtggaaaagaaggagcaccttgagctggatgggggctgcagcgagcctggttcgggctgggggcggactcgctggggctcccagggcttccaaaccacgaaacgcccaggtggagggagtaaggctcccgtttagaggccagtcctgccctcctgactttcggtggcttgtggaatttgtttgttttgactgatacctttcttacgagggactttctttgtctctgggttgcttctaatatttaaaatcatcatgggcacagatgagtccatccatgctcactggaaacagtccacggggctgccgtctcccctccatctcaagcacgacctgcggcagacagctggagaaggttccagaaaaaagggactctggcatgaccgaggtggagaggacctacagtgctaattgcagtgattttctggaatctaagggatgttttgccaacacaacaccctctggcaaaagtgtcagttcctcatcttctgtggaaacaggcccaagtgtcagtgagcctcctggcctccccagagtgtctgcttacgtagacaccactgctgacttggatcggaaactctccttctcacattctgatcactcctctgaaatgtcgttgcctgaagtccaaaaggataaatatcctgaggaattcagcctgcttaagttgcagacgaaagatgggcatcgtcctgagtggacattttacccaaggtttagcagcaacatccacacctaccacgtcggaaagcagtgcttctttaatggagtcttcctcggcaacaagaggtctctatcagagaggacggtggacaagtgctttgggagaaagaaatacgatattgatcccaggaatggaatcccaaagttaactccaggcgacaatccatatatgtacccagaacagagtaaaggcttccacaaagcaggatcaatgctcccaccagtgaatttttcaatagtgccttatgaaaagaaatttgatacatttattccacttgagcctcttccacaaattcccaacttgcctttctgggtgaaggagaaggccaacagtttgaaaaatgagatacaagaggttgaggagcttgacaactggcagccagcagtgcccttaatgcacatgctacacctttctggtgctttggactttccaagacaatcctgagcataaacaggcccacaaaacatgtgctgactgcactctggcgacccttttccagttgatgttttttgtcatgtgactgttctaaatccagtgtttgaccctta

SEQ ID NO: 4747 - protein, 300 aa, Homo sapiens; identical to SEQ ID NO: 606

SEQ ID NO: 4748 - DNA, 1257 bp, Homo sapiens
caggtggagggagtaaggctcccgtttagaggccagtcctgccctcctgactttcggtggcttgtggaatttgtttgttttgactgatacctttcttacgagggactttctttgtctctgggttgcttctaatatttaaaatcatcatgggcacagatgagtccatccatgctcactggaaacagtccacggggctgccgtctcccctccatctcaagcacgacctgcggcagacagctggagaaggttccagaaaaaagggactctggcatgaccgaggtggagaggacctacaagagcaccaccaaagcagagagtctcataaattacctcactggatctcacagcagtggagaagtatattacctatgagtaaagggagccagagatttgacctgcccagtgcttgggttaataaaagggatgttttgccaacacaacaccctctggcaaaagtgtcagttcctcatcttctgtggaaacaggcccaagtgtcagtgagcctcctggcctccccagagtgtctgcttacgtagacaccactgctgacttggatcggaaactctccttctcacattctgatcactcctctgaaatgtcgttgcctgaagtccaaaaggataaatatcctgaggaattcagcctgcttaagttgcagacgaaagatgggcatcgtcctgagtggacattttacccaaggtttagcagcaacatccacacctaccacgtcggaaagcagtgcttctttaatggagtcttcctcggcaacaagaggtctctatcagagaggacggtggacaagtgctttgggagaaagaaatacgatattgatcccaggaatggaatcccaaagttaactccaggcgacaatccatatatgtacccagaacagagtaaaggcttccacaaagcaggatcaatgctcccaccagtgaatttttcaatagtgccttatgaaaagaaatttgatacatttattccacttgagcctcttccacaaattcccaacttgcctttctgggtgaaggagaaggccaacagtttgaaaaatgagatacaagaggttgaggagcttgacaactggcagccagcagtgcccttaatgcacatgctacacctttctggtgctttggactttccaagacaatcctgagcataaacaggcccacaaaacatgtgctgactgcactctggcgacccttttccagttgatgttttttgtcatgtgactgttctaaatccagtgtttgaccctta

SEQ ID NO: 4749 - protein, 185 aa, Homo sapiens; identical to SEQ ID NO: 4745

SEQ ID NO: 4750 - DNA, 746 bp, Homo sapiens
ggcagcggacggcgggaaaaggagacttacctcggtattcctccatacgccccccttgatcataattcgaggcatcttggcggcagggtgtctcggcaagcagccgagaggagcttcagagaagtagtaacagcgattgggccaccggactcaaagccgccacttcctccaagcgcgaccttctgctttgaagatctgcgcaagcgcaaggtcttcgagattttaacactggagcatagaggaggtcagtctctactgactgctgaacatccaacacgtgacacccaggagttgtctaccaccatgttttggactaagggaaaaaagcaggtggattgttgcatttgcagatttaacattcttaaatttccaagcacaattactacactatttaaagatatgaacaactttgatgacagtaatggagcagtacaaaactgattcatcaaataacttgggaaaaaacctacaatttttattaatagatgatagataataacatttctattcatagataataattccagccataatgaagtagcggggatcagatttactctcctgacttaaacaagtagaaaactggacaaaatgtatgaaataacaattttcagaatgagacaacaggcagcacaggattgtgatcctaaagaaaaggaaagcaaatgaagagattcctgtaatcacccagctttgcctggaggcacattcaagaccacagcgtaggatgagcaaccccacacaga

SEQ ID NO: 4751 - protein, 45 aa, Homo sapiens
MFWTKGKKQVDCCICRFNILKFPSTITTLFKDMNNFDDSNGAVQN

SEQ ID NO: 4752 - DNA, 470 bp, Homo sapiens
gcggcgggcagcggacggcgggaaaaggagacttacctcggtattcctccatacgccccccttgatcataattcgaggcatcttggcggcagggtgtctcggcaagcagccgagaggagcttcagagaagtagtaacagcgattgggccaccggactcaaagccgccacttcctccaagcgcgaccttctgctttgaagatctgcgcaagcgcaaggtcttcgagattttaacactggagcatagaggaggtcagtctctactgactgctgaacatccaacacgtgacacccaggagttgtctaccaccatgttttggactaagggaaaaaagcaggtaaagagagagatgtaagtcctgaccatgtcagagtacctggatccagcatgttcctgagtcccagctgcattcctgtccttgcattctgattattagtttcctatttgtgttagccacttggaattgggttt

SEQ ID NO: 4753 - protein, 31 aa, Homo sapiens [sequence omitted]

SEQ ID NO: 4754 - DNA, 3050 bp, Homo sapiens
gagagccgtagtttcttccattctgttttggacatgcgcggggcgtaaggcgctttggccagagtggtttgatggttttgtgttagtcttcctgcagctgagcttccacaagacactttttccctttcagccacccaatatctcgcgagacttgctattctgcgccccctcccaccttgcgcttgcgcagatcttcaaagcagaaggtcgcgcttggaggaagtggcggctttgagtccggtggcccaatcgctgttactacttctctgaagctcctctcggctgcttgccgagacaccctgccgccaagatgcctcgaattatgatcaaggggggcgtatggaggaataccgaggatgaaattctgaaagcagcggtaatgaaatatgggaaaaatcagtggtctaggattgcctcattgctgcatagaaaatcagcaaagcagtgcaaagccagatggtatgaatggctggatccaagcattaagaagacagaatggtccagagaagaagaggaaaaactcttgcacttggccaagttgatgccaactcagtggaggaccattgctccaatcattggaagaacagcggcccagtgcttagaacactatgaatttcttctggataaagctgcccaaagagacaatgaagaggaaacaacagatgatccacgaaaacttaaacctggagaaatagatccaaatccagaaacaaaaccagcgcggcctgatccaattgatatggatgaggatgaacttgagatgctttctgaagccagagcccgcttggctaatactcagggaaagaaggccaagaggaaagcaagagagaaacaattggaagaagcaagacgtcttgctgccctccaaaaaagaagagaacttcgagcagctggcatagaaattcagaagaaaagaaaaaggaagagaggagttgattataatgccgaaatcccatttgaaaaaaagcctgcccttggtttttatgatacttctgaggaaaactaccaagctcttgacgcagatttcaggaaattaagacaacaggatcttgatggggagctaagatctgaaaaagaaggaagagatagaaaaaaagacaaacagcatttgaaaaggaaaaaagaatctgatttaccatcagctattcttcaaactagtggtgtttctgaatttactaaaaagagaagcaaactagtacttcctgcccctcagatttcagatgcagaactccaggaagttgtaaaagtaggccaagcgagtgaaattgcacgtcaaactgccgaggaatctggcataacaaattctgcttccagtacacttttgtctgagtacaatgtcaccaacaacagcgttgctcttagaacaccacgaacaccagcttcccaggacagaattctgcaggaagcccagaacctcatggccctcaccaatgtggacaccccattgaaaggtggacttaataccccattgcatgagagtgacttctcaggtgtaactccacagcgacaagttgtacagactccaaacacagttctctctactccattcaggactccttctaatggagctgaagggctgactccccggagtggaacaactcccaaaccagttattaactctactccgggtagaactcctcttcgagacaagttaaacattaatcccgaggatggaatggcagactatagtgatccctcttacgtgaagcagatggaaagagaatcccgagaacatctccgtttagggttgttgggccttcctgcccctaagaatgattttgaaattgttctaccagaaaatgccgagaaggagctggaagaacgtgaaatagatgatacttacattgaagatgctgctgatgtggatgctcgaaagcaggccatacgagatgcagagcgtgtaaaggaaatgaaacgaatgcataaagctgtccagaaagatctgccaagaccatcagaagtaaatgaaactattctaagacccttaaatgtagaaccgcctttaacagatttacagaaaagtgaagaactaatcaaaaaagaaatgatcacaatgcttcattatgaccttctacatcacccttatgaaccatctggaaataaaaaaggcaaaactgtagggtttggtaccaataattcagagcacattacctatctggaacataatccttatgaaaagttctccaaagaagagctgaaaaaggcccaggatgttttggtgcaggagatggaagtggttaaacaaggaatgagccatggagagctctcaagtgaagcttataaccaggtgtgggaagaatgctacagtcaagttttatatcttcctgggcagagccgctacacacgggccaatctggctagtaaaaaggacagaattgaatcacttgaaaagaggctcgagataaacaggggtcacatgacgacagaagccaagagggctgcaaagatggaaaagaagatgaaaattttgcttgggggttaccagtctcgtgctatggggctcatgaaacagttgaatgacttatgggaccaaattgaacaggctcacttggagttacgcacttttgaagaactcaagaaacatgaagattctgctattccccggaggctagagtgtctaaaagaagacgttcagcgacaacaagaaagagaaaaggaacttcaacatagatatgctgatttgctgctggagaaagagactttaaagtcaaaattctgaagtacagtttatattctgtcacaggattaattaattgccggttttcatactctagaaggctgaaactgatgtttatcttcattgacaaatttacccaccatctgtggtttttcagttgtttattttaaatgatatcgatcttacacattctgtgtataaagaccttaactccacaggacggacattttagagtttaaattattaaggctatcattcttttagtaatgtcatatttgcaaacttttttagttttggcctttaatttaaaaagcctaattttaaagtgctgcctgtgagtaactcttgaataaaaacaaaatataaaaaattg

SEQ ID NO: 4755 - protein, 802 aa, Homo sapiens; identical to SEQ ID NO: 608

SEQ ID NO: 4756 - DNA, 6431 bp, Homo sapiens
gagagccgtagtttcttccattctgttttggacatgcgcggggcgtaaggcgctttggccagagtggtttgatggttttgtgttagtcttcctgcagctgagcttccacaagacactttttccctttcagccacccaatatctcgcgagacttgctattctgcgccccctcccaccttgcgcttgcgcagatcttcaaagcagaaggtcgcgcttggaggaagtggcggctttgagtccggtggcccaatcgctgttactacttctctgaagctcctctcggctgcttgccgagacaccctgccgccaagatgcctcgaattatgatcaaggggggcgtatggaggaataccgaggatgaaattctgaaagcagcggtaatgaaatatgggaaaaatcagtggtctaggattgcctcattgctgcatagaaaatcagcaaagcagtgcaaagccagatggtatgaatggctggatccaagcattaagaagacagaatggtccagagaagaagaggaaaaactcttgcacttggccaagttgatgccaactcagtggaggaccattgctccaatcattggaagaacagcggcccagtgcttagaacactatgaatttcttctggataaagctgcccaaagagacaatgaagaggaaacaacagatgatccacgaaaacttaaacctggagaaatagatccaaatccagaaacaaaaccagcgcggcctgatccaattgatatggatgaggatgaacttgagatgctttctgaagccagagcccgcttggctaatactcagggaaagaaggccaagaggaaagcaagagagaaacaattggaagaagcaagacgtcttgctgccctccaaaaaagaagagaacttcgagcagctggcatagaaattcagaagaaaagaaaaaggaagagaggagttgattataatgccgaaatcccatttgaaaaaaagcctgcccttggtttttatgatacttctgaggaaaactaccaagctcttgacgcagatttcaggaaattaagacaacaggatcttgatggggagctaagatctgaaaaagaaggaagagatagaaaaaaagacaaacagcatttgaaaaggaaaaaagaatctgatttaccatcagctattcttcaaactagtggtgtttctgaatttactaaaaagagaagcaaactagtacttcctgcccctcagatttcagatgcagaactccaggaagttgtaaaagtaggccaagcgagtgaaattgcacgtcaaactgccgaggaatctggcataacaaattctgcttccagtacacttttgtctgagtacaatgtcaccaacaacagcgttgctcttagaacaccacgaacaccagcttcccaggacagaattctgcaggaagcccagaacctcatggccctcaccaatgtggacaccccattgaaaggtggacttaataccccattgcatgagagtgacttctcaggtgtaactccacagcgacaagttgtacagactccaaacacagttctctctactccattcaggactccttctaatggagctgaagggctgactccccggagtggaacaactcccaaaccagttattaactctactccgggtagaactcctcttcgagacaagttaaacattaatcccgaggatggaatggcagactatagtgatccctcttacgtgaagcagatggaaagagaatcccgagaacatctccgtttagggttgttgggccttcctgcccctaagaatgattttgaaattgttctaccagaaaatgccgagaaggagctggaagaacgtgaaatagatgatacttacattgaagatgctgctgatgtggatgctcgaaagcaggccatacgagatgcagagcgtgtaaaggaaatgaaacgaatgcataaagctgtccagaaagatctgccaagaccatcagaagtaaatgaaactattctaagacccttaaatgtagaaccgcctttaacagatttacagaaaagtgaagaactaatcaaaaaagaaatgatcacaatgcttcattatgaccttctacatcacccttatgaaccatctggaaataaaaaaggcaaaactgtagggtttggtaccaataattcagagcacattacctatctggaacataatccttatgaaaagttctccaaagaagagctgaaaaaggcccaggatgttttggtgcaggagatggaagtggttaaacaaggaatgagccatggagagctctcaagtgaagcttataaccaggtgtgggaagaatgctacagtcaagttttatatcttcctgggcagagccgctacacacgggccaatctggctagtaaaaaggacagaattgaatcacttgaaaagaggctcgagataaacaggggtcacatgacgacagaagccaagagggctgcaaagatggaaaagaagatgaaaattttgcttgggggttaccagtctcgtgctatggggctcatgaaacagttgaatgacttatgggaccaaattgaacaggctcacttggagttacgcacttttgaagaactcaagaaacatgaagattctgctattccccggaggctagagtgtctaaaagaagacgttcagcgacaacaagaaagagaaaaggaacttcaacatagatatgctgatttgctgctggagaaagagactttaaagtcaaaattctgaagtacagtttatattctgtcacaggattaattaattgccggttttcatactctagaaggctgaaactgatgtttatcttcattgacaaatttacccaccatctgtggtttttcagttgtttattttaaatgatatcgatcttacacattctgtgtataaagaccttaactccacaggacggacattttagagtttaaattattaaggctatcattcttttagtaatgtcatatttgcaaacttttttagttttggcctttaatttaaaaagcctaattttaaagtgctgcctgtgagtaactcttgaataaaaacaaaatataaaaaattgagaatgtagccttttgtttgaagtaattagatacttaagagtgcctgcaaaccagcagctatgtactctgtgtcatatttaatgagtaactcttgggtaatcaaaatggtgatgcagtatcttaaacacttaagaggcagttctttgtggctttgttagtttcagcaaagagtggtcatttctgtatacactgacaagttagattaactttttagtacctcaaattttttttttgttaatatcactttaaagaaggtctcttgtctgccagctacttaaataatttatgggtcagggcttaaaagatttaacttccttgccccattattttcttataagtattttttgacaaaggcattttaaaagttaatttcaagaaggccatcaaacttaaagctctatgtttagcctaagaagtcagttacatcagtgtagaatttggggaatggatagaggtggagatatttaattttatataattcatataaattgatttagttacagtatcagttggctacaagctcattatagactagcaatgttttgacatcaccaaaaacgtttgcccagtcttagaatactagggactataggaagggaagggattcattcattcattcgatattgaatgtataccctgtgccagagtcttagagagagaacaacaaacaaaataggcctagttcttgtttagtagagcttatagtcttttgagaatgacagacaattaaaatccaaatgtttatttggtgattcttatgtgtcagacacttaagtgttgggagataagcagttattaagacagagttcttgctctcatggaggtgacattagtggggaggagatactaagtatgtccagggaaagtatcagaccatgagttttagattctgtggaggaaattaaagtagggtgattatgagatagtgaatgagtggctattttagactggacgatcaaagagacctcttggaaggcagctatgctcaccactataccactgcactgtgccgcaccgtaccactataagctgcacggccaaagagacctcttaaagaagtaacatttaagataacatgtgattgacattttagaatgggctatccttgtgagattcaaggaaagaacatcctaggtggagtgaatagcaaacataaagcctcttttgtatgtttgaggaacaaaaaggacaatgcagctagagtgtcaagaatggcatttctgtatataagacctcgttgtatagagccacataaataaggctataataaggaatttggatcttactttaaatatgataagaatcgatgagaagatctaagcaaaggaatgacatgatcagatttggttttagaaacatcactatctccttagtgtgtaaaatctcaccaggctggagatagggaagccagtccaattaggagcctgatgcagtgatccagacaaaaaaataatagtgattctaactagagtccaggtaatagtagtggagatatgtggagagacatgataggtatatacttaatagtcttatcagacgataaattgatattttcctggtgtgtagtcacttaattcaaatacttttttcagtaagttctgggttttctaggaaaaacttcagtatcatcagtgaataatgatagtgtttcttctgatagttttatttcacttttattgcatgttttgttatctgaaatgtttaggacaatgttaacaataatgatgttagacatttttttttcttattttaatgggaatgtccatagttttaagtttgctgttgggagttagatagtctttatctgaaagacagtgtctctcttttagtttttaaagagtttgaattagaaatggctctggaactttaaacagtataccatttgggcatctattaaagcattcatataattgttctcatttgatgttttgatgaggtatattaatagattttcccacattaaatcatctttgcactcctggaatcaggtagattaatttttaaaagaaattttaaaggatttatagtttatttgcactttttgtagacttgaattatatggatttaaaagttgatctaatattaataaaggctcactttgttttcaaaatttgaagtaattcacatacttatagcctaaaaaaatcggcaggaattacaaaatttcaaaactggcacattgtaaactgcatatgcatttgccaggtagtggtgccacttgaaatggtgaacagacacactgttatcctttgtcagtatcctgtaaagcccaggattctttaccagcaccatacagcgattttggtgactattttaacattcacactgaggccaggggtggtgagtcatgcctgtaatcctagcactttgggaggccaaggtgggaggatcatttgagctcaggagttcaagattagcctgggtaacatagtgagaccctgtctctattaaaaaataataataaaaataacattcacattggtattgttcactaaggtattggttgttaaggcattcattaaggtattgttaaaacttgtgttaagcatgttaaagtctcagtaactttgggatagaaataaaatgtgataaaaagctgaaagaaaccaccacaagggagagtcctttttgaaatattagagacataatgctgtctaataaaaaacgacatcaaagaaaaactacactacagtgactgcagacttaatgttggccaaccatgcatcctccctagaaatgcatttgaatttgatttactaatcttttatttaggaaatttacatttttacattagtgagattggtcttttgggctattgtacttttttttttttttttttgagatggagtcttgctctctcacccaggctggagtgcagtagtgcaatcttggcccactgcaacctctgcctcctgggctcgagtgattctctgcctcagccttccaagtagctgggactacaggcatgtgccaccgcacctggctaatttttgtgtttttagtagagatggggttttgctatgttggccaggctggtcttgaattcctgacctcaggtgatccacctacctcggcctcccaaagtgctagaattacaggtgtgagccaccatgcccagcctggttattgtattttgatattgggattttgctagctctctaaagtaaataggataactgtatatctttttctgtgcattaagcagttataacatgggaatgatttgttcatgaaaggttgaaagtctgtacttacagaacttttgagttcacagtgctttctggaaataatttctttataactgtcagtttcttttgtgactattatgttacctatttttaaatttaagcaactttaaattaaaaaaattgtttttaaaa

SEQ ID NO: 4757 - protein, 802 aa, Homo sapiens; identical to SEQ ID NO: 608

SEQ ID NO: 4758 - DNA, 1188 bp, Homo sapiens
tgatctttggatataatgtaggtaaaacttttaaacctagtttctcacacacacaataggtacctgagaaatgatagctgctgttatagtgagtgaaagcaaaggatgtttatacttttgaggaaacatggatgcttgatttttaaaaagcagtctgcattgactcaaaggcttcttaagctatttttcctaggtattgttatccacccttccaaaaaacaaccaaccacatcttggatttgactcaaggcatgagggaaaaaattagtcttctaaagctctctggatatggcaagtgtttgtagtacttaaacttattgaaattattattgtaaacaggcccaggatgttttggtgcaggagatggaagtggttaaacaaggaatgagccatggagagctctcaagtgaagcttataaccaggtgtgggaagaatgctacagtcaagttttatatcttcctgggcagagccgctacacacgggccaatctggctagtaaaaaggacagaattgaatcacttgaaaagaggctcgagataaacaggggtcacatgacgacagaagccaagagggctgcaaagatggaaaagaagatgaaaattttgcttgggggttaccagtctcgtgctatggggctcatgaaacagttgaatgacttatgggaccaaattgaacaggctcacttggagttacgcacttttgaagaactcaagaaacatgaagattctgctattccccggaggctagagtgtctaaaagaagacgttcagcgacaacaagaaagagaaaaggaacttcaacatagatatgctgatttgctgctggagaaagagactttaaagtcaaaattctgaagtacagtttatattctgtcacaggattaattaattgccggttttcatactctagaaggctgaaactgatgtttatcttcattgacaaatttacccaccatctgtggtttttcagttgtttattttaaatgatatcgatcttacacattctgtgtataaagaccttaactccacaggacggacattttagagtttaaattattaaggctatcattcttttagtaatgtcatatttgcaaacttttttagttttggcctttaatttaaaaagcctaattttaaagtgctgcctgtgagtaactcttgaataaaaacaaaatataaaaaattgag

SEQ ID NO: 4759 - protein, 163 aa, Homo sapiens [sequence omitted]

SEQ ID NO: 4760 - DNA, 709 bp, Homo sapiens
ggtattggttgttaaggcattcattaaggtattgttaaaacttgtgttaagcatgttaaagtctcagtaactttgggatagaaataaaatgtgataaaaagctgaaagaaaccaccacaagggagagtcctttttgaaatattagagacataatgctgtctaataaaaaacgacatcaaagaaaaactacactacagtgactgcagacttaatgttggccaaccatgcatcctcccaaagtgctagaattacaggtgtgagccaccatgcccagcctggttattgtattttgatattgggattttgctagctctctaaagtaaataggataactgtatatctttttctgtgcattaagcagttataacatgggaatgatttgttcatgaaaggttgaaagtctgtacttacagaacttttgagttcacagtgctttctggaaataatttctttataactgtcagtttcttttgtgactattatgttacctatttttaaatttaagcaactttaaattaaaaaaattgtttttaaaatatattcttccttttatgtttatttagtaaatttaggtaatgtatactttttaagaaatatttttattttgttcaaatttaaacatctgttgttagcagaaaattctaatagcaatttcttttctattaactttgccatttctaagttataggaaatttaccttctcttaatt

SEQ ID NO: 4761 - protein, 32 aa, Homo sapiens
MLANHASSQSARITGVSHHAQPGYCILILGFC

SEQ ID NO: 4762 - DNA, 637 bp, Homo sapiens
aggcattcaaggtggccctcttggatgtgttccgggaagctcatgcgcagtcaatcggcatgaatcgcctcacagaatccatcaaccgggacagcgaagagcccttctcttcagttgagatccaggctgctctgagcaagatgcaggatgacaatcagtgttgaattcaactgaaggcgaggaatgttggtgatgaagctgagttcaggactcggtggaccctttgggaatgggtcatgaaagctgccatggggtgaggaaagaggagacagtgggagaggacaatgactattgcatcttcattgcaaaagcactggctcatccgccctacttcccatcccacacaaacccaattgtaaataacatatgacttctgagtacttttgggggcacaactgttttctgtttgctgtttttttgttttgttttttttctccagagcactttggtctagactaggctttgggtggttccaattggtggagagaagctctgaggcacgtcatgcaggtcaagaaagctttctttgcagtagcaccagttaaggtgaatatgtattgtatcacaaaacaaacccaatatccagatgaatatccgagatgttgaataaacttagccatttcgtacacatggtctt

SEQ ID NO: 4763 - protein, 34 aa, Homo sapiens
MNRLTESINRDSEEPFSSVEIQAALSKMQDDNQC

SEQ ID NO: 4764 - DNA, 3167 bp, Homo sapiens
agagaactcagccaatcataatgcttatatgctcccaaggtccccgcctcttcctcgaggtaacctttggtggcgggaagagttcggaagttttcgcgccggggtggagtcatcctgggaacctccacgcgactttggtggaggtagttctttggcagcgggcatggcgggtaccgtggtgctggacgatgtggagctgcgggaggctcagagagattacctggacttcctggacgacgaggaagaccagggaatttatcagagcaaagttcgggagctgatcagtgacaaccaataccggctgattgtcaatgtgaatgacctgcgcaggaaaaacgagaagagggctaaccggcttctgaacaatgcctttgaggagctggttgccttccagcgggccttaaaggattttgtggcctccattgatgctacctatgccaagcagtatgaggagttctacgtaggactggaaggcagctttggctccaagcacgtctccccgcggactcttacctcctgcttcctcagctgtgtggtctgtgtggagggcattgtcactaaatgttctctagttcgtcccaaagtcgtccgcagtgtccactactgtcctgctactaagaagaccatagagcgacgttattctgatctcaccaccctggtggcctttccctccagctctgtctatcctaccaaggatgaggagaacaatccccttgagacagaatatggcctttctgtctacaaggatcaccagaccatcaccatccaggagatgccggagaaggccccagccggccagctcccccgctctgtggacgtcattctggatgatgacttggtggataaagcgaagcctggtgaccgggttcaggtggtgggaacctaccgttgccttcctggaaagaagggaggctacacctctgggaccttcaggactgtcctgattgcctgtaatgttaagcagatgagcaaggatgctcagccctctttctctgctgaggatatagccaagatcaagaagttcagtaaaacccgatccaaggatatctttgaccagctggccaagtcattggccccaagtatccatgggcatgactatgtcaagaaagcaatcctctgcttgctcttgggaggggtggaacgagacctagaaaatggcagccacatccgtggggacatcaatattcttctaataggagacccatccgttgccaagtctcagcttctgcggtatgtgctttgcactgcaccccgagctatccccaccactggccggggctcctctggagtgggtctgacggctgctgtcaccacagaccaggaaacaggagagcgccgtctggaagcaggggccatggtcctggctgaccgaggcgtggtttgcattgatgaatttgacaaaatgtctgacatggatcgcacagccatccatgaagtgatggagcagggtcgagtgaccattgccaaggctggcatccatgctcggctgaatgcccgctgcagtgttttggcagctgccaaccctgtctacggcaggtatgaccagtataagactccaatggagaacattgggctacaggactcactgctgtcacgatttgacttgctcttcatcatgctggatcagatggatcctgagcaggatcgggagatctcagaccatgtccttcggatgcaccgttacagagcacctggggagcaggatggcgatgctatgcccttgggtagtgctgtggatatcctggccacagatgatcccaactttagccaggaagatcagcaggacacccagatttatgagaagcatgacaaccttctacatgggaccaagaagaaaaaggagaagatggtgagtgcagcattcatgaagaagtacatccatgtggccaaaatcatcaagcctgtcctgacacaggagtcggccacctacattgcagaagagtattcacgcctgcgcagccaggatagcatgagctcagacaccgccaggacatctccagttacagcccgaacactggaaactctgattcgactggccacagcccatgcgaaggcccgcatgagcaagactgtggacctgcaggatgcagaggaagctgtggagttggtccagtatgcttactttaagaaggttctggagaaggagaagaaacgtaagaagcgaagtgaggatgaatcagagacagaagatgaagaggagaaaagccaagaggaccaggagcagaagaggaagagaaggaagactcgccagccagatgccaaagatggggattcatacgacccctatgacttcagtgacacagaggaggaaatgcctcaagtacacactccaaagacggcagactcacaggagaccaaggaatcccagaaagtggagttgagtgaatccaggttgaaggcattcaaggtggccctcttggatgtgttccgggaagctcatgcgcagtcaatcggcatgaatcgcctcacagaatccatcaaccgggacagcgaagagcccttctcttcagttgagatccaggctgctctgagcaagatgcaggatgacaatcaggtcatggtgtctgagggcatcatcttcctcatctgaggaggcctcgtctctgaacttgggttgtgccgagagagtttgttctgtgtttcccaccctctccctgacccaagtctttgcctctactcccttaacagtgttgaattcaactgaaggcgaggaatgttggtgatgaagctgagttcaggactcggtggaccctttgggaatgggtcatgaaagctgccatggggtgaggaaagaggagacagtgggagaggacaatgactattgcatcttcattgcaaaagcactggctcatccgccctacttcccatcccacacaaacccaattgtaaataacatatgacttctgagtacttttgggggcacaactgttttctgtttgctgtttttttgttttgttttttttctccagagcactttggtctagactaggctttgggtggttccaattggtggagagaagctctgaggcacgtcatgcaggtcaagaaagctttctttgcagtagcaccagttaaggtgaatatgtattgtatcacaaaacaaacccaatatccagatgaatatccgagatgttgaataaacttagccatttcgtacacatggtctt

SEQ ID NO: 4765 - protein, 853 aa, Homo sapiens
MLPRSPPLPRGNLWWREEFGSFRAGVESSWEPPRDFGGGSSLAAGMAGTVVLDDVELREAQRDYLDFLDDEEDQGIYQSKVRELISDNQYRLIVNVNDLRRKNEKRANRLLNNAFEELVAFQRALKDFVASIDATYAKQYEEFYVGLEGSFGSKHVSPRTLTSCFLSCVVCVEGIVTKCSLVRPKVVRSVHYCPATKKTIERRYSDLTTLVAFPSSSVYPTKDEENNPLETEYGLSVYKDHQTITIQEMPEKAPAGQLPRSVDVILDDDLVDKAKPGDRVQVVGTYRCLPGKKGGYTSGTFRTVLIACNVKQMSKDAQPSFSAEDIAKIKKFSKTRSKDIFDQLAKSLAPSIHGHDYVKKAILCLLLGGVERDLENGSHIRGDINILLIGDPSVAKSQLLRYVLCTAPRAIPTTGRGSSGVGLTAAVTTDQETGERRLEAGAMVLADRGVVCIDEFDKMSDMDRTAIHEVMEQGRVTIAKAGIHARLNARCSVLAAANPVYGRYDQYKTPMENIGLQDSLLSRFDLLFIMLDQMDPEQDREISDHVLRMHRYRAPGEQDGDAMPLGSAVDILATDDPNFSQEDQQDTQIYEKHDNLLHGTKKKKEKMVSAAFMKKYIHVAKIIKPVLTQESATYIAEEYSRLRSQDSMSSDTARTSPVTARTLETLIRLATAHAKARMSKTVDLQDAEEAVELVQYAYFKKVLEKEKKRKKRSEDESETEDEEEKSQEDQEQKRKRRKTRQPDAKDGDSYDPYDFSDTEEEMPQVHTPKTADSQETKESQKVELSESRLKAFKVALLDVFREAHAQSIGMNRLTESINRDSEEPFSSVEIQAALSKMQDDNQVMVSEGIIFLI

SEQ ID NO: 4766 - DNA, 771 bp, Homo sapiens
agagaactcagccaatcataatgcttatatgctcccaaggtccccgcctcttcctcgaggtaacctttggtggcgggaagagttcggaagttttcgcgccggggtggagtcatcctgggaacctccacgcgactttggtggaggtagttctttggcagcgggcatggcgggtaccgtggtgctggacgatgtggagctgcgggaggctcagagagattacctggacttcctggacgacgaggaagaccagggaatttatcagagcaaagttcgggagctgatcagtgacaaccaataccggctgattgtcaatgtgaatgacctgcgcaggaaaaacgagaagagggctaaccggcttctgaacaatgcctttgaggagctggttgccttccagcgggccttaaaggattttgtggcctccattgatgctacctatgccaagcagtatgaggagttctacgtaggactggaaggcagctttggctccaagcacgtctccccgcggactcttacctcctgcttcctcagctgtgtggtctgtgtggagggcattgtcactaaatgttctctagttcgtcccaaagtcgtccgcagtgtccactactgtcctgctactaagaagaccatagagcgacgttattctgatctcaccaccctggtggcctttccctccagctctgtctatcctaccaaggatgaggagaacaatcccccccccgctctgtggacgtcattctggatgatgacttggtggataaagcgaagcctggt

SEQ ID NO: 4767 - protein, 246 aa, Homo sapiens
MLPRSPPLPRGNLWWREEFGSFRAGVESSWEPPRDFGGGSSLAAGMAGTVVLDDVELREAQRDYLDFLDDEEDQGIYQSKVRELISDNQYRLIVNVNDLRRKNEKRANRLLNNAFEELVAFQRALKDFVASIDATYAKQYEEFYVGLEGSFGSKHVSPRTLTSCFLSCVVCVEGIVTKCSLVRPKVVRSVHYCPATKKTIERRYSDLTTLVAFPSSSVYPTKDEENNPPPALWTSFWMMTWWIKRS

SEQ ID NO: 4768 - DNA, 1873 bp, Homo sapiens
agagaactcagccaatcataatgcttatatgctcccaaggtccccgcctcttcctcgaggtaacctttggtggcgggaagagttcggaagttttcgcgccggggtggagtcatcctgggaacctccacgcgactttggtggaggtagttctttggcagcgggcatggcgggtaccgtggtgctggacgatgtggagctgcgggaggctcagagagattacctggacttcctggacgacgaggaagaccagggaatttatcagagcaaagttcgggagctgatcagtgacaaccaataccggctgattgtcaatgtgaatgacctgcgcaggaaaaacgagaagagggctaaccggcttctgaacaatgcctttgaggagctggttgccttccagcgggccttaaaggattttgtggcctccattgatgctacctatgccaagcagtatgaggagttctacgtaggactggaaggcagctttggctccaagcacgtctccccgcggactcttacctcctgcttcctcagctgtgtggtctgtgtggagggcattgtcactaaatgttctctagttcgtcccaaagtcgtccgcagtgtccactactgtcctgctactaagaagaccatagagcgacgttattctgatctcaccaccctggtggcctttccctccagctctgtctatcctaccaaggtttgggagcaggttggcataggaaaatgctttcttcttggtgttcagattgatctggattgaggacaatgcaaggttttcctctggagacaaaagatcatttatatggattacttgatgtctgaactgattctatcaaacaattcctctcctcccctcatcaaattttaattgagaactactgtattcaaagcactattaggcgctatggaggacaaggatataaataagacccagtcctcgtcattagtcttcacagtggtggagaaatgaaacataaacaaaaacgaatgaatatcttagaattataacttaaacatactttagcatcatttagtctacctccagatgaaatgctgagatcagagaagttaaacaatttgcttacggtcccagttagtgatggccttaaggactaggacctgtgtctctttaattcatgccagttgtattttctaagtcattctgttgtcttcttcggaccttaagatctccacttttttagaatttcctcttcaggaagtacttgggaagtactcttctgttgattactgtggccaagcttctttacttgaaaagtgaaatacattggaccagatcttctggaggttgtctatggtgatgcttaagagcgtgggctttggagttaacacctgtatcaagtcaagactctgctacttaactgtgtgacctgggggaacttacttaatctctcctagtctcctggtttccttgtgcatgacgtgtgaaaataccttctttacaaagttgttgtgataattacatgagataattttgtgaagtaatagcacagtgcctggcacatagcaaacactcaataagtgacaactgtgtttttagaaaattcaaatgtgaaggaagtaaaactttaatatacgtacaggaaagctcacataagtgtatagcttgatgaatttttacaagctgagtacacctgtgtaaccagctccaaatgaggaaatattagcacacagaagtccctcttgagggctcatgttacctaggggtaaccactatcctgatgtctaacagtatggattactttcagctgttttttatttaaatacttatgggctttttatgctcaacattgtgtttatgagatttatccatgttgtgtataggtgtgtttcatacatttttattgctgtatagtat

SEQ ID NO: 4769 - protein, 242 aa, Homo sapiens
MLPRSPPLPRGNLWWREEFGSFRAGVESSWEPPRDFGGGSSLAAGMAGTVVLDDVELREAQRDYLDFLDDEEDQGIYQSKVRELISDNQYRLIVNVNDLRRKNEKRANRLLNNAFEELVAFQRALKDFVASIDATYAKQYEEFYVGLEGSFGSKHVSPRTLTSCFLSCVVCVEGIVTKCSLVRPKVVRSVHYCPATKKTIERRYSDLTTLVAFPSSSVYPTKVWEQVGIGKCFLLGVQIDLD

SEQ ID NO: 4770 - DNA, 1010 bp, Homo sapiens
agagaactcagccaatcataatgcttatatgctcccaaggtccccgcctcttcctcgaggtaacctttggtggcgggaagagttcggaagttttcgcgccggggtggagtcatcctgggaacctccacgcgactttggtggaggtagttctttggcagcgggcatggcgggtaccgtggtgctggacgatgtggagctgcgggaggctcagagagattacctggacttcctggacgacgaggaagaccagggaatttatcagagcaaagttcgggagctgatcagtgacaaccaataccggctgattgtcaatgtgaatgacctgcgcaggaaaaacgagaagagggctaaccggcttctgaacaatgcctttgaggagctggttgccttccagcgggccttaaaggattttgtggcctccattgatgctacctatgccaagcagtatgaggagttctacgtaggactggaaggcagctttggctccaagcacgtctccccgcggactcttacctcctgcttcctcagctgtgtggtctgtgtggagggcattgtcactaaatgttctctagttcgtcccaaagtcgtccgcagtgtccactactgtcctgctactaagaagaccatagagcgacgttattctgatctcaccaccctggtggcctttccctccagctctgtctatcctaccaaggtttgggagcaggttggcataggaaaatgctttcttcttggtgttcagattgatctggattgaggacaatgcaaggttttcctctggagacaaaagatcatttatatggattacttgatgtctgaactgattctatcaaacaattcctctcctccccttgtcttcttcggaccttaagatctccacttttttagaatttcctcttcaggaagtacttgggaagtactcttctgttgattactgtggccaagcttctttacttgaaaagtgaaatacattggaccagatcttctggaggttgtctatggtgatgctt

SEQ ID NO: 4771 - protein, 242 aa, Homo sapiens; identical to SEQ ID NO: 4769

SEQ ID NO: 4772 - DNA, 995 bp, Homo sapiens
tgctggcggctgacctgtttccctctccctcctccctgcctaagaaaaggaataggggcaggagaggcccttcctataccagtatctcctctggatccgcctaggtcttcgctctcatgctactactcctcagtttgttaaatactgccctatttaccgtttgacagagtcccgtagatgagcaatggggaactggttgccagggtctaaatttggattgatttatgcactgttatctgttttgacacagatttccttgtaaaatgtgcctagtttaccaaaattaacaaagggggggaaaggaccttagaactttttaaggtaaaatcaaatatagctacagcataagagaatcgagaaatttgatagaggtaacttgtttaatgtaaatctaatagtacttgtaatttctttctgcttagaatctaaagatgtgtttagaacctcttgtttaaaaataatagactgcttatcataaaatcacatctcacacatttgaggcagtggtcaaacaggtaaagcctatgatgtgtgtcattttaaagtgtcggaatttagcctctgaataccttctccattgggggaaagatattcttggaaccactcatgacatatcttagaaggtcattgacaatgtataaactaattgttggtttgatatttatgtaaatatcagtttaccatgctttaattttgcacattcgtactatagggagcctattggttctctattagtcttgtgggttttctgtttgaaaaggagtcatggcatctgtttacatttaccttatcaaacctagaatgtgtatatttataaatgtatgtcttcattgctaggtactaatttgcagatgtctttacatatttcaatacagaaactataacattcaatagtgtgctgtcaaagtgtgcttagctcacctggatatacctacattgttaaatgtctaaacagtaatcattaaaacatttttgattacctgtgcctgcatttt

SEQ ID NO: 4773 - protein, 31 aa, Homo sapiens
MMCVILKCRNLASEYLLHWGKDILGTTHDIS

SEQ ID NO: 4774 - DNA, 1754 bp, Homo sapiens
gtgctctgcgccgggggagctagagtgtgtgttgtcttgcgagttgtaaggaaaagtgcctttttactgtttccacgccggttttcaaatggaacattttgatgcatcacttagtacctatttcaaggcattgctaggccctcgagatactagagtaaaaggatggtttcttctggacaattatataagtagggataagatttctaacatttctgggctctctgacccctgcgctagactgtggaaagggagtattattatagtatacaacactgctgttgccttattagttataacatgataggtgctgaattgtgattcacaatttaaaaacactgtaatccaaacttttttttttaactgtagatcatgcatgtgattgtaaatgtaaatttgtacaatgttgttatggtagagaaacacacatgccttaaaatttaaaaagcagggcccaaagcttattagtttaaattagggtatgtttcaagtttgtattaatttgtaatagctctgtttagaaaaaatcaaagaccatgatttatgaaactaatgtgacataatttccagtgacttgttgatgtgaaatcagacacggcaccttcagttttgtactattggctttgaatcaagcaggctcaaatctagtggaacagtcagtttaactttttaacagatcttatttttttattttgagtgccactattaatgtaaaaaggggggggctctacagcagtcgtgatgaaacttaaatatatattctttgtcctcgagattttaggaagggtgtagggtgagtaggccatttttaatttctgaagtgctaagtgtttttatacagcaaacaaaaagtcaattttgctttccaccagtgcgagagaggatgtatacttttcaagagagatgattgcctatttaccgtttgacagagtcccgtagatgagcaatggggaactggttgccagggtctaaatttggattgatttatgcactgttatctgttttgacacagatttccttgtaaaatgtgcctagtttaccaaaattaacaaagggggggaaaggaccttagaactttttaaggtaaaatcaaatatagctacagcataagagaatcgagaaatttgatagaggtaacttgtttaatgtaaatctaatagtacttgtaatttctttctgcttagaatctaaagatgtgtttagaacctcttgtttaaaaataatagactgcttatcataaaatcacatctcacacatttgaggcagtggtcaaacaggtaaagcctatgatgtgtgtcattttaaagtgtcggaatttagcctctgaataccttctccattgggggaaagatattcttggaaccactcatgacatatcttagaaggtcattgacaatgtataaactaattgttggtttgatatttatgtaaatatcagtttaccatgctttaattttgcacattcgtactatagggagcctattggttctctattagtcttgtgggttttctgtttgaaaaggagtcatggcatctgtttacatttaccttatcaaacctagaatgtgtatatttataaatgtatgtcttcattgctaggtactaatttgcagatgtctttacatatttcaatacagaaactataacattcaatagtgtgctgtcaaagtgtgcttagctcacctggatatacctacattgttaaatgtctaaacagtaatcattaaaacatttttgattacctgtgcctgcatttt

SEQ ID NO: 4775 - protein, 70 aa, Homo sapiens
MEHFDASLSTYFKALLGPRDTRVKGWFLLDNYISRDKISNISGLSDPCARLWKGSIIIVYNTAVALLVIT

SEQ ID NO: 4776 - DNA, 3243 bp, Homo sapiens
cccatcgcgcgggtcctagccaccggtgtctccttctacatccgcctctgcgccggctgccacccgcgctccctccgccgccgccgccttgctgctgctcaaagctgctgccgccccttgggctaaaaggtaaagccgtcagctccgggaaacttcgtcgggggccgccgctcggccatgacacccgcgcgagcgcgcggccgggaagcggtcagagagaactgccgttaggtctcggacctggtgccgagaaagagctgccggggcaacccgcgctccgcccgcggcctccagctccgccggctccggggtacagcccggctcctcgggcgcggggaaaggggtgcgggtgcgggcgcgggcggctcgccccacgccgaggctgaggcagggcgctcgggagcgttctctgtgctgcggtcccacctgtgcgcgctgacaggcgccgcggggcacgacaccgtgcccacaccagacgcggagggatggatctgtccgcctgggtcctcccgccctgcgggccggagcgcgcggcgggagagccgggggagcgctctcggagggagcgcgctttctttggagtcggcgaaacccgggttttcaaatggaacattttgatgcatcacttagtacctatttcaaggcattgctaggccctcgagatactagagtaaaaggatggtttcttctggacaattatatacccacatttatctgctctgtcatatatttactaattgtatggctgggaccaaaatacatgaggaataaacagccattctcttgccgggggattttagtggtgtataaccttggactcacactgctgtctctgtatatgttctgtgagttagtaacaggagtatgggaaggcaaatacaacttcttctgtcagggcacacgcaccgcaggagaatcagatatgaagattatccgtgtcctctggtggtactacttctccaaactcatagaatttatggacactttcttcttcatcctgcgcaagaacaaccaccagatcacggtcctgcacgtctaccaccatgcctcgatgctgaacatctggtggtttgtgatgaactgggtcccctgcggccactcttattttggtgccacacttaatagcttcatccacgtcctcatgtactcttactatggtttgtcgtcagtcccttccatgcgtccatacctctggtggaagaagtacatcactcaggggcagctgcttcagtttgtgctgacaatcatccagaccagctgcggggtcatctggccgtgcacattccctcttggttggttgtatttccagattggatacatgatttccctgattgctctcttcacaaacttctacattcagacctacaacaagaaaggggcctcccgaaggaaagaccacctgaaggaccaccagaatgggtccatggctgctgtgaatggacacaccaacagcttttcacccctggaaaacaatgtgaagccaaggaagctgcggaaggattgaagtcaaagaattgaaaccctccaaaccacgtcatctgattgtaagcacaatatgagttgtgccccaatgctcgttaacagctgctgtaactagtctggcctacaatagtgtgattcatgtaggacttctttcatcaattcaaaacccctagaaaacgtatacagattatataagtagggataagatttctaacatttctgggctctctgacccctgcgctagactgtggaaagggagtattattatagtatacaacactgctgttgccttattagttataacatgataggtgctgaattgtgattcacaatttaaaaacactgtaatccaaacttttttttttaactgtagatcatgcatgtgattgtaaatgtaaatttgtacaatgttgttatggtagagaaacacacatgccttaaaatttaaaaagcagggcccaaagcttattagtttaaattagggtatgtttcaagtttgtattaatttgtaatagctctgtttagaaaaaatcaaagaccatgatttatgaaactaatgtgacataatttccagtgacttgttgatgtgaaatcagacacggcaccttcagttttgtactattggctttgaatcaagcaggctcaaatctagtggaacagtcagtttaactttttaacagatcttatttttttattttgagtgccactattaatgtaaaaaggggggggctctacagcagtcgtgatgaaacttaaatatatattctttgtcctcgagattttaggaagggtgtagggtgagtaggccatttttaatttctgaagtgctaagtgtttttatacagcaaacaaaaagtcaattttgctttccaccagtgcgagagaggatgtatacttttcaagagagatgattgcctatttaccgtttgacagagtcccgtagatgagcaatggggaactggttgccagggtctaaatttggattgatttatgcactgttatctgttttgacacagatttccttgtaaaatgtgcctagtttaccaaaattaacaaagggggggaaaggaccttagaactttttaaggtaaaatcaaatatagctacagcataagagaatcgagaaatttgatagaggtaacttgtttaatgtaaatctaatagtacttgtaatttctttctgcttagaatctaaagatgtgtttagaacctcttgtttaaaaataatagactgcttatcataaaatcacatctcacacatttgaggcagtggtcaaacaggtaaagcctatgatgtgtgtcattttaaagtgtcggaatttagcctctgaataccttctccattgggggaaagatattcttggaaccactcatgacatatcttagaaggtcattgacaatgtataaactaattgttggtttgatatttatgtaaatatcagtttaccatgctttaattttgcacattcgtactatagggagcctattggttctctattagtcttgtgggttttctgtttgaaaaggagtcatggcatctgtttacatttaccttatcaaacctagaatgtgtatatttataaatgtatgtcttcattgctaggtactaatttgcagatgtctttacatatttcaatacagaaactataacattcaatagtgtgctgtcaaagtgtgcttagctcacctggatatacctacattgttaaatgtctaaacagtaatcattaaaacatttttgattacctgtgcctgcatttt

SEQ ID NO: 4777 - protein, 299 aa, Homo sapiens; identical to SEQ ID NO: 612

SEQ ID NO: 4778 - DNA, 2194 bp, Homo sapiens
tctccaccgcatcggattctggaatttacgatcacgaaagttctattgtcccgcgattggctcccgggccgcatgacatcatagcgcttgattcatccttcgggtcccgattggctggccgcgccattgtgacgtcacggtcagcccacgttctgattgtagatagccggcgccttcctcttcccatcgcgcgggtcctagccaccggtgtctccttctacatccgcctctgcgccggctgccacccgcgctccctccgccgccgccgccttgctgctgctcaaagctgctgccgccccttgggctaaaagacctacaacaagaaaggggcctcccgaaggaaagaccacctgaaggaccaccagaatgggtccatggctgctgtgaatggacacaccaacagcttttcacccctggaaaacaatgtgaagccaaggaagctgcggaaggattgaagtcaaagaattgaaaccctccaaaccacgtcatctgattgtaagcacaatatgagttgtgccccaatgctcgttaacagctgctgtaactagtctggcctacaatagtgtgattcatgtaggacttctttcatcaattcaaaacccctagaaaacgtatacagattatataagtagggataagatttctaacatttctgggctctctgacccctgcgctagactgtggaaagggagtattattatagtatacaacactgctgttgccttattagttataacatgataggtgctgaattgtgattcacaatttaaaaacactgtaatccaaacttttttttttaactgtagatcatgcatgtgattgtaaatgtaaatttgtacaatgttgttatggtagagaaacacacatgccttaaaatttaaaaagcagggcccaaagcttattagtttaaattagggtatgtttcaagtttgtattaatttgtaatagctctgtttagaaaaaatcaaagaccatgatttatgaaactaatgtgacataatttccagtgacttgttgatgtgaaatcagacacggcaccttcagttttgtactattggctttgaatcaagcaggctcaaatctagtggaacagtcagtttaactttttaacagatcttatttttttattttgagtgccactattaatgtaaaaaggggggggctctacagcagtcgtgatgaaacttaaatatatattctttgtcctcgagattttaggaagggtgtagggtgagtaggccatttttaatttctgaagtgctaagtgtttttatacagcaaacaaaaagtcaattttgctttccaccagtgcgagagaggatgtatacttttcaagagagatgattgcctatttaccgtttgacagagtcccgtagatgagcaatggggaactggttgccagggtctaaatttggattgatttatgcactgttatctgttttgacacagatttccttgtaaaatgtgcctagtttaccaaaattaacaaagggggggaaaggaccttagaactttttaaggtaaaatcaaatatagctacagcataagagaatcgagaaatttgatagaggtaacttgtttaatgtaaatctaatagtacttgtaatttctttctgcttagaatctaaagatgtgtttagaacctcttgtttaaaaataatagactgcttatcataaaatcacatctcacacatttgaggcagtggtcaaacaggtaaagcctatgatgtgtgtcattttaaagtgtcggaatttagcctctgaataccttctccattgggggaaagatattcttggaaccactcatgacatatcttagaaggtcattgacaatgtataaactaattgttggtttgatatttatgtaaatatcagtttaccatgctttaattttgcacattcgtactatagggagcctattggttctctattagtcttgtgggttttctgtttgaaaaggagtcatggcatctgtttacatttaccttatcaaacctagaatgtgtatatttataaatgtatgtcttcattgctaggtactaatttgcagatgtctttacatatttcaatacagaaactataacattcaatagtgtgctgtcaaagtgtgcttagctcacctggatatacctacattgttaaatgtctaaacagtaatcattaaaacatttttgattacctgtgcctgcatttt

SEQ ID NO: 4779 - protein, 31 aa, Homo sapiens; identical to SEQ ID NO: 4773

SEQ ID NO: 4780 - DNA, 2213 bp, Homo sapiens
tctccaccgcatcggattctggaatttacgatcacgaaagttctattgtcccgcgattggctcccgggccgcatgacatcatagcgcttgattcatccttcgggtcccgattggctggccgcgccattgtgacgtcacggtcagcccacgttctgattgtagatagccggcgccttcctcttcccatcgcgcgggtcctagccaccggtgtctccttctacatccgcctctgcgccggctgccacccgcgctccctccgccgccgccgccttgctgctgctcaaagctgctgccgccccttgggctaaaaggttttcaaatggaacattttgatgcatcacttagtacctatttcaaggcattgctaggccctcgagatactagagtaaaaggatggctgctgtgaatggacacaccaacagcttttcacccctggaaaacaatgtgaagccaaggaagctgcggaaggattgaagtcaaagaattgaaaccctccaaaccacgtcatctgattgtaagcacaatatgagttgtgccccaatgctcgttaacagctgctgtaactagtctggcctacaatagtgtgattcatgtaggacttctttcatcaattcaaaacccctagaaaacgtatacagattatataagtagggataagatttctaacatttctgggctctctgacccctgcgctagactgtggaaagggagtattattatagtatacaacactgctgttgccttattagttataacatgataggtgctgaattgtgattcacaatttaaaaacactgtaatccaaacttttttttttaactgtagatcatgcatgtgattgtaaatgtaaatttgtacaatgttgttatggtagagaaacacacatgccttaaaatttaaaaagcagggcccaaagcttattagtttaaattagggtatgtttcaagtttgtattaatttgtaatagctctgtttagaaaaaatcaaagaccatgatttatgaaactaatgtgacataatttccagtgacttgttgatgtgaaatcagacacggcaccttcagttttgtactattggctttgaatcaagcaggctcaaatctagtggaacagtcagtttaactttttaacagatcttatttttttattttgagtgccactattaatgtaaaaaggggggggctctacagcagtcgtgatgaaacttaaatatatattctttgtcctcgagattttaggaagggtgtagggtgagtaggccatttttaatttctgaagtgctaagtgtttttatacagcaaacaaaaagtcaattttgctttccaccagtgcgagagaggatgtatacttttcaagagagatgattgcctatttaccgtttgacagagtcccgtagatgagcaatggggaactggttgccagggtctaaatttggattgatttatgcactgttatctgttttgacacagatttccttgtaaaatgtgcctagtttaccaaaattaacaaagggggggaaaggaccttagaactttttaaggtaaaatcaaatatagctacagcataagagaatcgagaaatttgatagaggtaacttgtttaatgtaaatctaatagtacttgtaatttctttctgcttagaatctaaagatgtgtttagaacctcttgtttaaaaataatagactgcttatcataaaatcacatctcacacatttgaggcagtggtcaaacaggtaaagcctatgatgtgtgtcattttaaagtgtcggaatttagcctctgaataccttctccattgggggaaagatattcttggaaccactcatgacatatcttagaaggtcattgacaatgtataaactaattgttggtttgatatttatgtaaatatcagtttaccatgctttaattttgcacattcgtactatagggagcctattggttctctattagtcttgtgggttttctgtttgaaaaggagtcatggcatctgtttacatttaccttatcaaacctagaatgtgtatatttataaatgtatgtcttcattgctaggtactaatttgcagatgtctttacatatttcaatacagaaactataacattcaatagtgtgctgtcaaagtgtgcttagctcacctggatatacctacattgttaaatgtctaaacagtaatcattaaaacatttttgattacctgtgcctgcatttt

SEQ ID NO: 4781 - protein, 31 aa, Homo sapiens; identical to SEQ ID NO: 4773

SEQ ID NO: 4782 - DNA, 2901 bp, Homo sapiens
attaggaagaaaggggaaaaaaatttcccagagacacgtggaaccgaggggccaaccccggcctaggctctccaccgcatcggattctggaatttacgatcacgaaagttctattgtcccgcgattggctcccgggccgcatgacatcatagcgcttgattcatccttcgggtcccgattggctggccgcgccattgtgacgtcacggtcagcccacgttctgattgtagatagccggcgccttcctcttcccatcgcgcgggtcctagccaccggtgtctccttctacatccgcctctgcgccggctgccacccgcgctccctccgccgccgccgccttgctgctgctcaaagctgctgccgccccttgggctaaaaggttttcaaatggaacattttgatgcatcacttagtacctatttcaaggcattgctaggccctcgagatactagagtaaaaggatggtttcttctggacaattatatacccacatttatctgctctgtcatatatttactaattgtatggctgggaccaaaatacatgaggaataaacagccattctcttgccgggggattttagtggtgtataaccttggactcacactgctgtctctgtatatgttctgtgagttagtaacaggagtatgggaaggcaaatacaacttcttctgtcagggcacacgcaccgcaggagaatcagatatgaagattatccgtgtcctctggtggtactacttctccaaactcatagaatttatggacactttcttcttcatcctgcgcaagaacaaccaccagatcacggtcctgcacgtctaccaccatgcctcgatgctgaacatctggtggtttgtgatgaactgggtcccctgcggccactcttcagtttgtgctgacaatcatccagaccagctgcggggtcatctggccgtgcacattccctcttggttggttgtatttccagattggatacatgatttccctgattgctctcttcacaaacttctacattcagacctacaacaagaaaggggcctcccgaaggaaagaccacctgaaggaccaccagaatgggtccatggctgctgtgaatggacacaccaacagcttttcacccctggaaaacaatgtgaagccaaggaagctgcggaaggattgaagtcaaagaattgaaaccctccaaaccacgtcatctgattgtaagcacaatatgagttgtgccccaatgctcgttaacagctgctgtaactagtctggcctacaatagtgtgattcatgtaggacttctttcatcaattcaaaacccctagaaaacgtatacagattatataagtagggataagatttctaacatttctgggctctctgacccctgcgctagactgtggaaagggagtattattatagtatacaacactgctgttgccttattagttataacatgataggtgctgaattgtgattcacaatttaaaaacactgtaatccaaacttttttttttaactgtagatcatgcatgtgattgtaaatgtaaatttgtacaatgttgttatggtagagaaacacacatgccttaaaatttaaaaagcagggcccaaagcttattagtttaaattagggtatgtttcaagtttgtattaatttgtaatagctctgtttagaaaaaatcaaagaccatgatttatgaaactaatgtgacataatttccagtgacttgttgatgtgaaatcagacacggcaccttcagttttgtactattggctttgaatcaagcaggctcaaatctagtggaacagtcagtttaactttttaacagatcttatttttttattttgagtgccactattaatgtaaaaaggggggggctctacagcagtcgtgatgaaacttaaatatatattctttgtcctcgagattttaggaagggtgtagggtgagtaggccatttttaatttctgaagtgctaagtgtttttatacagcaaacaaaaagtcaattttgctttccaccagtgcgagagaggatgtatacttttcaagagagatgattgcctatttaccgtttgacagagtcccgtagatgagcaatggggaactggttgccagggtctaaatttggattgatttatgcactgttatctgttttgacacagatttccttgtaaaatgtgcctagtttaccaaaattaacaaagggggggaaaggaccttagaactttttaaggtaaaatcaaatatagctacagcataagagaatcgagaaatttgatagaggtaacttgtttaatgtaaatctaatagtacttgtaatttctttctgcttagaatctaaagatgtgtttagaacctcttgtttaaaaataatagactgcttatcataaaatcacatctcacacatttgaggcagtggtcaaacaggtaaagcctatgatgtgtgtcattttaaagtgtcggaatttagcctctgaataccttctccattgggggaaagatattcttggaaccactcatgacatatcttagaaggtcattgacaatgtataaactaattgttggtttgatatttatgtaaatatcagtttaccatgctttaattttgcacattcgtactatagggagcctattggttctctattagtcttgtgggttttctgtttgaaaaggagtcatggcatctgtttacatttaccttatcaaacctagaatgtgtatatttataaatgtatgtcttcattgctaggtactaatttgcagatgtctttacatatttcaatacagaaactataacattcaatagtgtgctgtcaaagtgtgcttagctcacctggatatacctacattgttaaatgtctaaacagtaatcattaaaacatttttgattacctgtgcctgcatttt

SEQ ID NO: 4783 - protein, 262 aa, Homo sapiens
MEHFDASLSTYFKALLGPRDTRVKGWFLLDNYIPTFICSVIYLLIVWLGPKYMRNKQPFSCRGILVVYNLGLTLLSLYMFCELVTGVWEGKYNFFCQGTRTAGESDMKIIRVLWWYYFSKLIEFMDTFFFILRKNNHQITVLHVYHHASMLNIWWFVMNWVPCGHSSVCADNHPDQLRGHLAVHIPSWLVVFPDWIHDFPDCSLHKLLHSDLQQERGLPKERPPEGPPEWVHGCCEWTHQQLFTPGKQCEAKEAAEGLKSKN

SEQ ID NO: 4784 - DNA, 3026 bp, Homo sapiens
attaggaagaaaggggaaaaaaatttcccagagacacgtggaaccgaggggccaaccccggcctaggctctccaccgcatcggattctggaatttacgatcacgaaagttctattgtcccgcgattggctcccgggccgcatgacatcatagcgcttgattcatccttcgggtcccgattggctggccgcgccattgtgacgtcacggtcagcccacgttctgattgtagatagccggcgccttcctcttcccatcgcgcgggtcctagccaccggtgtctccttctacatccgcctctgcgccggctgccacccgcgctccctccgccgccgccgccttgctgctgctcaaagctgctgccgccccttgggctaaaaggttttcaaatggaacattttgatgcatcacttagtacctatttcaaggcattgctaggccctcgagatactagagtaaaaggatggtttcttctggacaattatatacccacatttatctgctctgtcatatatttactaattgtatggctgggaccaaaatacatgaggaataaacagccattctcttgccgggggattttagtggtgtataaccttggactcacactgctgtctctgtatatgttctgtgagttagtaacaggagtatgggaaggcaaatacaacttcttctgtcagggcacacgcaccgcaggagaatcagatatgaagattatccgtgtcctctggtggtactacttctccaaactcatagaatttatggacactttcttcttcatcctgcgcaagaacaaccaccagatcacggtcctgcacgtctaccaccatgcctcgatgctgaacatctggtggtttgtgatgaactgggtcccctgcggccactcttattttggtgccacacttaatagcttcatccacgtcctcatgtactcttactatggtttgtcgtcagtcccttccatgcgtccatacctctggtggaagaagtacatcactcaggggcagctgcttcagtttgtgctgacaatcatccagaccagctgcggggtcatctggccgtgcacattccctcttggttggttgtatttccagattggatacatgatttccctgattgctctcttcacaaacttctacattcagacctacaacaagaaaggggcctcccgaaggaaagaccacctgaaggaccaccagaatgggtccatggctgctgtgaatggacacaccaacagcttttcacccctggaaaacaatgtgaagccaaggaagctgcggaaggattgaagtcaaagaattgaaaccctccaaaccacgtcatctgattgtaagcacaatatgagttgtgccccaatgctcgttaacagctgctgtaactagtctggcctacaatagtgtgattcatgtaggacttctttcatcaattcaaaacccctagaaaacgtatacagattatataagtagggataagatttctaacatttctgggctctctgacccctgcgctagactgtggaaagggagtattattatagtatacaacactgctgttgccttattagttataacatgataggtgctgaattgtgattcacaatttaaaaacactgtaatccaaacttttttttttaactgtagatcatgcatgtgattgtaaatgtaaatttgtacaatgttgttatggtagagaaacacacatgccttaaaatttaaaaagcagggcccaaagcttattagtttaaattagggtatgtttcaagtttgtattaatttgtaatagctctgtttagaaaaaatcaaagaccatgatttatgaaactaatgtgacataatttccagtgacttgttgatgtgaaatcagacacggcaccttcagttttgtactattggctttgaatcaagcaggctcaaatctagtggaacagtcagtttaactttttaacagatcttatttttttattttgagtgccactattaatgtaaaaaggggggggctctacagcagtcgtgatgaaacttaaatatatattctttgtcctcgagattttaggaagggtgtagggtgagtaggccatttttaatttctgaagtgctaagtgtttttatacagcaaacaaaaagtcaattttgctttccaccagtgcgagagaggatgtatacttttcaagagagatgattgcctatttaccgtttgacagagtcccgtagatgagcaatggggaactggttgccagggtctaaatttggattgatttatgcactgttatctgttttgacacagatttccttgtaaaatgtgcctagtttaccaaaattaacaaagggggggaaaggaccttagaactttttaaggtaaaatcaaatatagctacagcataagagaatcgagaaatttgatagaggtaacttgtttaatgtaaatctaatagtacttgtaatttctttctgcttagaatctaaagatgtgtttagaacctcttgtttaaaaataatagactgcttatcataaaatcacatctcacacatttgaggcagtggtcaaacaggtaaagcctatgatgtgtgtcattttaaagtgtcggaatttagcctctgaataccttctccattgggggaaagatattcttggaaccactcatgacatatcttagaaggtcattgacaatgtataaactaattgttggtttgatatttatgtaaatatcagtttaccatgctttaattttgcacattcgtactatagggagcctattggttctctattagtcttgtgggttttctgtttgaaaaggagtcatggcatctgtttacatttaccttatcaaacctagaatgtgtatatttataaatgtatgtcttcattgctaggtactaatttgcagatgtctttacatatttcaatacagaaactataacattcaatagtgtgctgtcaaagtgtgcttagctcacctggatatacctacattgttaaatgtctaaacagtaatcattaaaacatttttgattacctgtgcctgcatttt

SEQ ID NO: 4785 - protein, 299 aa, Homo sapiens; identical to SEQ ID NO: 612

SEQ ID NO: 4786 - DNA, 1532 bp, Homo sapiens
cacaggtaatcaaaaatgttttaatgattactgtttagacatttaacaatgtaggtatatccaggtgagctaagcacactttgacagcacactattgaatgttatagtttctgtattgaaatatgtaaagacatctgcaaattagtacctagcaatgaagacatacatttataaatatacacattctaggtttgataaggtaaatgtaaacagatgccatgactccttttcaaacagaaaacccacaagactaatagagaaccaataggctccctatagtacgaatgtgcaaaattaaagcatggtaaactgatatttacataaatatcaaaccaacaattagtttatacattgtcaatgaccttctaagatatgtcatgagtggttccaagaatatctttcccccaatggagaaggtattcagaggctaaattccgacactttaaaatgacacacatcataggctttacctgtttgaccactgcctcaaatgtgtgagatgtgattttatgataagcagtctattatttttaaacaagaggttctaaacacatctttagattctaagcagaaagaaattacaagtactattagatttacattaaacaagttacctctatcaaatttctcgattctcttatgctgtagctatatttgattttaccttaaaaacccccccctttttacattaatagtggcactcaaaataaaaaaataagatctgttaaaaagttaaactgactgttccactagatttgagcctgcttgattcaaagccaatagtacaaaactgaaggtgccgtgtctgatttcacatcaacaagtcactggaaattatgtcacattagtttcataaatcatggtctttgattttttctaaacagagctattacaaattaatacaaacttgaaacataccctaatttaaactaataagctttgggccctgctttttaaattttaaggcatgtgtgtttctctaccataacaacattgtacaaatttacatttacaatcacatgcatgatctacagttaaaaaaaaaagtttggattacagtgtttttaaattgtgaatcacaattcagcacctatcatgttataactaataaggcaacagcagtgttgtatactataataatactccctttccacagtctagcgcaggggtcagagagcccagaaatgttagaaatcttatccctacttatataatctgtatacgttttctaggggttttgaattgatgaaagaagtcctacatgaatcacactattgtaggccagactagttacagcagctgttaacgagcattggggcacaactcatattgtgcttacaatcagatgacgtggtttggagggtttcaattctttgacttcaatccttccgcagcttccttggcttcacattgttttccaggggtgaaaagctgttggtgtgtccattcacagcagccatggacccattctggtggtccttcaggtggtctttccttcgggaggcccctttcttgttgtaggtctaaaatgt

SEQ ID NO: 4787 - protein, 64 aa, Homo sapiens [sequence omitted]

SEQ ID NO: 4788 - DNA, 734 bp, Homo sapiens
attaggaagaaaggggaaaaaaatttcccagagacacgtggaaccgaggggccaaccccggcctaggctctccaccgcatcggattctggaatttacgatcacgaaagttctattgtcccgcgattggctcccgggccgcatgacatcatagcgcttgattcatccttcgggtcccgattggctggccgcgccattgtgacgtcacggtcagcccacgttctgattgtagatagccggcgccttcctcttcccatcgcgcgggtcctagccaccggtgtctccttctacatccgcctctgcgccggctgccacccgcgctccctccgccgccgccgccttgctgctgctcaaagctgctgccgccccttgggctaaaaggttttcaaatggaacattttgatgcatcacttagtacctatttcaaggcattgctaggccctcgagatactagagtaaaaggatggtttcttctggacaattatatacccacatttatctgctctgtcatatatttactaattgtatggctgggaccaaaatacatgaggaataaacagccattctcttgccgggggattttagtggtgtataaccttggactcacactgctgtctctgtatatgttctgtgagttagtaacaggagtatgggaaggcaaatacaacttcttctgtcagggcacacgcaccgcaggagaatcagatcacggtcctgcacgtctaccaccatgcct

SEQ ID NO: 4789 - protein, 114 aa, Homo sapiens
MEHFDASLSTYFKALLGPRDTRVKGWFLLDNYIPTFICSVIYLLIVWLGPKYMRNKQPFSCRGILVVYNLGLTLLSLYMFCELVTGVWEGKYNFFCQGTRTAGESDHGPARLPP

SEQ ID NO: 4790 - DNA, 998 bp, Homo sapiens
cctcagcctcccaagtagctgggattacaggtgtgcagcaccatgcctggccaatttttatatttttagtagagatagtgttttgccatgttggccaggctggtcttgaactcctgacttcaggtgatccacccgccttggcatcccaaagtgctgggattacaggcatgagccaccacacccagcccttgttttgtttttaaatcattgtcctctctgctgttgaccattacactcatagcaaaggctgcctttctaattagtgccagtttcactaacgtggctaagcagcacgttttctgagtctgcatgtgctggccacacttgccgactgacacacagctgagatggaggacttcagagttcaatgactgccatttcttgggttttatcaccctatgtgtaatctggtatacctggttaataaatccaattaatgggaagtgtagccttctccttgttttcttcttaagttctttggaaagaatatttgtattattattttactgagcaaaaatcatgaataatacattgttattcagagcatgtaacaaggagcttcaccttgtttgatatgtattgaaaatccatgcctcctctcctgattgctttattggaattaagaacatgaataccaggtgacttttatatcatcatggttagagaaattttttcaacgtttgaaaagttgtgaatgtttttatatatcattaattttttttaatttttcagatactagagtaaaaggatggtttcttctggacaattatatacccacatttatctgctctgtcatatatttactaattgtatggctgggaccaaaatacatgaggaataaacagccattctcttgccgggggattttagtggtgtataaccttggactcacactgctgtctctgtatatgttctgtgagttagtaacaggagtatgggaaggcaaatacaacttcttctgtcagggcacacgcaccgcaggagaatcagatatgaag

SEQ ID NO: 4791 - protein, 55 aa, Homo sapiens
MRNKQPFSCRGILVVYNLGLTLLSLYMFCELVTGVWEGKYNFFCQGTRTAGESDM

SEQ ID NO: 4792 - DNA, 1039 bp, Homo sapiens
attaggaagaaaggggaaaaaaatttcccagagacacgtggaaccgaggggccaaccccggcctaggctctccaccgcatcggattctggaatttacgatcacgaaagttctattgtcccgcgattggctcccgggccgcatgacatcatagcgcttgattcatccttcgggtcccgattggctggccgcgccattgtgacgtcacggtcagcccacgttctgattgtagatagccggcgccttcctcttcccatcgcgcgggtcctagccaccggtgtctccttctacatccgcctctgcgccggctgccacccgcgctccctccgccgccgccgccttgctgctgctcaaagctgctgccgccccttgggctaaaaggttttcaaatggaacattttgatgcatcacttagtacctatttcaaggcattgctaggccctcgagatactagagtaaaaggatggtttcttctggacaattatatacccacatttatctgctctgtcatatatttactaattgtatggctgggaccaaaatacatgaggaataaacagccattctcttgccgggggattttagtggtgtataaccttggactcacactgctgtctctgtatatgttctgtgagaatgaagtcagtttaattagactccaagatggagagttcaggactggagccaggggaagtgcacaggagtgactcctggccccagcactatgcacatttctgtgttcaagggacaaaaccacagcaagctgtcagatgattccctggtaaagagaagaaaaacactgtataaagtacagctgtgtgcatctgagtggatgtggggggttctgaacacattgtaatagaaggacttctgatcagcctgcatggatcctgcttgactggccatgactttagagagtagtagaagacagaaaagttaatacaccttctaatgaattaccatttagtaacaggagtatgggaaggcaaatacaacttcttctgtcagggcacacgcaccgcaggagaatcagatatgaag

SEQ ID NO: 4793 - protein, 105 aa, Homo sapiens
MEHFDASLSTYFKALLGPRDTRVKGWFLLDNYIPTFICSVIYLLIVWLGPKYMRNKQPFSCRGILVVYNLGLTLLSLYMFCENEVSLIRLQDGEFRTGARGSAQE

SEQ ID NO: 4794 - DNA, 941 bp, Homo sapiens
attaggaagaaaggggaaaaaaatttcccagagacacgtggaaccgaggggccaaccccggcctaggctctccaccgcatcggattctggaatttacgatcacgaaagttctattgtcccgcgattggctcccgggccgcatgacatcatagcgcttgattcatccttcgggtcccgattggctggccgcgccattgtgacgtcacggtcagcccacgttctgattgtagatagccggcgccttcctcttcccatcgcgcgggtcctagccaccggtgtctccttctacatccgcctctgcgccggctgccacccgcgctccctccgccgccgccgccttgctgctgctcaaagctgctgccgccccttgggctaaaaggttttcaaatggaacattttgatgcatcacttagtacctatttcaaggcattgctaggccctcgagatactagagtaaaaggatggtttcttctggacaattatatacccacatttatctgctctgtcatatatttactaattgtatggctgggaccaaaatacatgaggaataaacagccattctcttgccgggggattttagtggtgtataaccttggactcacactgctgtctctgtatatgttctgtgagaatgaagtcagtttaattagactccaagatggagagttcaggactggagccaggggaagtgcacaggagtgactcctggccccagcactatgcacatttctgtgttcaagggacaaaaccacagcaagctgtcagatgattccctggtaaagagaagaaaaacactgtataaagtacagctgtgtgcatctgagtggatgtggggggttctgaacacattgtaatagaagttagtaacaggagtatgggaaggcaaatacaacttcttctgtcagggcacacgcaccgcaggagaatcagatatgaag

SEQ ID NO: 4795 - protein, 105 aa, Homo sapiens; identical to SEQ ID NO: 4793

SEQ ID NO: 4796 - DNA, 840 bp, Homo sapiens
ctcttcccatcgcgcgggtcctagccaccggtgtctccttctacatccgcctcagcctcccaagtagctgggattacaggtgtgcagcaccatgcctggccaatttttatatttttagtagagatagtgttttgccatgttggccaggctggtcttgaactcctgacttcaggtgatccacccgccttggcatcccaaagtgctgggattacaggcatgagccaccacacccagcccttgttttgtttttaaatcattgtcctctctgctgttgaccattacactcatagcaaaggctgcctttctaattagtgccagtttcactaacgtggctaagcagcacgttttctgagtctgcatgtgctggccacacttgccgactgacacacagctgagatggaggacttcagagttcaatgactgccatttcttgggttttatcaccctatgtgtaatctggtatacctggttaataaatccaattaatgggaagtgtagccttctccttgttttcttcttaagttctttggaaagaatatttgtattattattttactgagcaaaaatcatgaataatacattgttattcagagcatgtaacaaggagcttcaccttgtttgatatgtattgaaaatccatgcctcctctcctgattgctttattggaattaagaacatgaataccaggtgacttttatatcatcatggttagagaaattttttcaacgtttgaaaagttgtgaatgtttttatatatcattaattttttttaatttttcagatactagagtaaaaggatggtttcttctggacaattatatacccacatttatctgctct

SEQ ID NO: 4797 - protein, 66 aa, Homo sapiens
MCWPHLPTDTQLRWRTSEFNDCHFLGFITLCVIWYTWLINPINGKCSLLLVFFLSSLERIFVLLFY

SEQ ID NO: 4798 - DNA, 1299 bp, Homo sapiens
aaaaaatttcccagagacacgtggaaccgaggggccaaccccggcctaggctctccaccgcatcggattctggaatttacgatcacgaaagttctattgtcccgcgattggctcccgggccgcatgacatcatagcgcttgattcatccttcgggtcccgattggctggccgcgccattgtgacgtcacggtcagcccacgttctgattgtagatagccggcgccttcctcttcccatcgcgcgggtcctagccaccggtgtctccttctacatccgcctctgcgccggctgccacccgcgctccctccgccgccgccgccttgctgctgctcaaagctgctgccgccccttgggctaaaaggttttcaaatggaacattttgatgcatcacttagtacctatttcaaggcattgctaggccctcgaggtatcagcagctctgtcctcagaatgggtcccccacttcacacagttgtaggatggctacagcagctccaagcagcacattcagaggaagaagaaaaaatgtttcatttgtgtggttttaagcataaagaagttgtttcccagagctctttgccagctgtcatccctcaaaactcactggccacaattgcttcacatgcccctgcctgaaccagccaccagagggggttaggaccaccacagattgactagatcctaaggattctctacctggggctggagttcgggtcaggtgcccgggaagcactgtgcggtgtgggaggatgaatatgtgccaatttggaaagatgagtatttgtgggaaaatgaataaagcaaagtgtaaatcagaggtttaagttaaaatagggagatttgtgtgtatttattgtttgtgatatatatgttcatacaaaataacagtctgatgttagttgctaagtgggaactggttttcttaaaattgacagccaaggcccaaagctgagaacaaaaggtgttaagcatccccttaaagtccctggggccagccatttccctgaatgacttctaagcacaaccagttctgccggactgacagtaacaccctccgtgaccatagcataactagtggggagggtgtggagggcatgtccctctgaagccaaagcaagccagccatgagagaaatgctgggaaagtttagtgtgtacagtgcaagaaaggaagactgactgacagttccccacgtggacatatgctttattgagcctgttcttgttctgtgaaatcaaggtgaaaacgactggagagagtagcaagatggtccagtctgggaggggtcaaagaaaggg

SEQ ID NO: 4799 - protein, 88 aa, Homo sapiens
MEHFDASLSTYFKALLGPRGISSSVLRMGPPLHTVVGWLQQLQAAHSEEEEKMFHLCGFKHKEVVSQSSLPAVIPQNSLATIASHAPA

SEQ ID NO: 4800 - DNA, 828 bp, Homo sapiens
aaaaaatttcccagagacacgtggaaccgaggggccaaccccggcctaggctctccaccgcatcggattctggaatttacgatcacgaaagttctattgtcccgcgattggctcccgggccgcatgacatcatagcgcttgattcatccttcgggtcccgattggctggccgcgccattgtgacgtcacggtcagcccacgttctgattgtagatagccggcgccttcctcttcccatcgcgcgggtcctagccaccggtgtctccttctacatccgcctctgcgccggctgccacccgcgctccctccgccgccgccgccttgctgctgctcaaagctgctgccgccccttgggctaaaaggttttcaaatggaacattttgatgcatcacttagtacctatttcaaggcattgctaggccctcgaggtatcagcagctctgtcctcagaatgggtcccccacttcacacagttgtaggatggctacagcagctccaagcagcacattcagaggaagaagaaaaaatgtttcatttgtgtggttttaagcataaagaagttgtttcccagagctctttgccagctgtcatccctcaaaactcactggccacaattgcttcacatgcccctgcctgaaccagccaccagagggggttaggaccaccacagattgactagatcctaaggattctctacctggggctggagttcgggtcaggtgcccgggaagcactgtgcggtgtgggaggatgaatatgtgccaatttggaaagatgagtatttgtgggaaaatgaataaagcaaagtgtaaatcagaggtttaagtt

SEQ ID NO: 4801 - protein, 88 aa, Homo sapiens; identical to SEQ ID NO: 4799

SEQ ID NO: 4802 - DNA, 3564 bp, Homo sapiens; identical to SEQ ID NO: 613

SEQ ID NO: 4803 - protein, 178 aa, Homo sapiens [sequence omitted]

SEQ ID NO: 4804 - DNA, 622 bp, Homo sapiens
agtttccttcacaacaccctccccccatagttcattcacaccgagtactgacttttcttgactataagctgccttcaagatactgaaggttcccagtgtttgtgctaagcagggactcaggtggagagaactaaggtcaccctcagggaatttcttgctgaattaggttccactaagccttgaaatcaaaacgcttctgaaatctggatggagaagcagtatttatctcaaagagaagtggacctagaggcttatttcactaggaatcacaccgttttgcaaggtactcgattcaaaagagccattttccaagggcaatactgtagaaattttggctgttgtgaagacagagatgatggctgtgtcactgagttctatgcggcgaatgcgttgtgctactgtgataaattctgtgacagagaaaattctgattgctgtcctgactacaagtccttttgccgtgaagagaaagaatggcctcctcacacacagccttggtatccagaaggttgcttcaaagatggtcaacattatgaagagggatcagtaattaaagaaaactgcaactcctggtaataaatttaagtggcacagaactgagttctactgtgtgtgtatgttt

SEQ ID NO: 4805 - protein, 122 aa, Homo sapiens [sequence omitted]

SEQ ID NO: 4806 - DNA, 481 bp, Homo sapiens
cccagtgtttgtgctaagcagggactcaggtggagagaactaaggtcaccctcagggaatttcttgctgaattaggttccactaagccttgaaatcaaaacgcttctgaaatctggatggagaagcagtatttatctcaaagagaagtggacctagaggcttatttcactaggaatcacaccgttttgcaaggtactcgattcaaaagagccattttccaagggcaatactgtagaaattttggctgttgtgaagacagagatgatggctgtgtcactgagttctatgcggcgaatgcgttgtgctactgtgataaattctgtgacagagaaaattctgattgctgtcctgactacaagtccttttgccgtgaagagaaagaatggcctcctcacacacagccttggtatccagaaggttgcttcaaagatggtcaacattatgaagagggatcagtaattaaagaaaactgcaactcctg

SEQ ID NO: 4807 - protein, 120 aa, Homo sapiens
MEKQYLSQREVDLEAYFTRNHTVLQGTRFKRAIFQGQYCRNFGCCEDRDDGCVTEFYAANALCYCDKFCDRENSDCCPDYKSFCREEKEWPPHTQPWYPEGCFKDGQHYEEGSVIKENCN

SEQ ID NO: 4808 - DNA, 782 bp, Homo sapiens
ggtaggtaaatggagtacagatgggaaatcaaaccagtgtgtgactgggcatgatttagagcaactgttattgatatgacagatcctagcaggcaacctcatgagagcctggatgttcgtttcaatgcaggcagaaatctggatggagaagcagtatttatctcaaagagaagtggacctagaggcttatttcactaggaatcacaccgttttgcaaggtactcgattcaaaagagccattttccaagggcaatactgtagaaattttggctgttgtgaagacagagatgatggctgtgtcactgagttctatgcggcgaatgcgttgtgctactgtgataaattctgtgacagagaaaattctgattgctgtcctgactacaagtccttttgccgtgaagagaaagaatggcctcctcacacacagccttggtatccagaaggttgcttcaaagatggtcaacattatgaagagggatcagtaattaaagaaaactgcaactcctgcacatgctcaggacagcaatggaaatgttcccagcatgtatgccttgttcgttcagaattaattgaacaggtcaataaaggagactatggatggacagcacagaattacagccaattttggggaatgactttagaagatggttttaaatttcgccttggcactttgccacctagtcccatgctcctgagcatgaatgaaatgacagaatgattgaatgggctggcaagatggccgatcaagaacagctctggttggcagctcccagcgagaccaa

SEQ ID NO: 4809 - protein, 205 aa, Homo sapiens
MRAWMFVSMQAEIWMEKQYLSQREVDLEAYFTRNHTVLQGTRFKRAIFQGQYCRNFGCCEDRDDGCVTEFYAANALCYCDKFCDRENSDCCPDYKSFCREEKEWPPHTQPWYPEGCFKDGQHYEEGSVIKENCNSCTCSGQQWKCSQHVCLVRSELIEQVNKGDYGWTAQNYSQFWGMTLEDGFKFRLGTLPPSPMLLSMNEMTE

SEQ ID NO: 4810 - DNA, 1804 bp, Homo sapiens
gaagtatactcattcaagtaaaggatcagtttcagggttcaggctgaagtgtcttaatgactagaattcaggttccaaggagaagcccacaaggctaagggtattggatataacggaaagtggaagctatacctgacttccagagaatgtggaccggatataagatcttaatcttctcttatcttactacagaaatctggatggagaagcagtatttatctcaaagagaagtggacctagaggcttatttcactaggaatcacaccgttttgcaaggtactcgattcaaaagagccattttccaagggcaatactgtagaaattttggctgttgtgaagacagagatgatggctgtgtcactgagttctatgcggcgaatgcgttgtgctactgtgataaattctgtgacagagaaaattctgattgctgtcctgactacaagtccttttgccgtgaagagaaagaatggcctcctcacacacagccttggtatccagaaggttgcttcaaagatggtcaacattatgaagagggatcagtaattaaagaaaactgcaactcctgcacatgctcaggacagcaatggaaatgttcccagcatgtatgccttgttcgttcagaattaattgaacaggtcaataaaggagactatggatggacagcacagaattacagccaattttggggaatgactttagaagatggttttaaatttcgccttggcactttgccacctagtcccatgctcctgagcatgaatgaaatgacagcttctttacctgcaacaactgatcttccagagttttttgttgcttcttataaatggcctggatggactcatggcccattggatcaaaaaaattgtgctgcatcctgggcattttccactgcaagtgtggctgctgaccgaatagcaattcagtctaagggtcgatacacggccaatctatcccctcagaatttgatctcttgctgtgccaagaaccgtcatggatgcaatagtggaagcatcgatagggcttggtggtacctgagaaaacgtggactggtatcccacgcatgctacccacttttcaaagaccaaaatgctaccaacaatggatgtgccatggcaagcaggtctgatgggcgaggaaaacggcatgccacgaagccatgtcccaacaacgtagaaaaatctaacaggatctatcaatgttctcctccatacagagtctcttccaacgaaactgagataatgaaagaaatcatgcaaaatggaccagttcaagccataatgcaagtccgtgaagatttcttccattataagacagggatatacagacatgttaccagcacaaataaagaatcagaaaaatatcgaaagcttcagacacatgcagtcaaactcactggatggggcacactgagaggagcacaagggcagaaagaaaaattttggattgctgccaattcctggggaaagtcatggggagagaatggctatttcaggattcttcgaggagtaaatgagtccgacattgaaaagttgattatcgcagcttggggccaactgacgagttctgatgaaccataacatatcattaaatttccataaggtcatgcctttaagtaaccccctaaattgaagtttagcaatatgacattcttggtgacagtggaatctttgtctcttcaccgtgttaacataatctatctattttcttattttcccctctggtctatgcttctgcttccttcatattactgagcattaacaacaccaataaaggacagcagagtccctaaatgtctttaaagttc

SEQ ID NO: 4811 - protein, 476 aa, Homo sapiens
MWTGYKILIFSYLTTEIWMEKQYLSQREVDLEAYFTRNHTVLQGTRFKRAIFQGQYCRNFGCCEDRDDGCVTEFYAANALCYCDKFCDRENSDCCPDYKSFCREEKEWPPHTQPWYPEGCFKDGQHYEEGSVIKENCNSCTCSGQQWKCSQHVCLVRSELIEQVNKGDYGWTAQNYSQFWGMTLEDGFKFRLGTLPPSPMLLSMNEMTASLPATTDLPEFFVASYKWPGWTHGPLDQKNCAASWAFSTASVAADRIAIQSKGRYTANLSPQNLISCCAKNRHGCNSGSIDRAWWYLRKRGLVSHACYPLFKDQNATNNGCAMASRSDGRGKRHATKPCPNNVEKSNRIYQCSPPYRVSSNETEIMKEIMQNGPVQAIMQVREDFFHYKTGIYRHVTSTNKESEKYRKLQTHAVKLTGWGTLRGAQGQKEKFWIAANSWGKSWGENGYFRILRGVNESDIEKLIIAAWGQLTSSDEP

SEQ ID NO: 4812 - DNA, 2190 bp, Homo sapiens
aggctgaagtgtcttaatgactagaattcaggttccaaggagaagcccacaaggctaagggtattggatataacggaaagtggaagctatacctgacttccagagaatgtggaccggatataagatcttaatcttctcttatcttactacagaaatctggatggagaagcagtatttatctcaaagagaagtggacctagaggcttatttcactaggaatcacaccgttttgcaaggtactcgattcaaaagagccattttccaagggcaatactgtagaaattttggctgttgtgaagacagagatgatggctgtgtcactgagttctatgcggcgaatgcgttgtgctactgtgataaattctgtgacagagaaaattctgattgctgtcctgactacaagtccttttgccgtgaagagaaagaatggcctcctcacacacagccttggtatccagaaggttgcttcaaagatggtcaacattatgaagagggatcagtaattaaagaaaactgcaactcctggtaataaatttaagtggcacagaactgagttctactgtgtgtgtatgttttcttcaaataaaagaaatatttgtgaaccaaagtatacatttatgtacatataggcagaatcatacatcataagacatcatgtacctgtaactttgtataagcatatttaattttaagggattttgaaaatttaatcatgaatatcttttaatgtttgaggttgatgttcttgacaatgggtcttcatcatacaacaggtcttcattaaatgtacctcttaattataatattctgataccctaaggcaaattgtgttttttgagcacagtaactatataaaaacaggctgctttaaaaggactagcctgcagaaagtttccaaatacaagtacattgaatctactgtccaatttggcttgttttcaaacttcagcagatgtgtgatcatatcatttgttaattgcctggagtagaggattacagcatattgagtggtagctaacgtatgttttacaatttatttttgccaagaatcaaataaccatatggctaacattaatcaagaaattatgttttatgccttaacaatgtataactctttttactaattgaaatatacttcataaagaccaagccacttttgtaattgtcatatctttgcagcacatgctcaggacagcaatggaaatgttcccagcatgtatgccttgttcgttcagaattaattgaacaggtcaataaaggagactatgggtgagagaaatcttgctttgtatgtttcttgacactgccatttactatgcaggtttcaatgtattgcttggtttctataaatggtcattgtttaaaaagaaagagtgggagagaaataggaagggagatagaaagcatgtaaacctggaatgcaaaggtaaacattaaataattaaaatgatcaaataataaatctacagcatagctgtaaattatctaggaaagagcaatgtcgtggtgtaggtaagggaagtggagggaaagctactttggataagtatttaggcaaaatcaggaagtcagcaaaattcatgtattcatactaaccatttctccctctgctgctgccctcaccaagccaatcacatgcttagctatcatgggtagaatctgaccttacaaggatgatattcaaataacaagccaatctaaataatttcactgaaatgatgggtatctaaccaatgtcacttacggttgaatcaaaagacagattgagctactttactttgctagtacacaaaaagtagggatgattgacactgaaacattggaaataactgatgctctcatgcagattgaaaaattaggtggcgtctccatttacatagaggaaattaagatgtaggcactggcccggcgaggtggcttatgcctgtaatcccagcactttgggaggccaaggtgggtgggtggatcacttgaggccaggagttcaagaccagcttggacaactagtgagaccccatctctactaaaaatacagaaaaaattagctgggcatggtggtgcatgccgataatcccaggtactcaggaggctgaagcacaacaaccactgaagcctgggaggcggaggttgcagtgagccgagattgcgccactgcactccagcatgggaatcggggggtgaaaccctgtc

SEQ ID NO: 4813 - protein, 140 aa, Homo sapiens [sequence omitted]

SEQ ID NO: 4814 - DNA, 1214 bp, Homo sapiens
ggaaagtggaagctatacctgacttccagagaatgtggaccggatataagatcttaatcttctcttatcttactacagaaatctggatggagaagcagtatttatctcaaagagaagtggacctagaggcttatttcactaggaatcacaccgttttgcaaggtactcgattcaaaagagccattttccaagggcaatactgtagaaattttggctgttgtgaagacagagatgatggctgtgtcactgagttctatgcggcgaatgcgttgtgctactgtgataaattctgtgacagagaaaattctgattgctgtcctgactacaagtccttttgccgtgaagagaaagaatggcctcctcacacacagccttggtatccagaagatggacagcacagaattacagccaattttggggaatgactttagaagatggttttaaatttcgccttggcactttgccacctagtcccatgctcctgagcatgaatgaaatgacaactggtatcccacgcatgctacccacttttcaaagaccaaaatgctaccaacaatggatgtgccatggcaagcaggtctgatgggcgaggaaaacggcatgccacgaagccatgtcccaacaacgtagaaaaatctaacaggatctatcaatgttctcctccatacagagtctcttccaacgaaactgagataatgaaagaaatcatgcaaaatggaccagttcaagccataatgcaagtccgtgaagatttcttccattataagacagggatatacagacatgttaccagcacaaataaagaatcagaaaaatatcgaaagcttcagacacatgcagtcaaactcactggattgctgccaattcctggggaaagtcatggggagagaatggctatttcaggattcttcgaggagtaaatgagtccgacattgaaaagttgattatcgcagcttggggccaactgacgagttctgatgaaccataacatatcattaaatttccataaggtcatgcctttaagtaaccccctaaattgaagtttagcaatatgacattcttggtgacagtggaatctttgtctcttcaccgtgttaacataatctatctattttcttattttcccctctggtctatgcttctgcttccttcatattactgagcattaacaacaccaataaaggacagcagagtccctaaatgtctttaaagtt

SEQ ID NO: 4815 - protein, 130 aa, Homo sapiens
MWTGYKILIFSYLTTEIWMEKQYLSQREVDLEAYFTRNHTVLQGTRFKRAIFQGQYCRNFGCCEDRDDGCVTEFYAANALCYCDKFCDRENSDCCPDYKSFCREEKEWPPHTQPWYPEDGQHRITANFGE

SEQ ID NO: 4816 - DNA, 437 bp, Homo sapiens
gaaatctggatggagaagcagtatttatctcaaagagaagtggacctagaggcttatttcactaggaatcacaccgttttgcaaggttgcttcaaagatggtcaacattatgaagagggatcagtaattaaagaaaactgcaactcctgcacatgctcaggacagcaatggaaatgttcccagcatgtatgccttgttcgttcagaattaattgaacaggtcaataaaggagactatggatggacagcacagaattacagccaattttggggaatgactttagaagatggttttaaatttcgccttggcactttgccacctagtcccatgctcctgagcatgaatgaaatgacagtaagtgttccttctgattcacgtatgtgcatgtatttgtaaaagtgtgtttgtgtgtgcattaaaagcaattataaatcact

SEQ ID NO: 4817 - protein, 128 aa, Homo sapiens
MEKQYLSQREVDLEAYFTRNHTVLQGCFKDGQHYEEGSVIKENCNSCTCSGQQWKCSQHVCLVRSELIEQVNKGDYGWTAQNYSQFWGMTLEDGFKFRLGTLPPSPMLLSMNEMTVSVPSDSRMCMYL

SEQ ID NO: 4818 - DNA, 669 bp, Homo sapiens
gtctgtgggaattatttcctcccattggtattagattatatttttccaagtcaactcttcctggctgcccttcaaggttctaaagattttctactgttgtagtgtaactagtaagaggcaaaaccatgagaatcagagagaacttcccttcatgatgctatgcaatccccaggagaagcacgttgaaagctgaaaagaagactgactgagatgtgttggcgggcttctcaagatccctatcgatggcagaatgctgacatgagttgcccatagtccaggtttcccaatgtagcagatgactctagcggctccagcttcagcatcatcttaagttcaagtgaaaaggaaaagagaatctctttttcttcaaacaatttcaaactaaaatcttgagtctgacttttcctggccagaattaagcttgtacttatccctgaaaaatcatcaatgctacagtgatgaatttaccaattgaggcagaatttaggtcacatgacgctccaaagcctcttcaaaaccgcatgactcagagtgaggcagaagtatttgggatatttgcaacaggagaagggtaaatgaatggagagtgccaaaacaacttatgtcaattatacaattataaatacaaccaaaataaagtatggaaatcagtattttcacctatcttaa

SEQ ID NO: 4819 - protein, 38 aa, Homo sapiens [sequence omitted]

SEQ ID NO: 4820 - DNA, 577 bp, Homo sapiens
aaaccatgagaatcagaggtaagtgcttatcaaaggaatagaaccaagaggacaaattctacttaaacaatgccatccttaaatgagagagaacttcccttcatgatgctatgcaatccccaggagaagcacgttgaaagctgaaaagaagactgactgagatgtgttggcgggcttctcaagatccctatcgatggcagaatgctgacatgagttgcccatagtccagggactgtgttggataagaaataaaaaagaatatgaagaaaaaacaatggtggtgttagagaaaggacccacagagtctgagaatgtgacagaagagcccttccacgtctgggaatgcaacaaggaacatattatatctatttttaaatcttcaaaattcctgtagtagctgagagctggaaatgctacttggattatctcattgttggacctcacctaacacccagtttcctttccctcacattgtgtacttggactttgctcctgccatttatgtgcttcctgcaataccgtcatagaccaccatcacctccacattcattctccaaccactgctaccacaatactc

SEQ ID NO: 4821 - protein, 39 aa, Homo sapiens
MVVLEKGPTESENVTEEPFHVWECNKEHIISIFKSSKFL

SEQ ID NO: 4822 - DNA, 382 bp, Homo sapiens
actatagtttcaataagaaataatgggagcatgaactttgcagaaaagataaaaatggaatgaagacagaactctgtgagagaaagaacatagtaactattctaatgatgttgggatcctcagtcttccagaggatggcaatgggatttgctaatacaggatgggagagagaatgatgtgtgagtgtctgtgatgaagatgtcacacttacagcagaaactgagaaacagtggataacttctgaaatctttgggtataatcatctatcttgtgtgatctaataatttaagaaagaagtgattatgctgttgaaatcgtgaagattttacaggtaacacttcctttccttcctttgttttgataacagatggagatatttaca

SEQ ID NO: 4823 - protein, 38 aa, Homo sapiens [sequence omitted]

SEQ ID NO: 4824 - DNA, 1851 bp, Homo sapiens
agccatgagcctttttgaaataataatattgtcgacccccagttgtatgtgcccaaggagatggcaaacttgagaaacaagaataatcctttcagctggtttaaagctgagccctcactcttggaattaagaaactgacaaaggatgcaagttcttggtttaaggagccaatggtgtggttcccagggaccctcccaaatacacttccaatctgtttctggaggacctgacctgtaactcctgacaatatgttctgaatgctgaaggatggagatacactttggagtaagattcatatgaactttcataaattcttgggccaatggactcaagcccctcattcaaagaaaacaccagaagagacttggtgttttgtgaaatggcacattccaaaatctctgtcactgagaaaaggatgtaagctcaggatcaaagcatcgtcttcaaagaagggagacaagggaggaatgtgttttgctgttttggatttcaagaaatgaaacagaaacaagagctggtttcttgataactttgttcttctacgctatggtctgtagaatgatacagtttctagtttaattggtctgtgacctgcagacccctgtgtaagactcttccagctttgaacataccaaagaaaattttaaaagaagaggggagaaaaaaggagaaaagtctgcatattggctcatcagaagagctaacacgaaattctggagagcattcttggcagctgggaaagaagctaccatatgcacatgttaagaggctcaaacttggccaggcacagtggctcacgcctgtaatcccagcactttgggaggccgaggcgggtggatcacgacgtcgggagttcaagaccagcctggccaagatggtgaaaccccatctctactaaaaaccccaaaaaattagctgggtgtggtggtgggcacctgcaatcccagctactcgggaggctgaagcagagaattgcttgaactcaggaggcggacgttgcagtgagctgagatcgtgccactgcactccagcctgggcgacagagcgagactacatctcaaaaataataataataaaaaaaaagaaagaggctcaaacttgtcttttaaaaagtgaagtgccttgccttgtcctacaccgtggcctctccttggacacaaacaggcagggagtgtttaagataacagcattgcagagtgcaaacggcccccaaagtggagccagaggaacctatgagatcatttggaaaagcttgtgaattcactgccatttgcctacttggcttcggatgaaaagcaaatcttaaagctgctcaaaatgtgtctgattcatctgtaactgagaatgagaccaatcagggataagaagtgagtaaaatccttgtgatcacagagccaagagagcctattttaaagcacttaatgtattttttttcttaaagatatatacaccaactgtaattaagctctccctttccttatgatcttggcaagatgttaaaaaagagatagagggagggagtcgacttgccaagtggatttttctaagcgttctcagccctaattaaaagtcctttgtgcaaggccaaccagcaatcagattcctaattagagttgagcaaactgccttggtgaactgtgggtttctctgaacccgggaatctgaggaaaaagtctgtctgtctcaaaggtgccattttctgaagcacaaacacacccaaatcctaaaaggcatgtctcacaagggcaatgtcacaaccttaatactgttggtcgattactgtttttgccttgaaacggctccgcagcatcctatatattgcgttgttacgtctgttttgctgtttgttac

SEQ ID NO: 4825 - protein, 80 aa, Homo sapiens
MLKDGDTLWSKIHMNFHKFLGQWTQAPHSKKTPEETWCFVKWHIPKSLSLRKGCKLRIKASSSKKGDKGGMCFAVLDFKK

SEQ ID NO: 4826 - DNA, 789 bp, Homo sapiens
gtgctgccaccagaggccgacggtatagtgagaaggctcttctccagggcgaataaagaaataagaatatggcaattggacttgaaggaaaatggtgtctctacaattaatcatcatgggatttggaaagagaaaactaagtcctttttgattattctagaacaactaatcagctattgccagtcttcccagatgaagacatacttctgagaaactgaagagtatctcttgccctgtcttggaaacttcaagtctgtttttgaaaggaaacatcagatgaataagaagagatgttagaagaaatatcctttgataagtaaaaatagatgcatttcaccaaggacctacccccagacaggctgtctggtcagcactccattccaagagaaaaaaaaattacagaaaggaagagggcattgtacattccaggtgatcaagaaatacttatggaatgaaatgagaaactcattggaaatgactacaggcttcctgacttcaagctgaatggatttggcagagcactgaactttttcctggccataagcagattctatgaactgcatttgctctgaaggcacataaaatatctggaagaatgagcaaagatgaaaaagttaaccatgataatgcattatactttctggagaatggagttgggagaatctggcctaggtcataccagacactatggctttctcttcagtcatcttggttctcttgggaaaagctagctgccaagtctgagcagcctgatgaaggggcccatataatgagaaactgaggactgca

SEQ ID NO: 4827 - protein, 61 aa, Homo sapiens
MSKDEKVNHDNALYFLENGVGRIWPRSYQTLWLSLQSSWFSWEKLAAKSEQPDEGAHIMRN

SEQ ID NO: 4828 - DNA, 563 bp, Homo sapiens
gatagggctgatgctcctacaagacgaggaagagaaaccagagctctctctcttcacacgtgcacaaagatgaggtcatgggaatgcacagggagatagcaactgtctacaaaccaggtagagaaccctcatcaggaactgaatgagctggcatcttgatctcggacatccgattccccagaactcaaactactgctttgtccatgaacaccttgtcaacttcaaagattcacttctgttggaaataaacagcatgagcagaaggctgccaagttacagaaaatttgaagattcttgaagattctttgatgacaacaagtactttttcattaatttgaaaggatattttatgaatagccaacagttctaagaaaaaaaatgaagtcaaagatactcactgaacagttctaagaaaaaaaatgaagtcaaagaaaaaaaaagctcattttttccatgtgaatttctgaggcttggcagggtggcttcttgatgttgaagtgctgaaaatgctgatttttaatggttttcaattgaagatgtggtgatgacaacatcccaaacat

SEQ ID NO: 4829 - protein, 51 aa, Homo sapiens [sequence omitted]

SEQ ID NO: 4830 - DNA, 583 bp, Homo sapiens
gatgctcctacaagacgaggaagagaaaccagagctctctctcttcacacgtgcacaaagatgaggtcatgggaatgcacagggagatagcaactgtctacaaaccaggtagagaaccctcatcaggaactgaatgagctggcatcttgatctcggacatccgattccccagaactaattgtgaactcttcagatgctgtggtaacgggcttgaaagtcatctatgaactggagtttctattaatgtgaataacagcaaactactgctttgtccatgaacaccttgtcaacttcaaagattcacttctgttggaaataaacagcatgagcagaaggctgccaagttacagaaaatttgaagattcttgaagattctttgatgacaacaagtactttttcattaatttgaaaggatattttatgaatagccaacagttctaagaaaaaaaatgaagtcaaagatactcactgaacagttctaagaaaaaaaatgaagtcaaagaaaaaaaaagctcattttttccatgtgaatttctgaggcttggcagggtggcttcttgatgttgaagtgctgaaaatgctg

SEQ ID NO: 4831 - protein, 35 aa, Homo sapiens
SQRYSLNSSKKKNEVKEKKSSFFPCEFLRLGRVAS

SEQ ID NO: 4832 - DNA, 2882 bp, Homo sapiens
tgattcctaagaactcacatgaactgagcaaatgagatagaaacatggcattcttaattatactaattacctgctttgtgattattcttgctacttcacagccttgccagacccctgatgactttgtggctgccacttctccgggacatatcataattggaggtttgtttgctattcatgaaaaaatgttgtcctcagaagactctcccagacgaccacaaatccaggagtgtgttggctttgaaatatcagtttttcttcaaactcttgccatgatacacagcattgagatgatcaacaattcaacactcttacctggagtcaaactggggtatgaaatctatgacacttgtacagaagtcacagtggcaatggcagccactctgaggtttctttctaaattcaactgctccagagaaactgtggagtttaagtgtgactattccagctacatgccaagagttaaggctgtcataggttctgggtactcagaaataactatggctgtctccaggatgttgaatttacagctcatgccacaggtgggttatgaatcaactgcagaaatcctgagtgacaaaattcgctttccttcatttttacggactgtgcccagtgacttccatcaaattaaagcaatggctcacctgattcagaaatctggttggaactggattggcatcataaccacagatgatgactatggacgattggctcttaacacttttataattcaggctgaagcaaataacgtgtgcatagccttcaaagaggttcttccagcctttctttcagataataccattgaagtcagaatcaatcggacactgaagaaaatcattttagaagcccaggttaatgtcattgtggtatttctgaggcaattccatgtttttgatctcttcaataaagccattgaaatgaatataaataagatgtggattgctagtgataattggtcaactgccaccaagattaccaccattcctaatgttaaaaagattggcaaagttgtagggtttgcctttagaagagggaatatatcctctttccattcctttcttcaaaatctgcacttgcttcccagtgacagtcacaaactcttacatgaatatgccatgcatttatctgcctgcgcatatgtcaaggacactgatttgagtcaatgcatattcaatcattctcaaaggactttggcctacaaggctaacaaggctatagaaaggaacttcgtcatgagaaatgacttcctctgggactatgctgagccaggactcattcatagtattcagcttgcagtgtttgcccttggttatgccattcgggatctgtgtcaagctcgtgactgtcagaaccccaacgcctttcaaccatgggagttacttggtgtgctaaaaaatgtgacattcactgatggatggaattcatttcattttgatgctcacggggatttaaatactggatatgatgttgtgctctggaaggagatcaatggacacatgactgtcactaagatggcagaatatgacctacagaatgatgtcttcatcatcccagatcaggaaacaaaaaatgagttcaggaatcttaagcaaattcaatctaaatgctccaaggaatgcagtcctgggcaaatgaagaaaactacaagaagtcaacacatctgttgctatgaatgtcagaactgtcctgaaaatcattacactaatcagacagatatgcctcactgccttttatgcaacaacaaaactcactgggcccctgttaggagcactatgtgctttgaaaaggaagtggaatatctcaactggaatgactccttggccatcctactcctgattctctccctactgggaatcatatttgttctggttgttggcataatatttacaagaaacctgaacacacctgttgtgaaatcatccgggggattaagagtctgctatgtgatccttctctgtcatttcctcaattttgccagcacgagctttttcattggagaaccacaagacttcacatgtaaaaccaggcagacaatgtttggagtgagctttactctttgcatctcctgcattttgacgaagtctctgaaaattttgctagccttcagctttgatcccaaattacagaaatttctgaagtgcctctatagaccgatccttattatcttcacttgcacgggcatccaggttgtcatttgcacactctggctaatctttgcagcacctactgtagaggtgaatgtctccttgcccagagtcatcatcctggagtgtgaggagggatccatacttgcatttggcaccatgctgggctacattgccatcctggccttcatttgcttcatatttgctttcaaaggcaaatatgagaattacaatgaagccaaattcattacatttggcatgctcatttacttcatagcttggatcacattcatccctatctatgctaccacatttggcaaatatgtaccagctgtggagattattgtcatattaatatctaactatggaatcctgtattgcacattcatccccaaatgctatgttattatttgtaagcaagagattaacacaaagtctgcctttctcaagatgatctacagttattcttcccatagtgtgagcagcattgccctgagtcctgcttcactggactccatgagcggcaatgtcacaatgaccaatcccagctctagtggcaagtctgcaacctggcagaaaagcaaagatcttcaggcacaagcatttgcacacatatgcagggaaaatgccacaagtgtatctaaaactttgcctcgaaaaagaatgtcaagtatatgaataagccttaggagatgccacattccagaataaaatgtttccagggtctttgcatct

SEQ ID NO: 4833 - protein, 926 aa, Homo sapiens; identical to SEQ ID NO: 620

SEQ ID NO: 4834 - DNA, 2642 bp, Homo sapiens
tgattcctaagaactcacatgaactgagcaaatgagatagaaacatggcattcttaattatactaattacctgctttgtgattattcttgctacttcacagccttgccagacccctgatgactttgtggctgccacttctccgggacatatcataattggaggtttgtttgctattcatgaaaaaatgttgtcctcagaagactctcccagacgaccacaaatccaggagtgtgttggctttgaaatatcagtttttcttcaaactcttgccatgatacacagcattgagatgatcaacaattcaacactcttacctggagtcaaactggggtatgaaatctatgacacttgtacagaagtcacagtggcaatggcagccactctgaggtttctttctaaattcaactgctccagagaaactgtggagtttaagtgtgactattccagctacatgccaagagttaaggctgtcataggttctgggtactcagaaataactatggctgtctccaggatgttgaatttacagctcatgccacaggtgggttatgaatcaactgcagaaatcctgagtgacaaaattcgctttccttcatttttacggactgtgcccagtgacttccatcaaattaaagcaatggctcacctgattcagaaatctggttggaactggattggcatcataaccacagatgatgactatggacgattggctcttaacacttttataattcaggctgaagcaaataacgtgtgcatagccttcaaagaggttcttccagcctttctttcagataataccattgaagtcagaatcaatcggacactgaagaaaatcattttagaagcccaggttaatgtcattgtggtatttctgaggcaattccatgtttttgatctcttcaataaagccattgaaatgaatataaataagatgtggattgctagtgataattggtcaactgccaccaagattaccaccattcctaatgttaaaaagattggcaaagttgtagggtttgcctttagaagagggaatatatcctctttccattcctttcttcaaaatctgcacttgcttcccagtgacagtcacaaactcttacatgaatatgccatgcatttatctgcctgcgcatatgtcaaggacactgatttgagtcaatgcatattcaatcattctcaaaggactttggcctacaaggctaacaaggctatagaaaggaacttcgtcatgagaaatgacttcctctgggactatgctgagccaggactcattcatagtattcagcttgcagtgtttgcccttggttatgccattcgggatctgtgtcaagctcgtgactgtcagaaccccaacgcctttcaaccatgggagcaaattcaatctaaatgctccaaggaatgcagtcctgggcaaatgaagaaaactacaagaagtcaacacatctgttgctatgaatgtcagaactgtcctgaaaatcattacactaatcagacagatatgcctcactgccttttatgcaacaacaaaactcactgggcccctgttaggagcactatgtgctttgaaaaggaagtggaatatctcaactggaatgactccttggccatcctactcctgattctctccctactgggaatcatatttgttctggttgttggcataatatttacaagaaacctgaacacacctgttgtgaaatcatccgggggattaagagtctgctatgtgatccttctctgtcatttcctcaattttgccagcacgagctttttcattggagaaccacaagacttcacatgtaaaaccaggcagacaatgtttggagtgagctttactctttgcatctcctgcattttgacgaagtctctgaaaattttgctagccttcagctttgatcccaaattacagaaatttctgaagtgcctctatagaccgatccttattatcttcacttgcacgggcatccaggttgtcatttgcacactctggctaatctttgcagcacctactgtagaggtgaatgtctccttgcccagagtcatcatcctggagtgtgaggagggatccatacttgcatttggcaccatgctgggctacattgccatcctggccttcatttgcttcatatttgctttcaaaggcaaatatgagaattacaatgaagccaaattcattacatttggcatgctcatttacttcatagcttggatcacattcatccctatctatgctaccacatttggcaaatatgtaccagctgtggagattattgtcatattaatatctaactatggaatcctgtattgcacattcatccccaaatgctatgttattatttgtaagcaagagattaacacaaagtctgcctttctcaagatgatctacagttattcttcccatagtgtgagcagcattgccctgagtcctgcttcactggactccatgagcggcaatgtcacaatgaccaatcccagctctagtggcaagtctgcaacctggcagaaaagcaaagatcttcaggcacaagcatttgcacacatatgcagggaaaatgccacaagtgtatctaaaactttgcctcgaaaaagaatgtcaagtatatgaataagccttaggagatgccacattccagaa

SEQ ID NO: 4835 - protein, 855 aa, Homo sapiens
MAFLIILITCFVIILATSQPCQTPDDFVAATSPGHIIIGGLFAIHEKMLSSEDSPRRPQIQECVGFEISVFLQTLAMIHSIEMINNSTLLPGVKLGYEIYDTCTEVTVAMAATLRFLSKFNCSRETVEFKCDYSSYMPRVKAVIGSGYSEITMAVSRMLNLQLMPQVGYESTAEILSDKIRFPSFLRTVPSDFHQIKAMAHLIQKSGWNWIGIITTDDDYGRLALNTFIIQAEANNVCIAFKEVLPAFLSDNTIEVRINRTLKKIILEAQVNVIVVFLRQFHVFDLFNKAIEMNINKMWIASDNWSTATKITTIPNVKKIGKVVGFAFRRGNISSFHSFLQNLHLLPSDSHKLLHEYAMHLSACAYVKDTDLSQCIFNHSQRTLAYKANKAIERNFVMRNDFLWDYAEPGLIHSIQLAVFALGYAIRDLCQARDCQNPNAFQPWEQIQSKCSKECSPGQMKKTTRSQHICCYECQNCPENHYTNQTDMPHCLLCNNKTHWAPVRSTMCFEKEVEYLNWNDSLAILLLILSLLGIIFVLVVGIIFTRNLNTPVVKSSGGLRVCYVILLCHFLNFASTSFFIGEPQDFTCKTRQTMFGVSFTLCISCILTKSLKILLAFSFDPKLQKFLKCLYRPILIIFTCTGIQVVICTLWLIFAAPTVEVNVSLPRVIILECEEGSILAFGTMLGYIAILAFICFIFAFKGKYENYNEAKFITFGMLIYFIAWITFIPIYATTFGKYVPAVEIIVILISNYGILYCTFIPKCYVIICKQEINTKSAFLKMIYSYSSHSVSSIALSPASLDSMSGNVTMTNPSSSGKSATWQKSKDLQAQAFAHICRENATSVSKTLPRKRMSSI

SEQ ID NO: 4836 - DNA, 2330 bp, Homo sapiens
tgattcctaagaactcacatgaactgagcaaatgagatagaaacatggcattcttaattatactaattacctgctttgtgattattcttgctacttcacagccttgccagacccctgatgactttgtggctgccacttctccgggacatatcataattggaggtttgtttgctattcatgaaaaaatgttgtcctcagaagactctcccagacgaccacaaatccaggagtgtgttggctttgaaatatcagtttttcttcaaactcttgccatgatacacagcattgagatgatcaacaattcaacactcttacctggagtcaaactggggtatgaaatctatgacacttgtacagaagtcacagtggcaatggcagccactctgaggtttctttctaaattcaactgctccagagaaactgtggagtttaagtgtgactattccagctacatgccaagagttaaggctgtcataggttctgggtactcagaaataactatggctgtctccaggatgttgaatttacagctcatgccacaggtgggttatgaatcaactgcagaaatcctgagtgacaaaattcgctttccttcatttttacggactgtgcccagtgacttccatcaaattaaagcaatggctcacctgattcagaaatctggttggaactggattggcatcataaccacagatgatgactatggacgattggctcttaacacttttataattcaggctgaagcaaataacgtgtgcatagccttcaaagaggttcttccagcctttctttcagataataccattgaagtcagaatcaatcggacactgaagaaaatcattttagaagcccagttacttggtgtgctaaaaaatgtgacattcactgatggatggaattcatttcattttgatgctcacggggatttaaatactggatatgatgttgtgctctggaaggagatcaatggacacatgactgtcactaagatggcagaatatgacctacagaatgatgtcttcatcatcccagatcaggaaacaaaaaatgagttcaggaatcttaagcaaattcaatctaaatgctccaaggaatgcagtcctgggcaaatgaagaaaactacaagaagtcaacacatctgttgctatgaatgtcagaactgtcctgaaaatcattacactaatcagacagatatgcctcactgccttttatgcaacaacaaaactcactgggcccctgttaggagcactatgtgctttgaaaaggaagtggaatatctcaactggaatgactccttggccatcctactcctgattctctccctactgggaatcatatttgttctggttgttggcataatatttacaagaaacctgaacacacctgttgtgaaatcatccgggggattaagagtctgctatgtgatccttctctgtcatttcctcaattttgccagcacgagctttttcattggagaaccacaagacttcacatgtaaaaccaggcagacaatgtttggagtgagctttactctttgcatctcctgcattttgacgaagtctctgaaaattttgctagccttcagctttgatcccaaattacagaaatttctgaagtgcctctatagaccgatccttattatcttcacttgcacgggcatccaggttgtcatttgcacactctggctaatctttgcagcacctactgtagaggtgaatgtctccttgcccagagtcatcatcctggagtgtgaggagggatccatacttgcatttggcaccatgctgggctacattgccatcctggccttcatttgcttcatatttgctttcaaaggcaaatatgagaattacaatgaagccaaattcattacatttggcatgctcatttacttcatagcttggatcacattcatccctatctatgctaccacatttggcaaatatgtaccagctgtggagattattgtcatattaatatctaactatggaatcctgtattgcacattcatccccaaatgctatgttattatttgtaagcaagagattaacacaaagtctgcctttctcaagatgatctacagttattcttcccatagtgtgagcagcattgccctgagtcctgcttcactggactccatgagcggcaatgtcacaatgaccaatcccagctctagtggcaagtctgcaacctggcagaaaagcaaagatcttcaggcacaagcatttgcacacatatgcagggaaaatgccacaagtgtatctaaaactttgcctcgaaaaagaatgtcaagtatatgaataagccttaggagatgccacattccagaa

SEQ ID NO: 4837 - protein, 751 aa, Homo sapiens
MAFLIILITCFVIILATSQPCQTPDDFVAATSPGHIIIGGLFAIHEKMLSSEDSPRRPQIQECVGFEISVFLQTLAMIHSIEMINNSTLLPGVKLGYEIYDTCTEVTVAMAATLRFLSKFNCSRETVEFKCDYSSYMPRVKAVIGSGYSEITMAVSRMLNLQLMPQVGYESTAEILSDKIRFPSFLRTVPSDFHQIKAMAHLIQKSGWNWIGIITTDDDYGRLALNTFIIQAEANNVCIAFKEVLPAFLSDNTIEVRINRTLKKIILEAQLLGVLKNVTFTDGWNSFHFDAHGDLNTGYDVVLWKEINGHMTVTKMAEYDLQNDVFIIPDQETKNEFRNLKQIQSKCSKECSPGQMKKTTRSQHICCYECQNCPENHYTNQTDMPHCLLCNNKTHWAPVRSTMCFEKEVEYLNWNDSLAILLLILSLLGIIFVLVVGIIFTRNLNTPVVKSSGGLRVCYVILLCHFLNFASTSFFIGEPQDFTCKTRQTMFGVSFTLCISCILTKSLKILLAFSFDPKLQKFLKCLYRPILIIFTCTGIQVVICTLWLIFAAPTVEVNVSLPRVIILECEEGSILAFGTMLGYIAILAFICFIFAFKGKYENYNEAKFITFGMLIYFIAWITFIPIYATTFGKYVPAVEIIVILISNYGILYCTFIPKCYVIICKQEINTKSAFLKMIYSYSSHSVSSIALSPASLDSMSGNVTMTNPSSSGKSATWQKSKDLQAQAFAHICRENATSVSKTLPRKRMSSI

SEQ ID NO: 4838 - DNA, 3507 bp, Homo sapiens
gggctggggctccgctggggaaccggccgagcggcgcgcgcggaggtgtccggcggccaggaggatggccaaggtcccggagctggaagacaccttcctgcaggcgcagcctgcgccccaactgtccccggggatccaggaagactgctgtgtgcagctcctgggcaagggcttgctagtctatccggaagaaacagtgtacctggcggccgaagggcagcccgggggcgagcagggcggcggggagaaaggcgaagacccggagctgccgggggcagtgaaatcagaaatgcacttaaacaatggtaacttttcctctgaagaagaggacgccgacaaccacgacagcaaaaccaaagcagcggatcaatacctgtctcagaagaaaaccatcacgcagattgtgaaggataaaaagaagcagacacagctcacgctgcagtggcttgaagagaattacattgtatgtgaaggagtttgcttaccacggtgcattctttatgcacactacttagatttctgtaggaaagagaaattagagccagcctgtgcggccacctttggaaagacaattcgccagaagtttcccctcctaacaacaaggcggcttggaacaagaggccattcaaagtatcattactatgggattggcatcaaagagagcagtgcatattaccactccgtttattctggaaagggcttgacaaggttttctggaagcaagctaaagaatgagggtggcttcactcgtaaatattcgcttagctcaaaaactggaacacttcttccagaattccccagcgctcaacaccttgtataccaaggatgcatttctaaggacaaggttgatacgctcataatgatgtacaaaactcactgccagtgtatcctggacaatgcaattaatggaaactttgaagagatccagcattttttattacacttttggcaaggaatgcctgaccatctccttcccctgctcgaaaatcctgttatcattgatattttctgtgtttgtgactcaattctttataaggttcttacagatgtactcattcctgcaacaatgcaagaaatgcctgaaagcttattagcagacataagaaattttgctaaaaattgggaacagtgggttgtttcatccttggaaaacttgccagaagctctaactgacaagaaaatacctattgtgcgaagatttgtatcttctctgaaacgacaaacatctttcttacatcttgcccagattgccagaccagctctctttgaccagcatgtcgttaattctatggtgtctgatattgaaagggttgatttgaacagcattggctctcaagcccttcttaccatttcaggcagcacagacactgaatctggtatctacactgaacatgactctatcactgtgttccaagaactgaaggatctccttaagaagaatgccactgtggaggcttttattgaatggttggatactgtggtagaacagagagttattaagaccagcaaacaaaatggaaggtcattaaagaagagagctcaagactttctgttaaagtggagtttttttggtgctcgagtaatgcataatctcaccttgaacaatgcatccagttttggttcttttcatttgattcgaatgcttctcgatgaatacattctcctggccatggagacccagtttaataatgacaaagagcaggagttacagaatttattggacaagtatatgaagaattcagatgcgagtaaagctgctttcactgcttctccgagttcatgctttctggccaaccgtaataaagggagcatggtttccagcgacgctgtgaagaatgaaagccacgtggagacaacctatctccctctgccatccagtcaacctggaggcctaggccctgctctgcaccagttccctgctgggaacacagacaacatgccgctcacaggtcaaatggagctttcacagattgctggtcatctgatgacaccacccatttctccagccatggcaagccgaggaagtgtcattaaccaaggaccaatggcagggaggcccccaagtgtgggcccagtactgtcagctccatcacactgctccacatacccagagcccatttatcccactctccctcaagccaatcatgacttttatagcaccagctctaactaccagactgtgtttagggcacagccccactccacatcaggactctatcctcatcacaccgagcatggtcgatgcatggcttggactgaacagcagctttcaagagacttcttcagtggcagctgtgcggggtctccatataactcccggccaccgtctagctatggcccatccctgcaagcccaggattcacacaatatgcagtttttaaatacaggaagcttcaatttcttgagcaacacaggagctgccagctgccaaggagcaacactgcctcctaattcaccaaatggatactatggaagcaacataaactacccagagtctcacaggctcggatcaatggtgaatcagcacgtttctgtcatcagcagcattcgttcactgcccccctacagtgacatccacgatccacttaacattttagatgacagtggtagaaaacagaccagctcgttttacacagacacatcatctccagttgcatgtcgaactccagtcctagcttccagtttgcaaaccccaattccttcttcctcatcccaatgtatgtatggaacttccaaccagtatccagctcaagaaaccctggactcccatggaacaagcagtagagaaatggtgtcctctttaccacctatcaacactgtgttcatgggaacagcagctggaggcacttaaaccaccaatgtgggagggggtgctaaaactttaaaaaaaatctctactgtgcaaatatcattattcactcagacttccataagagtaaataaaaatgaatatgcagtggctgacattgttttaaagtcactggtactatggacaactccatagtgaatggagatacttgcagagcttgtcatgcacactaagagtttaaaatgtgagctcattattaatcatagtttcaaaattatcaaataaaaccagtgaagatctgaagatgcaaacatttcaactatgaagatttacatttcactttctaatttattaaacatctgtgtgcctttttatctttggtttcttttaaaaagtatatttaatgcctttacaatacctttaatttattaggatctcagaatcattgtttactatcccttatttgacaaaaagtcaaatgtgtatgttctacctccaacggaaatgtttacaaggtcaagacttaattcaattcagacaagaccaaagttgcttgacttcaattcctgtgcattagtgtgatgatttctgtcacatagcagcattccgattctatgtaactgaatggagatgataagtgctttcccctctttatttaaaaaagattaaaaggaataaaagaaataatgtatggaaat

SEQ ID NO: 4839 - protein, 928 aa, Homo sapiens
MAKVPELEDTFLQAQPAPQLSPGIQEDCCVQLLGKGLLVYPEETVYLAAEGQPGGEQGGGEKGEDPELPGAVKSEMHLNNGNFSSEEEDADNHDSKTKAADQYLSQKKTITQIVKDKKKQTQLTLQWLEENYIVCEGVCLPRCILYAHYLDFCRKEKLEPACAATFGKTIRQKFPLLTTRRLGTRGHSKYHYYGIGIKESSAYYHSVYSGKGLTRFSGSKLKNEGGFTRKYSLSSKTGTLLPEFPSAQHLVYQGCISKDKVDTLIMMYKTHCQCILDNAINGNFEEIQHFLLHFWQGMPDHLLPLLENPVIIDIFCVCDSILYKVLTDVLIPATMQEMPESLLADIRNFAKNWEQWVVSSLENLPEALTDKKIPIVRRFVSSLKRQTSFLHLAQIARPALFDQHVVNSMVSDIERVDLNSIGSQALLTISGSTDTESGIYTEHDSITVFQELKDLLKKNATVEAFIEWLDTVVEQRVIKTSKQNGRSLKKRAQDFLLKWSFFGARVMHNLTLNNASSFGSFHLIRMLLDEYILLAMETQFNNDKEQELQNLLDKYMKNSDASKAAFTASPSSCFLANRNKGSMVSSDAVKNESHVETTYLPLPSSQPGGLGPALHQFPAGNTDNMPLTGQMELSQIAGHLMTPPISPAMASRGSVINQGPMAGRPPSVGPVLSAPSHCSTYPEPIYPTLPQANHDFYSTSSNYQTVFRAQPHSTSGLYPHHTEHGRCMAWTEQQLSRDFFSGSCAGSPYNSRPPSSYGPSLQAQDSHNMQFLNTGSFNFLSNTGAASCQGATLPPNSPNGYYGSNINYPESHRLGSMVNQHVSVISSIRSLPPYSDIHDPLNILDDSGRKQTSSFYTDTSSPVACRTPVLASSLQTPIPSSSSQCMYGTSNQYPAQETLDSHGTSSREMVSSLPPINTVFMGTAAGGT

SEQ ID NO: 4840 - DNA, 452 bp, Homo sapiens
tgaagaagaggacgccgacaaccacgacagcaaaaccaaagcagcggatcaatacctgtctcagaagaaaaccatcacgcagattgtgaaggataaaaagaagcagacacagctcacgctgcagtggcttgaagagaattacattgtatgtgaaggagtttgcttaccacggtgcattctttatgcacactacttagatttctgtaggaaagagaaattagagccagcctgtgcggccacctttggaaagacaattcgccagaagtttcccctcctaacaacaaggcggcttggaacaagaggccattcaaagtaagataccagtgaacatattcaggttctgctcttgtgcatgaagattgacacagatgtaaaataagtattgtctttgtcagtacaaagagaaccaggtattctcttgatgaagcagacttttatcaactgtgagaact

SEQ ID NO: 4841 - protein, 104 aa, Homo sapiens
EEEDADNHDSKTKAADQYLSQKKTITQIVKDKKKQTQLTLQWLEENYIVCEGVCLPRCILYAHYLDFCRKEKLEPACAATFGKTIRQKFPLLTTRRLGTRGHSK

SEQ ID NO: 4842 - DNA, 499 bp, Homo sapiens
ttacttgtatatgtagaatttacactcattggaataataaaatagaagtaagcaaccgtgcattaaaaagctatgaaaagatgaagagaatatgccttcaaatgggaaggaatacttaactgtgaataagacctagttcaacatggaacttcctggtggccaagtcagaagagaagcacagaacaaaaacggaggcacagagaggtcaattgattggtctaatgacacagatctagcaagtggtggaaccaggactgaatccaggtgtgtgtccggaattggtgggttcttggtctcactgacttcaagaatgaagccgcggacccttgcggaactgtgaagactagagtgaccttggagatctcatctggaagatggtagaactgctatcagcctggcttcccaaatgacctcctggatcacagctacccatggcctgaaatgttgaccttggagttgttgcataggaaagaaataaacttctttgttctttgagcca

SEQ ID NO: 4843 - protein, 65 aa, Homo sapiens
MELPGGQVRREAQNKNGGTERSIDWSNDTDLASGGTRTESRCVSGIGGFLVSLTSRMKPRTLAEL

SEQ ID NO: 4844 - DNA, 524 bp, Homo sapiens
gcctcggggctgtttcatataaggacgcgagttttcctgatcaggtctgtcggccacgttacgatttccaatttgcgatccatcagttacttccattgggtcttcagcccccagggactgtggatcctagaccccgcggagaagcccgtggactggagctgtgtcagctctgatggaacaaaaacggaggcacagagaggtcaattgattggtctaatgacacagatctagcaagtggtggaaccaggactgaatccagagaatctggaagactactctgccaagacatctcaaaaagtgtgtgtccggaattggtgggttcttggtctcactgacttcaagaatgaagccgcggacccttgcggaactgtgaagactagagtgaccttggagatctcatctggaagatggtagaactgctatcagcctggcttcccaaatgacctcctggatcacagctacccatggcctgaaatgttgaccttggagttgttgcataggaaagaaataaacttctttgttct

SEQ ID NO: 4845 - protein, 60 aa, Homo sapiens
QVVEPGLNPENLEDYSAKTSQKVCVRNWWVLGLTDFKNEAADPCGTVKTRVTLEISSGRW

SEQ ID NO: 4846 - DNA, 444 bp, Homo sapiens
aagcaaccgtgcattaaaaagctatgaaaagatgaagagaatatgccttcaaatgggaaggaatacttaactgtgaataagacctagttcaacatggaacttcctggtggccaagtcagaagagaagcacagaacaaaaacggaggcacagagaggtcaattgattggtctaatgacacagatctagcaagtggtggaaccaggactgaatccagagaatctggaagactactctgccaagacatctcaaaaagtgtgtgtccggaattggtgggttcttggtctcactgacttcaagaatgaagccgcggacccttgcggaactgtgaagactagagtgaccttggagatctcatctggaagatggtagaactgctatcagcctggcttcccaaatgacctcctggatcacagctacccatggcctgaaatgttgaccttgga

SEQ ID NO: 4847 - protein, 65 aa, Homo sapiens
MELPGGQVRREAQNKNGGTERSIDWSNDTDLASGGTRTESRESGRLLCQDISKSVCPELVGSWSH

SEQ ID NO: 4848 - DNA, 568 bp, Homo sapiens
actcggtggtcccctgtctggatccaaactgctgactggctgacccgagtggtcacatttgccctctggggcttttgaaaaccttaaatcaaaattgcttttgaatctgacaactcctgaggctactttcgcggcctcggggctgtttcatataaggacgcgagttttcctgatcaggtctgtcggccacgttacgatttccaatttgcgatccatcagttacttccattgggtcttcagcccccagggactgtggatcctagaccccgcggagaagcccgtggactggagctgtgtcagctctgatggaacaaaaacggaggcacagagaggtcaattgattggtctaatgacacagatctagcaagtggtggaaccaggactgaatccaggtgtgtgtccggaattggtgggttcttggtctcactgacttcaagaatgaagccgcggacccttgcggaactgtgaagactagagtgaccttggagatctcatctggaagatggtagaactgctatcagcctggcttcccaaatgacctcctggatcacagctacccatggcctga

SEQ ID NO: 4849 - protein, 40 aa, Homo sapiens
IQVCVRNWWVLGLTDFKNEAADPCGTVKTRVTLEISSGRW

SEQ ID NO: 4850 - DNA, 1181 bp, Homo sapiens
acaggggccttggtccttccattgattcataagtacaacaccctacttcttggatacagagccatcgcggaatgttcgctggagtgaggcagcgtatggagcacatgggacatgcagacccagatggacatcttacaaactttcagaggagctgaagccagattgttcttacaaatggtcaccagaaggaggacaatcacaaactgtctcatcctcctctgcaaatccaacagaaaggacacagtagagtgggcaagaatgcaaagaaggtctgtggtttggaactggcccaagccgaactaaacttttctaaatatacattaaactgtcaacaaagagcaccgtgacccacagcctgaataaagggagagccccaaggccctctgaagccactagttctgtgagttgttttagggagaagacagacaaccaagaattatttaccttattagactgtgcccatccaagcccaggtaaaactttttgatcagcagaaaactggaattatttccctttctctatcctggattgagtgtgaattccccagagaaacttggctttgagagcactagctggacatataggggtccatttccaatctgctctgagaagggccctgtcttcatcctaaaggaaggctttagaaaactgttatctaagatctaggattgaagatggtgagaacctgaggctgagcaattggccccaattcttcctgaagcattatctgagagagagagcctagcctgtggtttttgacccctggcagaagggtggagagagggaagaagaaagaaggaagatgaagacaacttcctgctcaagaccaacccatctcccctcattctggggtgaccaattgagaaaacaatgatatctcccttactctcatctgtttccaaaggctttgcttcatctaccaaaaaaccaactctctccaaaggatatggtcatattcatcatatagataagtaaactaaggctcaggaaaaatgacttcctcaagggcaaacccaggtgttgatccctaatgaatatccggcaccccgcattccatctcggtgactgcttccagaaaacacaagctgtgacatgcccattatgtactcaataaatctttaataattgagtggatagagtgatgtgagttgagaagcattattaaagattattttcccaaa

SEQ ID NO: 4851 - protein, 63 aa, Homo sapiens; identical to SEQ ID NO: 624

SEQ ID NO: 4852 - DNA, 2963 bp, Homo sapiens
acaggggccttggtccttccattgattcataagtacaacaccctacttcttggatacagagccatcgcggaatgttcgctggagtgaggcagcgtatggagcacatgggacatgcagacccagatggacatcttacaaactttcagaggagctgaagccagattgttcttacaaatggtcaccagaaggaggacaatcacaaactgtctcatcctcctctgcaaatccaacagaaaggacacagtagagtgggcaagaatgcaaagaaggtctgtggtttggaactggcccaagccgaactaaacttttctaaatatacattaaactgtcaacaaagagcaccgtgacccacagcctgaataaagggagagccccaaggccctctgaagccactagttctgtgagttgttttagggagaagacagacaaccaagaattatttaccttattagactgtgcccatccaagcccaggtaaaactttttgatcagcagaaaactggaattatttccctttctctatcctggattgagtgtgaattccccagagaaacttggctttgagagcactagctggacatataggggtccatttccaatctgctctgagaagggccctgtcttcatcctaaaggaaggctttagaaaactgttatctaagatctaggattgaagatggtgagaacctgaggctgagcaattggccccaattcttcctgaagcattatctgagagagagagcctagcctgtggtttttgacccctggcagaagggtggagagagggaagaagaaagaaggaagatgaagacaacttcctgctcaagaccaacccatctcccctcattctggggtgaccaattgagaaaacaatgatatctcccttactctcatctgtttccaaaggctttgcttcatctaccaaaaaaccgtgtgagtgagaaccatctaccctcatgtgcttattaagctcttagagtcattctctggtgactatattgattcatttatttgtactctaggaacataaaacaatatggcattattgacacagaaaacaaagaatagacagatagcatacagctgaacaactttaattaccagggttccagtgtctgtttaactagctgtgtaaatatgagtatttgaattaatttttctaggatcaatttccttacttctaaatgagaaagacgaggccaaaagttcttaaccttacttctggctttacaactgaatggttctctgttcctaataatgagttccttttttttttttttttctgagacgaagtctcgctctgtcaccaggctggagtgcagtggcacaatcttgctcactgcaacctctgcctcccgggttcaagcaattctcctgcctcagcctcacgagtagctgggactacacgcgcctgccaccatacccagctaatttttgtatttttagtagagacagggtttcaccatgttggccaggatggtcttgatctcttgacctcgtgatccgccggcctcggcctcccaaagtgctgagattacaggcgtgagccaccgcgcctggccctaataatgagttcttatgaatggtatatgtacgccaaatagaaagcatgctaatagctaagaaggaatcgtgaaggataatgagaatttgctgccttttctagtcattctagaggaatttataaataaataaaatggtttgatatgtaagaatatctgctgagccaaacagtgcacacttcttagacataagttgtagccaaggcaataaagcttaaggatggaatagaagcattaaggaaaattttcctagaaaggaaaaaaatggaggcagaaagggtgggaaaggcagacagaagtcaactcataggaagcagagagataaagagctttgaaatataatgtgaggacctagacatatttgagaagagaggtactggtcaaaacaaaggacagagatggcagaagcccacaggaaacttatggccaatggtagcagtcagtgaggatgagtagggtagtaataatatattataactaattactgccatttattgatcacttactaagtattaaaattatttgttaggaaatttataaataccttgtctcctttctagaactctctccaaaggatatggtcatattcatcatatagataagtaaactaaggctcaggaaaaatgacttcctcaagggcaaacccaggtctgtctgtgctatttttactataccgttgctatttgtccatgaacaggaaaaaccctcaactagggccttgagcaatcaagaattattggaaggaaaaatcgttacaggtaaccactgataaatcagatggaacaatcactttttgagcaaagggattgtgtcctctttatctgcgtgttccctgcatttagcccagggtctagcaacttgtgatagacaaagatgtgttagatcccccttcaaaaaaggacttgctgctcagctgctggggtgcagtcagcctccagcctccaatcagctctgtaagagctggcctcagctgtaaataaaaactgcttcatttcaggtcatgctggtatccaataactgagaaaggagttgggggtaggggcaaagaggggagagtgaaggggacaaaggcctgaagctaatcagggacccctctgatggccaattctgactccagagctccctatcaagtgggccaagttcttctcagccctactctggatagtgacttctcccttggcccaattctgtctctacccactccttttcacaggtgttgatccctaatgaatatccggcaccccgcattccatctcggtgactgcttccagaaaacacaagctgtgacatgcccattatgtactcaataaatctttaataattgagtggatagagtgatgtgagttgagaagcattattaaagattattttcccaaaaataaacaaaaaaaatgtgcccattg

SEQ ID NO: 4853 - protein, 63 aa, Homo sapiens; identical to SEQ ID NO: 624

SEQ ID NO: 4854 - DNA, 2632 bp, Homo sapiens
gctaagtgcgagcaggcgcgtgtgacgtcgggaggcgccgcggctcctcggccgccccactcggtggtcccctgtctggatccaaactgctgactggctgacccgagtggtcacatttgccctctggggcttttgaaaaccttaaatcaaaattgcttttgaatctgacaactcctgaggctactttcgcggcctcggggctgtttcatataaggacgcgagttttcctgatcaggtctgtcggccacgttacgatttccaatttgcgatccatcagttacttccattgggtcttcagcccccagggactgtggatcctagaccccgcggagaagcccgtggactggagctgtgtcagctctgatggaacaaaaacggaggcacagagaggtcaattgattggtctaatgacacagatctagcaagtggtggaaccaggactgaatccaggtaacttgctcctgatgtttgtccattggtgctctcatacttttttccctctctcttcctgttagaatgtgcttccaggactttgtttacactggggaataggtgtctaataaacttaacatgcgtttattacgggggtatttacaaaagcagaagcattaagacaaaggaataaacctctaattgtagaattctagtcaccagccaatgggcacattttttttgtttatttttgggaaaataatctttaataatgcttctcaactcacatcactctatccactcaattattaaagatttattgagtacataatgggcatgtcacagcttgtgttttctggaagcagtcaccgagatggaatgcggggtgccggatattcattagggatcaacacctgtgaaaaggagtgggtagagacagaattgggccaagggagaagtcactatccagagtagggctgagaagaacttggcccacttgatagggagctctggagtcagaattggccatcagaggggtccctgattagcttcaggcctttgtccccttcactctcccctctttgcccctacccccaactcctttctcagttattggataccagcatgacctgaaatgaagcagtttttatttacagctgaggccagctcttacagagctgattggaggctggaggctgactgcaccccagcagctgagcagcaagtccttttttgaagggggatctaacacatctttgtctatcacaagttgctagaccctgggctaaatgcagggaacacgcagataaagaggacacaatccctttgctcaaaaagtgattgttccatctgatttatcagtggttacctgtaacgatttttccttccaataattcttgattgctcaaggccctagttgagggtttttcctgttcatggacaaatagcaacggtatagtaaaaatagcacagacagacctgggtttgcccttgaggaagtcatttttcctgagccttagtttacttatctatatgatgaatatgaccatatcctttggagagagttctagaaaggagacaaggtatttataaatttcctaacaaataattttaatacttagtaagtgatcaataaatggcagtaattagttataatatattattactaccctactcatcctcactgactgctaccattggccataagtttcctgtgggcttctgccatctctgtcctttgttttgaccagtacctctcttctcaaatatgtctaggtcctcacattatatttcaaagctctttatctctctgcttcctatgagttgacttctgtctgcctttcccaccctttctgcctccatttttttcctttctaggaaaattttccttaatgcttctattccatccttaagctttattgccttggctacaacttatgtctaagaagtgtgcactgtttggctcagcagatattcttacatatcaaaccattttatttatttataaattcctctagaatgactagaaaaggcagcaaattctcattatccttcacgattccttcttagctattagcatgctttctatttggcgtacatataccattcataagaactcattattagggccaggcgcggtggctcacgcctgtaatctcagcactttgggaggccgaggccggcggatcacgaggtcaagagatcaagaccatcctggccaacatggtgaaaccctgtctctactaaaaatacaaaaattagctgggtatggtggcaggcgcgtgtagtcccagctactcgtgaggctgaggcaggagaattgcttgaacccgggaggcagaggttgcagtgagcaagattgtgccactgcactccagcctggtgacagagcgagacttcgtctcagaaaaaaaaaaaaaaaaggaactcattattaggaacagagaaccattcagttgtaaagccagaagtaaggttaagaacttttggcctcgtctttctcatttagaagtaaggaaattgatcctagaaaaattaattcaaatactcatatttacacagctagttaaacagacactggaaccctggtaattaaagttgttcagctgtatgctatctgtctattctttgttttctgtgtcaataatgccatattgttttatgttcctagagtacaaataaatgaatcaatatagtcacc

SEQ ID NO: 4855 - protein, 69 aa, Homo sapiens
MLSIWRTYTIHKNSLLGPGAVAHACNLSTLGGRGRRITRSRDQDHPGQHGETLSLLKIQKLAGYGGRRV

SEQ ID NO: 4856 - DNA, 1140 bp, Homo sapiens
cctcacggaaagttgtgacggtcgagcttgagcctggcgggccgcggagcgttcacctgcggccgggaggcaaagtactagctctgtgattagattgaattctccaacaacaacatctcagattatggcaagaaagaaaaggagagggattatagagaaaaggcgtcgggatcggataaataacagtttatctgagttgagaagacttgtgccaactgcttttgaaaaacaaggatctgcaaagttagaaaaagctgaaatattgcaaatgacagtggatcatttgaagatgcttcaggcaacagggggtaaaggctactttgacgcacacgctcttgccatggacttcatgagcataggattccgagagtgcctaacagaagttgcgcggtacctgagctccgtggaaggcctggactcctcggatccgctgcgggtgcggcttgtgtctcatctcagcacttgcgccacccagcgggaggcggcggccatgacatcctccatggcccaccaccatcatccgctccacccgcatcactgggccgccgccttccaccacctgcccgcagccctgctccagcccaacggcctccatgcctcagagtcaaccccttgtcgcctctccacaacttcagaagtgcctcctgcccacggctctgctctcctcacggccacgtttgcccatgcggattcagccctccgaatgccatccacgggcagcgtcgccccctgcgtgccacctctctccacctctctcttgtccctctctgccaccgtccacgccgcagccgcagcagccaccgcggctgcacacagcttccctctgtccttcgcgggggcattccccatgcttcccccaaacgcagcagcagcagtggccgcggccacagccatcagcccgcccttgtcagtatcagccacgtccagtcctcagcagaccagcagtggaacaaacaataaaccttaccgaccctgggggacagaagttggagctttttaaatttttcttgaacttcttgcaatagtaactgaatgtcctccatttcagagtcagcttaaaacctctgcaccctgaaggtagccatacagatgccgacagatccacaaaggaacaataaagctatttgagacacaaacctc

SEQ ID NO: 4857 - protein, 291 aa, Homo sapiens
MARKKRRGIIEKRRRDRINNSLSELRRLVPTAFEKQGSAKLEKAEILQMTVDHLKMLQATGGKGYFDAHALAMDFMSIGFRECLTEVARYLSSVEGLDSSDPLRVRLVSHLSTCATQREAAAMTSSMAHHHHPLHPHHWAAAFHHLPAALLQPNGLHASESTPCRLSTTSEVPPAHGSALLTATFAHADSALRMPSTGSVAPCVPPLSTSLLSLSATVHAAAAAATAAAHSFPLSFAGAFPMLPPNAAAAVAAATAISPPLSVSATSSPQQTSSGTNNKPYRPWGTEVGAF

SEQ ID NO: 4858 - DNA, 2466 bp, Homo sapiens
cctcacggaaagttgtgacggtcgagcttgagcctggcgggccgcggagcgttcacctgcggccgggaggcaaagtactagctctgtgattagattgaattctccaacaacaacatctcagattatggcaagaaagaaaaggagagggattatagagaaaaggcgtcgggatcggataaataacagtttatctgagttgagaagacttgtgccaactgcttttgaaaaacaaggatctgcaaagttagaaaaagctgaaatattgcaaatgacagtggatcatttgaagatgcttcaggcaacagggggtaaaggctactttgacgcacacgctcttgccatggacttcatgagcataggattccgagagtgcctaacagaagttgcgcggtacctgagctccgtggaaggcctggactcctcggatccgctgcgggtgcggcttgtgtctcatctcagcacttgcgccacccagcgggaggcggcggccatgacatcctccatggcccaccaccatcatccgctccacccgcatcactgggccgccgccttccaccacctgcccgcagccctgctccagcccaacggcctccatgcctcagagtcaaccccttgtcgcctctccacaacttcagaagtgcctcctgcccacggctctgctctcctcacggccacgtttgcccatgcggattcagccctccgaatgccatccacgggcagcgtcgccccctgcgtgccacctctctccacctctctcttgtccctctctgccaccgtccacgccgcagccgcagcagccaccgcggctgcacacagcttccctctgtccttcgcgggggcattccccatgcttcccccaaacgcagcagcagcagtggccgcggccacagccatcagcccgcccttgtcagtatcagccacgtccagtcctcagcagaccagcagtggaacaaacaataaaccttaccgaccctgggggacagaagttggagctttttaaatttttcttgaacttcttgcaatagtaactgaatgtcctccatttcagagtcagcttaaaacctctgcaccctgaaggtagccatacagatgccgacagatccacaaaggaacaataaagctatttgagacacaaacctcacgagtggaaatgtggtattctcttttttttctctcccttttttgtttggttcaaggcagctcggtaactgacatcagcaacttttgaaaacttcacacttgttaccatttagaagtttcctggaaaatatatggaccgtaccatccagcagtgcatcagtatgtctgaattggggaagtaaaatgccctgactgaattctcttgagactagatgggacatacatatatagagagagagtgagagagtcgtgtttcgtaagtgcctgagcttaggaagttttcttctggatatataacattgcacaagggaagacgagtgtggaggataggttaagaaaggaaagggacagaagtcttgcaataggctgcagacattttaataccatgccagagaagagtattctgctgaaaccaacaggttttactggtcaaaatgactgctgaaaataattttcaagttgaaagatctagttttatcttagtttgccttctttgtacagacatgccaagaggtgacatttagcagtgcattggtataagcaattatttcatcagttctcagattaacaagcatttctgctctgcctgcaggcccccaggcacttttttttttggatggctcaaaatatggtgctgctttatataaaccttacatttatatagtgcacctatgagcagttgcctaccatgtgtccaccagaggctatttaattcatgccaacttgaaaactctccagtttgtaggagtttggtttaatttattcagtttcattaggactatttttatatatttatcctcttcattttctcctaatgatgcaacatctattcttgtcaccctttgggagaagttacatttctggaggtgatgaagcaaggagggagcactaggaagagaaaagctacaatttttaaagctctttgtcaagttagtgattgcatttgatcccaaaacaagatgaatgtatgcaatgggatgtacataagttatttttgcccatgcctaaactagtgctatgtaatggggttgtggttttgtttttttcgatttcgtttaatgacaaaataatctcttaatatgctgaaatcaagcacgtgagagtttttgtttaaaagataagagacacagcatgtattatgcacttcatttctctactgtgtggagaaagcaataaacattatgagaatgttaaacgttatgcaaaattatacttttaaatatttgttttgaaattactgtacctagtcttttttgcattactttgtaacctttttctatgcaagagtctttacataccactaattaaatgaagtcctttttgact

SEQ ID NO: 4859 - protein, 291 aa, Homo sapiens; identical to SEQ ID NO: 4857

SEQ ID NO: 4860 - DNA, 2482 bp, Homo sapiens
cctcacggaaagttgtgacggtcgagcttgagcctggcgggccgcggagcgttcacctgcggccgggaggcaaagtactagctctgtgattagattgaattctccaacaacaacatctcagattatggcaagaaagaaaaggagagggattatagagaaaaggcgtcgggatcggataaataacagtttatctgagttgagaagacttgtgccaactgcttttgaaaaacaaggatctgcaaagttagaaaaagctgaaatattgcaaatgacagtggatcatttgaagatgcttcaggcaacagggggtaaaggctactttgacgcacacgctcttgccatggacttcatgagcataggattccgagagtgcctaacagaagttgcgcggtacctgagctccgtggaaggcctggactcctcggatccgctgcgggtgcggcttgtgtctcatctcagcacttgcgccacccagcgggaggcggcggccatgacatcctccatggcccaccaccatcatccgctccacccgcatcactgggccgccgccttccaccacctgcccgcagccctgctccagcccaacggcctccatgcctcagagtcaaccccttgtcgcctctccacaacttcagaagtgcctcctgcccacggctctgctctcctcacggccacgtttgcccatgcggattcagccctccgaatgccatccacgggcagcgtcgccccctgcgtgccacctctctccacctctctcttgtccctctctgccaccgtccacgccgcagccgcagcagccaccgcggctgcacacagcttccctctgtccttcgcgggggcattccccatgcttcccccaaacgcagcagcagcagtggccgcggccacagccatcagcccgcccttgtcagtatcagccacgtccagtcctcagcagaccagcagtggaacaaacaataaaccttaccgaccctgggggacagaagttggagctttttaaatttttcttgaacttcttgcaatagtaactgaatgtcctccatttcagagtcagcttaaaacctctgcaccctgaaggtagccatacagatgccgacagatccacaaaggaacaataaagctatttgagacacaaacctcacgagtggaaatgtggtattctcttttttttctctcccttttttgtttggttcaaggcagctcggtaactgacatcagcaacttttgaaaacttcacacttgttaccatttagaagtttcctggaaaatatatggaccgtaccatccagcagtgcatcagtatgtctgaattggggaagtaaaatgccctgactgaattctcttgagactagatgggacatacatatatagagagagagtgagagagtcgtgtttcgtaagtgcctgagcttaggaagttttcttctggatatataacattgcacaagggaagacgagtgtggaggataggttaagaaaggaaagggacagaagtcttgcaataggctgcagacattttaataccatgccagagaagagtattctgctgaaaccaacaggttttactggtcaaaatgactgctgaaaataattttcaagttgaaagatctagttttatcttagtttgccttctttgtacagacatgccaagaggtgacatttagcagtgcattggtataagcaattatttcatcagttctcagattaacaagcatttctgctctgcctgcaggcccccaggcacttttttttttggatggctcaaaatatggtgctgctttatataaaccttacatttatatagtgcacctatgagcagttgcctaccatgtgtccaccagaggctatttaattcatgccaacttgaaaactctccagtttgtaggagtttggtttaatttattcagtttcattaggactatttttatatatttatcctcttcattttctcctaatgatgcaacatctattcttgtcaccctttgggagaagttacatttctggaggtgatgaagcaaggagggagcactaggaagagaaaagctacaatttttaaagctctttgtcaagttagtgattgcatttgatcccaaaacaagatgaatgtatgcaatgggatgtacataagttatttttgcccatgcctaaactagtgctatgtaatggggttgtggttttgtttttttcgatttcgtttaatgacaaaataatctcttaatatgctgaaatcaagcacgtgagagtttttgtttaaaagataagagacacagcatgtattatgcacttcatttctctactgtgtggagaaagcaataaacattatgagaatgttaaacgttatgcaaaattatacttttaaatatttgttttgaaattactgtacctagtcttttttgcattactttgtaacctttttctatgcaagagtctttacataccactaattaaatgaagtcctttttgactattttttatgtggatg

SEQ ID NO: 4861 - protein, 291 aa, Homo sapiens; identical to SEQ ID NO: 4857

SEQ ID NO: 4862 - DNA, 1351 bp, Homo sapiens
gggggggcgtggccggcgccggctcttgcggccgagcagagttgcggcgtgggaaagagccgctaggagcagaccgcgccgccgccggagccgcgcctgcccaggcccggggagggaggaggcgggcgtcagggtgctgcgccccgctcggcgtccgagcttccggccgggctgtgccccgcgcggtcttcgccgggatgaagcgcccctgcgaggagacgacctccgagagcgacatggacgagaccatcgacgtggggagcgagaacaattactcggggcaaagtactagctctgtgattagattgaattctccaacaacaacatctcagattatggcaagaaagaaaaggagagggattatagagaaaaggcgtcgggatcggataaataacagtttatctgagttgagaagacttgtgccaactgcttttgaaaaacaaggatctgcaaagttagaaaaagctgaaatattgcaaatgacagtggatcatttgaagatgcttcaggcaacagggggtaaaggctactttgacgcacacgctcttgccatggacttcatgagcataggattccgagagtgcctaacagaagttgcgcggtacctgagctccgtggaaggcctggactcctcggatccgctgcgggtgcggcttgtgtctcatctcagcacttgcgccacccagcgggaggcggcggccatgacatcctccatggcccaccaccatcatccgctccacccgcatcactgggccgccgccttccaccacctgcccgcagccctgctccagcccaacggcctccatgcctcagagtcaaccccttgtcgcctctccacaacttcagaagtgcctcctgcccacggctctgctctcctcacggccacgtttgcccatgcggattcagccctccgaatgccatccacgggcagcgtcgccccctgcgtgccacctctctccacctctctcttgtccctctctgccaccgtccacgccgcagccgcagcagccaccgcggctgcacacagcttccctctgtccttcgcgggggcattccccatgcttcccccaaacgcagcagcagcagtggccgcggccacagccatcagcccgcccttgtcagtatcagccacgtccagtcctcagcagaccagcagtggaacaaacaataaaccttaccgaccctgggggacagaagttggagctttttaaatttttcttgaacttcttgcaatagtaactgaatgtcctccatttcagagtcagcttaaaacctctgcaccctgaaggtagccatacagatgccgacagatccacaaaggaacaataaagctatttgagacacaaacctc

SEQ ID NO: 4863 - protein, 337 aa, Homo sapiens; identical to SEQ ID NO: 626

SEQ ID NO: 4864 - DNA, 2677 bp, Homo sapiens
gggggggcgtggccggcgccggctcttgcggccgagcagagttgcggcgtgggaaagagccgctaggagcagaccgcgccgccgccggagccgcgcctgcccaggcccggggagggaggaggcgggcgtcagggtgctgcgccccgctcggcgtccgagcttccggccgggctgtgccccgcgcggtcttcgccgggatgaagcgcccctgcgaggagacgacctccgagagcgacatggacgagaccatcgacgtggggagcgagaacaattactcggggcaaagtactagctctgtgattagattgaattctccaacaacaacatctcagattatggcaagaaagaaaaggagagggattatagagaaaaggcgtcgggatcggataaataacagtttatctgagttgagaagacttgtgccaactgcttttgaaaaacaaggatctgcaaagttagaaaaagctgaaatattgcaaatgacagtggatcatttgaagatgcttcaggcaacagggggtaaaggctactttgacgcacacgctcttgccatggacttcatgagcataggattccgagagtgcctaacagaagttgcgcggtacctgagctccgtggaaggcctggactcctcggatccgctgcgggtgcggcttgtgtctcatctcagcacttgcgccacccagcgggaggcggcggccatgacatcctccatggcccaccaccatcatccgctccacccgcatcactgggccgccgccttccaccacctgcccgcagccctgctccagcccaacggcctccatgcctcagagtcaaccccttgtcgcctctccacaacttcagaagtgcctcctgcccacggctctgctctcctcacggccacgtttgcccatgcggattcagccctccgaatgccatccacgggcagcgtcgccccctgcgtgccacctctctccacctctctcttgtccctctctgccaccgtccacgccgcagccgcagcagccaccgcggctgcacacagcttccctctgtccttcgcgggggcattccccatgcttcccccaaacgcagcagcagcagtggccgcggccacagccatcagcccgcccttgtcagtatcagccacgtccagtcctcagcagaccagcagtggaacaaacaataaaccttaccgaccctgggggacagaagttggagctttttaaatttttcttgaacttcttgcaatagtaactgaatgtcctccatttcagagtcagcttaaaacctctgcaccctgaaggtagccatacagatgccgacagatccacaaaggaacaataaagctatttgagacacaaacctcacgagtggaaatgtggtattctcttttttttctctcccttttttgtttggttcaaggcagctcggtaactgacatcagcaacttttgaaaacttcacacttgttaccatttagaagtttcctggaaaatatatggaccgtaccatccagcagtgcatcagtatgtctgaattggggaagtaaaatgccctgactgaattctcttgagactagatgggacatacatatatagagagagagtgagagagtcgtgtttcgtaagtgcctgagcttaggaagttttcttctggatatataacattgcacaagggaagacgagtgtggaggataggttaagaaaggaaagggacagaagtcttgcaataggctgcagacattttaataccatgccagagaagagtattctgctgaaaccaacaggttttactggtcaaaatgactgctgaaaataattttcaagttgaaagatctagttttatcttagtttgccttctttgtacagacatgccaagaggtgacatttagcagtgcattggtataagcaattatttcatcagttctcagattaacaagcatttctgctctgcctgcaggcccccaggcacttttttttttggatggctcaaaatatggtgctgctttatataaaccttacatttatatagtgcacctatgagcagttgcctaccatgtgtccaccagaggctatttaattcatgccaacttgaaaactctccagtttgtaggagtttggtttaatttattcagtttcattaggactatttttatatatttatcctcttcattttctcctaatgatgcaacatctattcttgtcaccctttgggagaagttacatttctggaggtgatgaagcaaggagggagcactaggaagagaaaagctacaatttttaaagctctttgtcaagttagtgattgcatttgatcccaaaacaagatgaatgtatgcaatgggatgtacataagttatttttgcccatgcctaaactagtgctatgtaatggggttgtggttttgtttttttcgatttcgtttaatgacaaaataatctcttaatatgctgaaatcaagcacgtgagagtttttgtttaaaagataagagacacagcatgtattatgcacttcatttctctactgtgtggagaaagcaataaacattatgagaatgttaaacgttatgcaaaattatacttttaaatatttgttttgaaattactgtacctagtcttttttgcattactttgtaacctttttctatgcaagagtctttacataccactaattaaatgaagtcctttttgact

SEQ ID NO: 4865 - protein, 337 aa, Homo sapiens; identical to SEQ ID NO: 626

SEQ ID NO: 4866 - DNA, 2693 bp, Homo sapiens
gggggggcgtggccggcgccggctcttgcggccgagcagagttgcggcgtgggaaagagccgctaggagcagaccgcgccgccgccggagccgcgcctgcccaggcccggggagggaggaggcgggcgtcagggtgctgcgccccgctcggcgtccgagcttccggccgggctgtgccccgcgcggtcttcgccgggatgaagcgcccctgcgaggagacgacctccgagagcgacatggacgagaccatcgacgtggggagcgagaacaattactcggggcaaagtactagctctgtgattagattgaattctccaacaacaacatctcagattatggcaagaaagaaaaggagagggattatagagaaaaggcgtcgggatcggataaataacagtttatctgagttgagaagacttgtgccaactgcttttgaaaaacaaggatctgcaaagttagaaaaagctgaaatattgcaaatgacagtggatcatttgaagatgcttcaggcaacagggggtaaaggctactttgacgcacacgctcttgccatggacttcatgagcataggattccgagagtgcctaacagaagttgcgcggtacctgagctccgtggaaggcctggactcctcggatccgctgcgggtgcggcttgtgtctcatctcagcacttgcgccacccagcgggaggcggcggccatgacatcctccatggcccaccaccatcatccgctccacccgcatcactgggccgccgccttccaccacctgcccgcagccctgctccagcccaacggcctccatgcctcagagtcaaccccttgtcgcctctccacaacttcagaagtgcctcctgcccacggctctgctctcctcacggccacgtttgcccatgcggattcagccctccgaatgccatccacgggcagcgtcgccccctgcgtgccacctctctccacctctctcttgtccctctctgccaccgtccacgccgcagccgcagcagccaccgcggctgcacacagcttccctctgtccttcgcgggggcattccccatgcttcccccaaacgcagcagcagcagtggccgcggccacagccatcagcccgcccttgtcagtatcagccacgtccagtcctcagcagaccagcagtggaacaaacaataaaccttaccgaccctgggggacagaagttggagctttttaaatttttcttgaacttcttgcaatagtaactgaatgtcctccatttcagagtcagcttaaaacctctgcaccctgaaggtagccatacagatgccgacagatccacaaaggaacaataaagctatttgagacacaaacctcacgagtggaaatgtggtattctcttttttttctctcccttttttgtttggttcaaggcagctcggtaactgacatcagcaacttttgaaaacttcacacttgttaccatttagaagtttcctggaaaatatatggaccgtaccatccagcagtgcatcagtatgtctgaattggggaagtaaaatgccctgactgaattctcttgagactagatgggacatacatatatagagagagagtgagagagtcgtgtttcgtaagtgcctgagcttaggaagttttcttctggatatataacattgcacaagggaagacgagtgtggaggataggttaagaaaggaaagggacagaagtcttgcaataggctgcagacattttaataccatgccagagaagagtattctgctgaaaccaacaggttttactggtcaaaatgactgctgaaaataattttcaagttgaaagatctagttttatcttagtttgccttctttgtacagacatgccaagaggtgacatttagcagtgcattggtataagcaattatttcatcagttctcagattaacaagcatttctgctctgcctgcaggcccccaggcacttttttttttggatggctcaaaatatggtgctgctttatataaaccttacatttatatagtgcacctatgagcagttgcctaccatgtgtccaccagaggctatttaattcatgccaacttgaaaactctccagtttgtaggagtttggtttaatttattcagtttcattaggactatttttatatatttatcctcttcattttctcctaatgatgcaacatctattcttgtcaccctttgggagaagttacatttctggaggtgatgaagcaaggagggagcactaggaagagaaaagctacaatttttaaagctctttgtcaagttagtgattgcatttgatcccaaaacaagatgaatgtatgcaatgggatgtacataagttatttttgcccatgcctaaactagtgctatgtaatggggttgtggttttgtttttttcgatttcgtttaatgacaaaataatctcttaatatgctgaaatcaagcacgtgagagtttttgtttaaaagataagagacacagcatgtattatgcacttcatttctctactgtgtggagaaagcaataaacattatgagaatgttaaacgttatgcaaaattatacttttaaatatttgttttgaaattactgtacctagtcttttttgcattactttgtaacctttttctatgcaagagtctttacataccactaattaaatgaagtcctttttgactattttttatgtggatg

SEQ ID NO: 4867 - protein, 337 aa, Homo sapiens; identical to SEQ ID NO: 626

SEQ ID NO: 4868 - DNA, 5530 bp, Homo sapiens
agaaaccctcataaagtagatgcagagggcagtaagatataactcaactttgaaaatgtcagccgttatagttgaagaaatctgacccaagagacttcgctccgctgcaagatggaaggaagcttaagtaagacataaatttgtaatgaacttgctcacaacatccgccgccactgtgacttgcagtcatcatccattaccacaaaattagttgcaggatggctactcgtatccctccacacatgatcatcagtatttgcctcctgtgtcccaaccggcctgagtcaaggttacgactcactgattaaaaagagggactttttcaaatactttgcacttttgattgtgtattatggataccaaggaagagaagaaggaacggaaacaaagttattttgctcgactgaaaaagaaaaaacaagccaaacaaaatgcagagacagcctcagctgtagctacaaggactcatactgggaaggaagataataatacagtagttttagagccagacaagtgcaacattgctgtggaagaggaatatatgactgatgagaaaaaaaagagaaaaagtaatcagttaaaggagatcaggcgtacagaactaaagagatattatagtattgatgacaatcaaaacaaaacacatgataaaaaagagaagaagatggtggttcagaagccccatgggactatggaatacactgctggaaaccaggacaccctaaactccatagcactgaaatttaacatcactcccaataaattggtggaactgaataaacttttcacacatactattgttccaggccaggtcctttttgtgccagatgccaactctccttccagtaccttaaggctatcatcatccagtcctggtgctactgtctctccttcatcatcagatgcagaatatgataaattgcctgatgctgacttagcacgaaaggccttgaaacccattgaaagagtcttatcgtctacttctgaagaagatgagccaggtgtggtgaaatttttaaaaatgaattgtcgatacttcaccgatggaaagggtgtggttggcggtgttatgatagtgactcctaacaacatcatgtttgaccctcataaatctgatcctctggttattgaaaatgggtgtgaggagtatggtctcatctgccccatggaagaggttgtttccattgcgctctacaatgacatttctcacatgaagatcaaagatgccttgccatctgacctacctcaggatctttgtcctctgtacaggcctggagaatgggaagacctggcttcagaaaaggatatcaacccattcagtaagttcaaatctatcaacaaggaaaaacgacagcagaatggagagaaaattatgacttcggattccagaccaatagtacctttggagaagtccacaggacatacacctacaaagccctcaggcagctctgtgtcagagaaattaaagaaactggactcctctagggagacatcccatggttctcccacagtgactaagctcagcaaggaaccttccgacacttcttctgcatttgaatctacagccaaagaaaactttctaggggaagatgatgattttgttgacttggaagaactttcttctcaaactggtggtggaatgcacaaaaaagacaccttgaaggagtgcctttctcttgacccagaggaacgaaagaaagctgagtcacaaataaacaattctgccgtggaaatgcaggtgcagtcagccctagcctttttgggaacagagaatgatgttgaactgaagggggcgctagatttagaaacctgtgagaagcaagatataatgccagaagtggacaagcagtctggttcgccagaaagccgagtagaaaacacactgaacatacatgaagatttagataaagttaaactcattgaatattacctgactaagaacaaagaagggccacaggtatctgaaaatttgcagaaaacagaattaagtgatggaaaaagtattgaaccagggggaatagacattacccttagtagttctctttcccaggcgggtgatcccataactgagggcaataaagagccagataagacctgggtgaaaaagggagagcccctcccggtaaaactgaactcttctacagaagcaaatgtgattaaagaggctctagactcctctttggaatctactctggacaacagctgtcaaggtgcacaaatggataataaatctgaagttcagttgtggctgttaaagagaattcaggtacccattgaagatatacttccttcaaaagaagaaaaaagcaagaccccacccatgttcctgtgcatcaaagtgggaaaaccaatgagaaaatcctttgccactcacactgcagccatggtccagcagtacggcaaacggagaaagcagccagagtactggtttgctgttcctcgggagagggtggatcatttgtacacattctttgttcagtggtctcccgatgtctatggaaaagatgccaaagagcaaggctttgtggtggtggagaaggaagaactgaacatgattgacaacttcttcagtgagccaacaaccaagagctgggagatcatcactgttgaagaggcaaagcgcaggaagagcacatgcagctactatgaagacgaggacgaagaggtgctgcctgtcctacggccccacagcgcgctcctggagaatatgcacatcgagcagctggcccgacgccttcctgcaagggtgcaagggtatccatggagactggcctatagcacgttagagcacgggaccagcttaaagacgctctaccggaaatcggcatcactagacagtcctgtcctattggtcatcaaagatatggataatcagatttttggagcatatgcaactcatcctttcaagttcagtgaccactattatggcacaggcgaaacttttctctacacattcagccctcattttaaggtctttaagtggagtggagaaaattcatactttatcaatggagacataagttctttagaacttggtggtggagggggacgatttggtttatggctagatgctgatttataccacggacgaagcaactcttgcagcactttcaataatgatattctttccaaaaaggaagacttcatagttcaggatctggaggtgtgggcatttgattgaaattcagactgccttaaaatataacattaaaaagactgggttcgatcagccctcctaaagctggctggaaaaagaagccccagcccagcctgcctcatcccaccccaatgcttcctttctgccatcatctcagagcatgatcacattgcagaaagattctggaaggtccatgtagagggcagacattgaagaaagaaacttaaaatccaggttgttgaaaagactttgtactcccacttcctccaaatccatacagtgaggaatcagagtgtttatagatatatgagttgaatgcaatttttatttttggtaactgtgaaaaataagatactgtggatatatacatgccttgtgtatttatcagcataattttcattaccaaaatgtacagctattatttgccatggaaaaggttagtctcatttagaaaaatcgaaagtgcacagcacttaaagggaatatatgaggtttttttttttttaaaaaaaaacttttatttattatttgtagtatattgtctgaaatgtgtcggcagttttttttcttttaatgtgtcaaatcttgaaatattaaatgtatacattttgtgctatgttttgggaacaaatctgtttgatttatatagttttatattgaattttttttgccctgattgtttagggtgataggtcttaagcagcatatatctatatatctgtatgtgggtatatagagatatatgtgtgtgtgtatgtatatgtacatatacatatatatgagtgtataattctaaatttctaaaaactcattatgaatgttcatcaatttgactattataggccagctttccatttagtcaataaaagcgtacatttttagttacttaccttgaacatattcgtgtgaaaaagaatacatcatttctcacagtcttaagttgatatttatagaaatgaatacctttgtgaacctagacttagaacaaatcctgcttttgaaaaaaaatgttttgcttcttacaaaatcatttgtgttaataacaaaaactttattttcggagtgttctttgtataacttttccaagcttttacattaacgagcaggcctctgtcttaaaagggactcagtatattaatttctgcattttttaaatcaaatgaaaaacgtcaaattggaccaattgtcttggtttcttgattcatttatttgagaaaaaaacaatacaaagaaatgcattcatatcaaaattggaatagaaaggaaaacctatttttaagatatcaacctattttcacatcataaaacatctattacataaaataaaggtccaggcatagtggctcttgcctgtaatcccagcactttgggaggccgaggcaggtggatcactcaaggtcacaagtttgagaccagtctggccaacatggtgaaaccccatctctactaaaagtacaaatattagccgactatgtggcgggcacctgtaatcccacctactcgggaggctgaggcaggagaattgcttgaatccgggaagcagaggttgtagtgagccaagatcgtgccactgcactctatcctgggtaacagcgagactctgtcttaaaaataataacaataataataataataaagacttacttaaccaatattattgattaccagacttttatgaaagccaaagactgcttgctagtaggaaaaaatttcaaataataaccaaagctgaaaaatggtctgtcataaattatttccccggtaatttttgaaaggaaaaatgtataacaagtactatttacatatctgcatttaaaaaagcaattcttagaatacttcctttacattattctcctattttagacattttgtgaaagagaacaaattgtccagtggcctcctgtcagatcaacaattattatactccttaattccatgcaaatttaaatgaatgctataaaattttaaatctgtagcctgggtgtacgtttcactcaagttctcctactgaggactcttgactaacagcatactggcagtttcaccttaacctgctcgttaaataatgtgttggtgtgagatatcaggaatgtctcatgatatcacgtttaccatttacaccatctgcaaccatatgctattaataaaatggaaaaaaacaaaatggtcattttgcatatacttcactctgacctagtttagtccatgatactataattgtgagagcatatccagatgctgtgttctctatgtaaaacagtattgtccattcagaaatgtgtgacccttcatttatggatattgactatatgtaatgcagtgctatcccaatattttcaataaaggactttatgcattcagtgattttctttc

SEQ ID NO: 4869 - protein, 942 aa, Homo sapiens
MDTKEEKKERKQSYFARLKKKKQAKQNAETASAVATRTHTGKEDNNTVVLEPDKCNIAVEEEYMTDEKKKRKSNQLKEIRRTELKRYYSIDDNQNKTHDKKEKKMVVQKPHGTMEYTAGNQDTLNSIALKFNITPNKLVELNKLFTHTIVPGQVLFVPDANSPSSTLRLSSSSPGATVSPSSSDAEYDKLPDADLARKALKPIERVLSSTSEEDEPGVVKFLKMNCRYFTDGKGVVGGVMIVTPNNIMFDPHKSDPLVIENGCEEYGLICPMEEVVSIALYNDISHMKIKDALPSDLPQDLCPLYRPGEWEDLASEKDINPFSKFKSINKEKRQQNGEKIMTSDSRPIVPLEKSTGHTPTKPSGSSVSEKLKKLDSSRETSHGSPTVTKLSKEPSDTSSAFESTAKENFLGEDDDFVDLEELSSQTGGGMHKKDTLKECLSLDPEERKKAESQINNSAVEMQVQSALAFLGTENDVELKGALDLETCEKQDIMPEVDKQSGSPESRVENTLNIHEDLDKVKLIEYYLTKNKEGPQVSENLQKTELSDGKSIEPGGIDITLSSSLSQAGDPITEGNKEPDKTWVKKGEPLPVKLNSSTEANVIKEALDSSLESTLDNSCQGAQMDNKSEVQLWLLKRIQVPIEDILPSKEEKSKTPPMFLCIKVGKPMRKSFATHTAAMVQQYGKRRKQPEYWFAVPRERVDHLYTFFVQWSPDVYGKDAKEQGFVVVEKEELNMIDNFFSEPTTKSWEIITVEEAKRRKSTCSYYEDEDEEVLPVLRPHSALLENMHIEQLARRLPARVQGYPWRLAYSTLEHGTSLKTLYRKSASLDSPVLLVIKDMDNQIFGAYATHPFKFSDHYYGTGETFLYTFSPHFKVFKWSGENSYFINGDISSLELGGGGGRFGLWLDADLYHGRSNSCSTFNNDILSKKEDFIVQDLEVWAFD

SEQ ID NO: 4870 - DNA, 2835 bp, Homo sapiens
atgccctgacggggggcgcagctgcggggctggcgaggcgtcgcgcgtgggaagaggcctaagacaccccgactgcggcggctgcgcacacccgatccggacgcggggccccgcgggcgcgcgcctcggagctcccgcctcctcctcttgctcctcctcggcgtacggtcctcccctgacccctccttccacccgccgagaggatgcgctccccggcgcccagcagcagaggccaccgctcccagaaatgcatgcgaccgatccccttctcccggaccccaggagccggcgcccccgccctgtagggttacgactcactgattaaaaagagggactttttcaaatactttgcacttttgattgtgtattatggataccaaggaagagaagaaggaacggaaacaaagttattttgctcgactgaaaaagaaaaaacaagccaaacaaaatgcagagacagcctcagctgtagctacaaggactcatactgggaaggaagataataatacagtagttttagagccagacaagtgcaacattgctgtggaagaggaatatatgactgatgagaaaaaaaagagaaaaagtaatcagttaaaggagatcaggcgtacagaactaaagagatattatagtattgatgacaatcaaaacaaaacacatgataaaaaagagaagaagatggtggttcagaagccccatgggactatggaatacactgctggaaaccaggacaccctaaactccatagcactgaaatttaacatcactcccaataaattggtggaactgaataaacttttcacacatactattgttccaggccaggtcctttttgtgccagatgccaactctccttccagtaccttaaggctatcatcatccagtcctggtgctactgtctctccttcatcatcagatgcagaatatgataaattgcctgatgctgacttagcacgaaaggccttgaaacccattgaaagagtcttatcgtctacttctgaagaagatgagccaggtgtggtgaaatttttaaaaatgaattgtcgatacttcaccgatggaaaggtatatagcaatgtaatttgtttcctttccttgaaatctatgaaaaactaaacaaagttacaaattactggaacagaggctacattaaaagatcttacccaaagtgtcaattttaggtttgacaagcatccattagttttcttctgttggatgcctggaattttacttactgaggtaaatgttgtcactgagtggaaatgtgattctttgtgatcttggatttattgtttttttcttttagtttgggcctatgaattgttagggagacaatatactgtacatataacagcaaacactggagtcagactcactgaatttaaattccaactccactacccactaactctgagaccaggggcaaggtatttacatgtcttaagctcccatttttctcatgcataaaatagaaacaataaaaaaatttaactaataggatatgataatgaaaagtgataatttatgtaaagaatttagcacctaatctggctaaatagtaagctctcaagctgtgtttgctgttgatgatattggtattaatatctgctgtatcttctttttagttttttggttgttgcttgattgttttctgtgtgtttttgtttttttgttttcactaagaacaaattcagcttttactgagcctctggagaagggactatcttgataaccagtgagttcctgtggtcataggagaattcataccagttttagataataggaaaaatatgttattgatgtgcatttataaaatttgcaaacaagaataaataatgcttgacataaagaaattttttaaaagacagctttattgagatgtgattcacataacatacagttcacccaattacagtgtaaaatccagtgatttttagtttcttcacatagttgtgcaaccatcaccacaatccattttaaaacatttttattacctaaaaagaaactccataaccattagtagttactccccatttcacactctcccaccctattctttccccttccctgccaccctcatctccaggaggcaatcacttacctactttctgtctttctgtatttgcctattctagacaatttattattccttctatctaactgtaagtatatgtcctttgaccaacatctcccccatccttctctttcccctaaccacctacacctctttttttttttttttttttttttgagacagagttttgctcttgtcacccaggctggagtgcaatggtgcgatctctgctcactgcatcctctgcctcctgggttcaagcgattcccctgtctcagcctcctgagtagctgggactacaggtgtgtaccacctcatccggctaattttatatttttagtagagacggggtttcaccattttggccaggctggtctcaaactcctgacctcaggtgatccacctgccttggcctcccaaagtgttgggattacaggccagaaccaccacacccggcccacccatacctcttagtcatcaccattctactctctacttctaggggatcagcttctttagattgcacatatgagtgagatcatgcagtatttatctttgtgtgtttggcttatttcacttaacataatgttctccaggttcatccatgttattgcaaatgacaggattgcattctttttttatggctgaataatttgtgtatatatagcacattttctttattcatctattgatagatgcttaagttgttttcatagcttggctattgtgaataatgctgcaaataaacatgcaagtgc

SEQ ID NO: 4871 - protein, 249 aa, Homo sapiens
MDTKEEKKERKQSYFARLKKKKQAKQNAETASAVATRTHTGKEDNNTVVLEPDKCNIAVEEEYMTDEKKKRKSNQLKEIRRTELKRYYSIDDNQNKTHDKKEKKMVVQKPHGTMEYTAGNQDTLNSIALKFNITPNKLVELNKLFTHTIVPGQVLFVPDANSPSSTLRLSSSSPGATVSPSSSDAEYDKLPDADLARKALKPIERVLSSTSEEDEPGVVKFLKMNCRYFTDGKVYSNVICFLSLKSMKN

SEQ ID NO: 4872 - DNA, 2074 bp, Homo sapiens
atgccctgacggggggcgcagctgcggggctggcgaggcgtcgcgcgtgggaagaggcctaagacaccccgactgcggcggctgcgcacacccgatccggacgcggggccccgcgggcgcgcgcctcggagctcccgcctcctcctcttgctcctcctcggcgtacggtcctcccctgacccctccttccacccgccgagaggatgcgctccccggcgcccagcagcagaggccaccgctcccagaaatgcatgcgaccgatccccttctcccggaccccaggagccggcgcccccgccctgtagggttacgactcactgattaaaaagagggactttttcaaatactttgcacttttgattgtgtattatggataccaaggaagagaagaaggaacggaaacaaagttattttgctcgactgaaaaagaaaaaacaagccaaacaaaatgcagagacagcctcagctgtagctacaaggactcatactgggaaggaagataataatacagtagttttagagccagacaagtgcaacattgctgtggaagaggaatatatgactgatgagaaaaaaaagagaaaaagtaatcagttaaaggagatcaggcgtacagaactaaagagatattatagtattgatgacaatcaaaacaaaacacatgataaaaaagagaagaagatggtggttcagaagccccatgggactatggaatacactgctggaaaccaggacaccctaaactccatagcactgaaatttaacatcactcccaataaattggtggaactgaataaacttttcacacatactattgttccaggccaggtcctttttgtgccagatgccaactctccttccagtaccttaaggctatcatcatccagtcctggtgctactgtctctccttcatcatcagatgcagaatatgataaattgcctgatgctgacttagcacgaaaggccttgaaacccattgaaagagtcttatcgtctacttctgaagaagatgagccaggtgtggtgaaatttttaaaaatgaattgtcgatacttcaccgatggaaagggtgtggttggcggtgttatgatagtgactcctaacaacatcatgtttgaccctcataaatctgatcctctggttattgaaaatgggtgtgaggagtatggtctcatctgccccatggaagaggttgtttccattgcgctctacaatgacatttctcacatgaagatcaaagatgccttgccatcgtaagacatttatttgtttaccaggaaaaaaggggtgttgagagagctaaatgtagcttaaaaatgagggcatttgcatgattgagggattgtgtagaggtgattttgaagatggaagacttgtgcactgaagaaaatgagaaaaatgagaagaaatgaaaagaataaaatcaatgatgggaaaagttgaacatataaagattaaaggagaaaaacaaagaagccgtcatgtaaaaatagtatttgttgggcttatttttctaaaaagcagtgcacgttcttaatgaaattatgaaggaagaaaggcagttctctgaaagaagtttatccaattatcaataagagaataatgttttcttctgggtttaattaaggagagttatgtttgtcttcatttaacttctaggaaaagcagtctccctgattcatgtcctccctcagtcctgcatggagaggggtttgggtctacagtgtagtggtagccaccttctcatgctgtgaagagggagtaataccagtttgctttttccctgaaatacagatgaatataacttcagtcctgattacttttgccttataatgctggatttattgtaaaaaagagagggaagctccccaggaaaaaagagaaagcattaagaaagctcaggaaattgattaactgatacagataatctgatttttactgtcctttcgctctactgtgtctgtttctctataaaagccagcagtaaaaaactttaaaaaccttcagtgatgggaagaggcaaagcagtaggtcctaacagtaaagagggaaactagcccttggggcttatatg

SEQ ID NO: 4873 - protein, 295 aa, Homo sapiens
MDTKEEKKERKQSYFARLKKKKQAKQNAETASAVATRTHTGKEDNNTVVLEPDKCNIAVEEEYMTDEKKKRKSNQLKEIRRTELKRYYSIDDNQNKTHDKKEKKMVVQKPHGTMEYTAGNQDTLNSIALKFNITPNKLVELNKLFTHTIVPGQVLFVPDANSPSSTLRLSSSSPGATVSPSSSDAEYDKLPDADLARKALKPIERVLSSTSEEDEPGVVKFLKMNCRYFTDGKGVVGGVMIVTPNNIMFDPHKSDPLVIENGCEEYGLICPMEEVVSIALYNDISHMKIKDALPS

SEQ ID NO: 4874 - DNA, 5504 bp, Homo sapiens
atgccctgacggggggcgcagctgcggggctggcgaggcgtcgcgcgtgggaagaggcctaagacaccccgactgcggcggctgcgcacacccgatccggacgcggggccccgcgggcgcgcgcctcggagctcccgcctcctcctcttgctcctcctcggcgtacggtcctcccctgacccctccttccacccgccgagaggatgcgctccccggcgcccagcagcagaggccaccgctcccagaaatgcatgcgaccgatccccttctcccggaccccaggagccggcgcccccgccctgtagggttacgactcactgattaaaaagagggactttttcaaatactttgcacttttgattgtgtattatggataccaaggaagagaagaaggaacggaaacaaagttattttgctcgactgaaaaagaaaaaacaagccaaacaaaatgcagagacagcctcagctgtagctacaaggactcatactgggaaggaagataataatacagtagttttagagccagacaagtgcaacattgctgtggaagaggaatatatgactgatgagaaaaaaaagagaaaaagtaatcagttaaaggagatcaggcgtacagaactaaagagatattatagtattgatgacaatcaaaacaaaacacatgataaaaaagagaagaagatggtggttcagaagccccatgggactatggaatacactgctggaaaccaggacaccctaaactccatagcactgaaatttaacatcactcccaataaattggtggaactgaataaacttttcacacatactattgttccaggccaggtcctttttgtgccagatgccaactctccttccagtaccttaaggctatcatcatccagtcctggtgctactgtctctccttcatcatcagatgcagaatatgataaattgcctgatgctgacttagcacgaaaggccttgaaacccattgaaagagtcttatcgtctacttctgaagaagatgagccaggtgtggtgaaatttttaaaaatgaattgtcgatacttcaccgatggaaagggtgtggttggcggtgttatgatagtgactcctaacaacatcatgtttgaccctcataaatctgatcctctggttattgaaaatgggtgtgaggagtatggtctcatctgccccatggaagaggttgtttccattgcgctctacaatgacatttctcacatgaagatcaaagatgccttgccatcgcctggagaatgggaagacctggcttcagaaaaggatatcaacccattcagtaagttcaaatctatcaacaaggaaaaacgacagcagaatggagagaaaattatgacttcggattccagaccaatagtacctttggagaagtccacaggacatacacctacaaagccctcaggcagctctgtgtcagagaaattaaagaaactggactcctctagggagacatcccatggttctcccacagtgactaagctcagcaaggaaccttccgacacttcttctgcatttgaatctacagccaaagaaaactttctaggggaagatgatgattttgttgacttggaagaactttcttctcaaactggtggtggaatgcacaaaaaagacaccttgaaggagtgcctttctcttgacccagaggaacgaaagaaagctgagtcacaaataaacaattctgccgtggaaatgcaggtgcagtcagccctagcctttttgggaacagagaatgatgttgaactgaagggggcgctagatttagaaacctgtgagaagcaagatataatgccagaagtggacaagcagtctggttcgccagaaagccgagtagaaaacacactgaacatacatgaagatttagataaagttaaactcattgaatattacctgactaagaacaaagaagggccacaggtatctgaaaatttgcagaaaacagaattaagtgatggaaaaagtattgaaccagggggaatagacattacccttagtagttctctttcccaggcgggtgatcccataactgagggcaataaagagccagataagacctgggtgaaaaagggagagcccctcccggtaaaactgaactcttctacagaagcaaatgtgattaaagaggctctagactcctctttggaatctactctggacaacagctgtcaaggtgcacaaatggataataaatctgaagttcagttgtggctgttaaagagaattcaggtacccattgaagatatacttccttcaaaagaagaaaaaagcaagaccccacccatgttcctgtgcatcaaagtgggaaaaccaatgagaaaatcctttgccactcacactgcagccatggtccagcagtacggcaaacggagaaagcagccagagtactggtttgctgttcctcgggagagggtggatcatttgtacacattctttgttcagtggtctcccgatgtctatggaaaagatgccaaagagcaaggctttgtggtggtggagaaggaagaactgaacatgattgacaacttcttcagtgagccaacaaccaagagctgggagatcatcactgttgaagaggcaaagcgcaggaagagcacatgcagctactatgaagacgaggacgaagaggtgctgcctgtcctacggccccacagcgcgctcctggagaatatgcacatcgagcagctggcccgacgccttcctgcaagggtgcaagggtatccatggagactggcctatagcacgttagagcacgggaccagcttaaagacgctctaccggaaatcggcatcactagacagtcctgtcctattggtcatcaaagatatggataatcagatttttggagcatatgcaactcatcctttcaagttcagtgaccactattatggcacaggcgaaacttttctctacacattcagccctcattttaaggtctttaagtggagtggagaaaattcatactttatcaatggagacataagttctttagaacttggtggtggagggggacgatttggtttatggctagatgctgatttataccacggacgaagcaactcttgcagcactttcaataatgatattctttccaaaaaggaagacttcatagttcaggatctggaggtgtgggcatttgattgaaattcagactgccttaaaatataacattaaaaagactgggttcgatcagccctcctaaagctggctggaaaaagaagccccagcccagcctgcctcatcccaccccaatgcttcctttctgccatcatctcagagcatgatcacattgcagaaagattctggaaggtccatgtagagggcagacattgaagaaagaaacttaaaatccaggttgttgaaaagactttgtactcccacttcctccaaatccatacagtgaggaatcagagtgtttatagatatatgagttgaatgcaatttttatttttggtaactgtgaaaaataagatactgtggatatatacatgccttgtgtatttatcagcataattttcattaccaaaatgtacagctattatttgccatggaaaaggttagtctcatttagaaaaatcgaaagtgcacagcacttaaagggaatatatgaggtttttttttttttaaaaaaaaacttttatttattatttgtagtatattgtctgaaatgtgtcggcagttttttttcttttaatgtgtcaaatcttgaaatattaaatgtatacattttgtgctatgttttgggaacaaatctgtttgatttatatagttttatattgaattttttttgccctgattgtttagggtgataggtcttaagcagcatatatctatatatctgtatgtgggtatatagagatatatgtgtgtgtgtatgtatatgtacatatacatatatatgagtgtataattctaaatttctaaaaactcattatgaatgttcatcaatttgactattataggccagctttccatttagtcaataaaagcgtacatttttagttacttaccttgaacatattcgtgtgaaaaagaatacatcatttctcacagtcttaagttgatatttatagaaatgaatacctttgtgaacctagacttagaacaaatcctgcttttgaaaaaaaatgttttgcttcttacaaaatcatttgtgttaataacaaaaactttattttcggagtgttctttgtataacttttccaagcttttacattaacgagcaggcctctgtcttaaaagggactcagtatattaatttctgcattttttaaatcaaatgaaaaacgtcaaattggaccaattgtcttggtttcttgattcatttatttgagaaaaaaacaatacaaagaaatgcattcatatcaaaattggaatagaaaggaaaacctatttttaagatatcaacctattttcacatcataaaacatctattacataaaataaaggtccaggcatagtggctcttgcctgtaatcccagcactttgggaggccgaggcaggtggatcactcaaggtcacaagtttgagaccagtctggccaacatggtgaaaccccatctctactaaaagtacaaatattagccgactatgtggcgggcacctgtaatcccacctactcgggaggctgaggcaggagaattgcttgaatccgggaagcagaggttgtagtgagccaagatcgtgccactgcactctatcctgggtaacagcgagactctgtcttaaaaataataacaataataataataataaagacttacttaaccaatattattgattaccagacttttatgaaagccaaagactgcttgctagtaggaaaaaatttcaaataataaccaaagctgaaaaatggtctgtcataaattatttccccggtaatttttgaaaggaaaaatgtataacaagtactatttacatatctgcatttaaaaaagcaattcttagaatacttcctttacattattctcctattttagacattttgtgaaagagaacaaattgtccagtggcctcctgtcagatcaacaattattatactccttaattccatgcaaatttaaatgaatgctataaaattttaaatctgtagcctgggtgtacgtttcactcaagttctcctactgaggactcttgactaacagcatactggcagtttcaccttaacctgctcgttaaataatgtgttggtgtgagatatcaggaatgtctcatgatatcacgtttaccatttacaccatctgcaaccatatgctattaataaaatggaaaaaaacaaaatggtcattttgcatatacttcactctgacctagtttagtccatgatactataattgtgagagcatatccagatgctgtgttctctatgtaaaacagtattgtccattcagaaatgtgtgacccttcatttatggatattgactatatgtaatgcagtgctatcccaatattttcaataaaggactttatgcattcagtg

SEQ ID NO: 4875 - protein, 931 aa, Homo sapiens
MDTKEEKKERKQSYFARLKKKKQAKQNAETASAVATRTHTGKEDNNTVVLEPDKCNIAVEEEYMTDEKKKRKSNQLKEIRRTELKRYYSIDDNQNKTHDKKEKKMVVQKPHGTMEYTAGNQDTLNSIALKFNITPNKLVELNKLFTHTIVPGQVLFVPDANSPSSTLRLSSSSPGATVSPSSSDAEYDKLPDADLARKALKPIERVLSSTSEEDEPGVVKFLKMNCRYFTDGKGVVGGVMIVTPNNIMFDPHKSDPLVIENGCEEYGLICPMEEVVSIALYNDISHMKIKDALPSPGEWEDLASEKDINPFSKFKSINKEKRQQNGEKIMTSDSRPIVPLEKSTGHTPTKPSGSSVSEKLKKLDSSRETSHGSPTVTKLSKEPSDTSSAFESTAKENFLGEDDDFVDLEELSSQTGGGMHKKDTLKECLSLDPEERKKAESQINNSAVEMQVQSALAFLGTENDVELKGALDLETCEKQDIMPEVDKQSGSPESRVENTLNIHEDLDKVKLIEYYLTKNKEGPQVSENLQKTELSDGKSIEPGGIDITLSSSLSQAGDPITEGNKEPDKTWVKKGEPLPVKLNSSTEANVIKEALDSSLESTLDNSCQGAQMDNKSEVQLWLLKRIQVPIEDILPSKEEKSKTPPMFLCIKVGKPMRKSFATHTAAMVQQYGKRRKQPEYWFAVPRERVDHLYTFFVQWSPDVYGKDAKEQGFVVVEKEELNMIDNFFSEPTTKSWEIITVEEAKRRKSTCSYYEDEDEEVLPVLRPHSALLENMHIEQLARRLPARVQGYPWRLAYSTLEHGTSLKTLYRKSASLDSPVLLVIKDMDNQIFGAYATHPFKFSDHYYGTGETFLYTFSPHFKVFKWSGENSYFINGDISSLELGGGGGRFGLWLDADLYHGRSNSCSTFNNDILSKKEDFIVQDLEVWAFD

SEQ ID NO: 4876 - DNA, 5131 bp, Homo sapiens
atgccctgacggggggcgcagctgcggggctggcgaggcgtcgcgcgtgggaagaggcctaagacaccccgactgcggcggctgcgcacacccgatccggacgcggggccccgcgggcgcgcgcctcggagctcccgcctcctcctcttgctcctcctcggcgtacggtcctcccctgacccctccttccacccgccgagaggatgcgctccccggcgcccagcagcagaggccaccgctcccagaaatgcatgcgaccgatccccttctcccggaccccaggagccggcgcccccgccctgtagggttacgactcactgattaaaaagagggactttttcaaatactttgcacttttgattgtgtattatggataccaaggaagagaagaaggaacggaaacaaagttattttgctcgactgaaaaagaaaaaacaagccaaacaaaatgcagagacagcctcagctgtagctacaaggactcatactgggaaggaagataataatacagtagttttagagccagacaagtgcaacattgctgtggaagaggaatatatgactgatgagaaaaaaaagagaaaaagtaatcagttaaaggagatcaggcgtacagaactaaagagatattatagtattgatgacaatcaaaacaaaacacatgataaaaaagagaagaagatggtggttcagaagccccatgggactatggaatacactgctggaaaccaggacaccctaaactccatagcactgaaatttaacatcactcccaataaattggtggaactgaataaacttttcacacatactattgttccaggccaggtcctttttgtgccagatgccaactctccttccagtaccttaaggctatcatcatccagtcctggtgctactgtctctccttcatcatcagatgcagaatatgataaattgcctgatgctgacttagcacgaaaggccttgaaacccattgaaagagtcttatcgtctacttctgaagaagatgagccaggtgtggtgaaatttttaaaaatgaattgtcgatacttcaccgatggaaagggtgtggttggcggtgttatgatagtgactcctaacaacatcatgtttgaccctcataaatctgatcctctggttattgaaaatgggtgtgaggagtatggtctcatctgccccatggaagaggttgtttccattgcgctctacaatgacatttctcacatgaagatcaaagatgccttgccatcgcctggagaatgggaagacctggcttcagaaaaggatatcaacccattcagtaagttcaaatctatcaacaaggaaaaacgacagcagaatggagagaaaattatgacttcggattccagaccaatagtacctttggagaagtccacaggacatacacctacaaagccctcaggcagctctgtgtcagagaaattaaagaaactggactcctctagggagacatcccatggttctcccacagtgactaagctcagcaaggaaccttccgacacttcttctgcatttgaatctacagccaaagaaaactttctaggggaagatgatgattttgttgacttggaagaactttcttctcaaactggtggtggaatgcacaaaaaagacaccttgaaggagtgcctttctcttgacccagaggaacgaaagaaagctgagtcacaaataaacaattctgccgtggaaatgcaggtgcagtcagccctagcctttttgggaacagagaatgatgttgaactgaagggggcgctagatttagaaacctgtgagaagcaagatataatgccagaagtggacaagcagtctggttcgccagaaagccgagtagaaaacacactgaacatacatgaagatttagataaagttaaactcattgaatattacctgactaagaacaaagaagggccacaggtatctgaaaatttgcagaaaacagaattaagtgatggaaaaagtattgaaccagggggaatagacattacccttagtagttctctttcccaggcgggtgatcccataactgagggcaataaagagccagataagacctgggtgaaaaagggagagcccctcccggtaaaactgaactcttctacagaagcaaatgtgattaaagaggctctagactcctctttggaatctactctggacaacagctgtcaaggtgcacaaatggataataaatctgaagttcagttgtggctgttaaagagaattcaggtacccattgaagatatacttccttcaaaagaagaaaaaagcaagaccccacccatgttcctgtgcatcaaagtgggaaaaccaatgagaaaatcctttgccactcacactgcagccatggtccagcagtacggcaaacggagaaagcagccagagtactggtttgctgttcctcgggagagggtggatcatttgtacacattctttgttcagtggtctcccgatgtctatggaaaagatgccaaagagcaaggctttgtggtggtggagaaggaagaactgaacatgattgacaacttcttcagtgagccaacaaccaagagctgggagatcatcactgttgaagaggcaaagcgcaggaagagcacatgcagctactatgaagacgaggacgaagaggtgctgcctgtcctacggccccacagcgcgctcctggagaatatgcacatcgagcagctggcccgacgccttcctgcaagggtgcaagggtatccatggagactggcctatagcacgttagagcacgggaccagcttaaagacgctctaccggaaatcggcatcactagacagtcctgtcctattggtcatcaaagatatggataatcagatttttggagcatatgcaactcatcctttcaagttcagtgaccactattatggcacaggcgaaacttttctctacacattcagccctcattttaaggtctttaagtggagtggagaaaattcatactttatcaatggagacataagttctttagaacttggtggtggagggggacgatttggtttatggctagatgctgatttataccacggacgaagcaactcttgcagcactttcaataatgatattctttccaaaaaggaagacttcatagttcaggatctggaggtgtgggcatttgattgaaattcagactgccttaaaatataacattaaaaagactgggttcgatcagccctcctaaagctggctggaaaaagaagccccagcccagcctgcctcatcccaccccaatgcttcctttctgccatcatctcagagcatgatcacattgcagaaagattctggaaggtccatgtagagggcagacattgaagaaagaaacttaaaatccaggttgttgaaaagactttgtactcccacttcctccaaatccatacagtgaggaatcagagtgtttatagatatatgagttgaatgcaatttttatttttggtaactgtgaaaaataagatactgtggatatatacatgccttgtgtatttatcagcataattttcattaccaaaatgtacagctattatttgccatggaaaaggttagtctcatttagaaaaatcgaaagtgcacagcacttaaagggaatatatgaggtttttttttttttaaaaaaaaacttttatttattatttgtagtatattgtctgaaatgtgtcggcagttttttttcttttaatgtgtcaaatcttgaaatattaaatgtatacattttgtgctatgttttgggaacaaatctgtttgatttatatagttttatattgaattttttttgccctgattgtttagggtgataggtcttaagcagcagtgtataattctaaatttctaaaaactcattatgaatgttcatcaatttgactattataggccagctttccatttagtcaataaaagcgtacatttttagttacttaccttgaacatattcgtgtgaaaaagaatacatcatttctcacagtcttaagttgatatttatagaaatgaatacctttgtgaacctagacttagaacaaatcctgcttttgaaaaaaaatgttttgcttcttacaaaatcatttgtgttaataacaaaaactttattttcggagtgttctttgtataacttttccaagcttttacattaacgagcaggcctctgtcttaaaagggactcagtatattaatttctgcattttttaaatcaaatgaaaaacgtcaaattggaccaattgtcttggtttcttgattcatttatttgagaaaaaaacaatacaaagaaatgcattcatatcaaaattggaatagaaaggaaaacctatttttaagatatcaacctattttcacatcataaaacatctattacataaaataaaggtagacttacttaaccaatattattgattaccagacttttatgaaagccaaagactgcttgctagtaggaaaaaatttcaaataataaccaaagctgaaaaatggtctgtcataaattatttccccggtaatttttgaaaggaaaaatgtataacaagtactatttacatatctgcatttaaaaaagcaattcttagaatacttcctttacattattctcctattttagacattttgtgaaagagaacaaattgtccagtggcctcctgtcagatcaacaattattatactccttaattccatgcaaatttaaatgaatgctataaaattttaaatctgtagcctgggtgtacgtttcactcaagttctcctactgaggactcttgactaacagcatactggcagtttcaccttaacctgctcgttaaataatgtgttggtgtgagatatcaggaatgtctcatgatatcacgtttaccatttacaccatctgcaaccatatgctattaataaaatggaaaaaaacaaaatggtcattttgcatatacttcactctgacctagtttagtccatgatactataattgtgagagcatatccagatgctgtgttctctatgtaaaacagtattgtccattcagaaatgtgtgacccttcatttatggatattgactatatgtaatgcagtgctatcccaatattttcaataaaggactttatgcattcagtgattttctttc

SEQ ID NO: 4877 - protein, 931 aa, Homo sapiens; identical to SEQ ID NO: 4875

SEQ ID NO: 4878 - DNA, 5547 bp, Homo sapiens
atgccctgacggggggcgcagctgcggggctggcgaggcgtcgcgcgtgggaagaggcctaagacaccccgactgcggcggctgcgcacacccgatccggacgcggggccccgcgggcgcgcgcctcggagctcccgcctcctcctcttgctcctcctcggcgtacggtcctcccctgacccctccttccacccgccgagaggatgcgctccccggcgcccagcagcagaggccaccgctcccagaaatgcatgcgaccgatccccttctcccggaccccaggagccggcgcccccgccctgtagggttacgactcactgattaaaaagagggactttttcaaatactttgcacttttgattgtgtattatggataccaaggaagagaagaaggaacggaaacaaagttattttgctcgactgaaaaagaaaaaacaagccaaacaaaatgcagagacagcctcagctgtagctacaaggactcatactgggaaggaagataataatacagtagttttagagccagacaagtgcaacattgctgtggaagaggaatatatgactgatgagaaaaaaaagagaaaaagtaatcagttaaaggagatcaggcgtacagaactaaagagatattatagtattgatgacaatcaaaacaaaacacatgataaaaaagagaagaagatggtggttcagaagccccatgggactatggaatacactgctggaaaccaggacaccctaaactccatagcactgaaatttaacatcactcccaataaattggtggaactgaataaacttttcacacatactattgttccaggccaggtcctttttgtgccagatgccaactctccttccagtaccttaaggctatcatcatccagtcctggtgctactgtctctccttcatcatcagatgcagaatatgataaattgcctgatgctgacttagcacgaaaggccttgaaacccattgaaagagtcttatcgtctacttctgaagaagatgagccaggtgtggtgaaatttttaaaaatgaattgtcgatacttcaccgatggaaagggtgtggttggcggtgttatgatagtgactcctaacaacatcatgtttgaccctcataaatctgatcctctggttattgaaaatgggtgtgaggagtatggtctcatctgccccatggaagaggttgtttccattgcgctctacaatgacatttctcacatgaagatcaaagatgccttgccatctgacctacctcaggatctttgtcctctgtacaggcctggagaatgggaagacctggcttcagaaaaggatatcaacccattcagtaagttcaaatctatcaacaaggaaaaacgacagcagaatggagagaaaattatgacttcggattccagaccaatagtacctttggagaagtccacaggacatacacctacaaagccctcaggcagctctgtgtcagagaaattaaagaaactggactcctctagggagacatcccatggttctcccacagtgactaagctcagcaaggaaccttccgacacttcttctgcatttgaatctacagccaaagaaaactttctaggggaagatgatgattttgttgacttggaagaactttcttctcaaactggtggtggaatgcacaaaaaagacaccttgaaggagtgcctttctcttgacccagaggaacgaaagaaagctgagtcacaaataaacaattctgccgtggaaatgcaggtgcagtcagccctagcctttttgggaacagagaatgatgttgaactgaagggggcgctagatttagaaacctgtgagaagcaagatataatgccagaagtggacaagcagtctggttcgccagaaagccgagtagaaaacacactgaacatacatgaagatttagataaagttaaactcattgaatattacctgactaagaacaaagaagggccacaggtatctgaaaatttgcagaaaacagaattaagtgatggaaaaagtattgaaccagggggaatagacattacccttagtagttctctttcccaggcgggtgatcccataactgagggcaataaagagccagataagacctgggtgaaaaagggagagcccctcccggtaaaactgaactcttctacagaagcaaatgtgattaaagaggctctagactcctctttggaatctactctggacaacagctgtcaaggtgcacaaatggataataaatctgaagttcagttgtggctgttaaagagaattcaggtacccattgaagatatacttccttcaaaagaagaaaaaagcaagaccccacccatgttcctgtgcatcaaagtgggaaaaccaatgagaaaatcctttgccactcacactgcagccatggtccagcagtacggcaaacggagaaagcagccagagtactggtttgctgttcctcgggagagggtggatcatttgtacacattctttgttcagtggtctcccgatgtctatggaaaagatgccaaagagcaaggctttgtggtggtggagaaggaagaactgaacatgattgacaacttcttcagtgagccaacaaccaagagctgggagatcatcactgttgaagaggcaaagcgcaggaagagcacatgcagctactatgaagacgaggacgaagaggtgctgcctgtcctacggccccacagcgcgctcctggagaatatgcacatcgagcagctggcccgacgccttcctgcaagggtgcaagggtatccatggagactggcctatagcacgttagagcacgggaccagcttaaagacgctctaccggaaatcggcatcactagacagtcctgtcctattggtcatcaaagatatggataatcagatttttggagcatatgcaactcatcctttcaagttcagtgaccactattatggcacaggcgaaacttttctctacacattcagccctcattttaaggtctttaagtggagtggagaaaattcatactttatcaatggagacataagttctttagaacttggtggtggagggggacgatttggtttatggctagatgctgatttataccacggacgaagcaactcttgcagcactttcaataatgatattctttccaaaaaggaagacttcatagttcaggatctggaggtgtgggcatttgattgaaattcagactgccttaaaatataacattaaaaagactgggttcgatcagccctcctaaagctggctggaaaaagaagccccagcccagcctgcctcatcccaccccaatgcttcctttctgccatcatctcagagcatgatcacattgcagaaagattctggaaggtccatgtagagggcagacattgaagaaagaaacttaaaatccaggttgttgaaaagactttgtactcccacttcctccaaatccatacagtgaggaatcagagtgtttatagatatatgagttgaatgcaatttttatttttggtaactgtgaaaaataagatactgtggatatatacatgccttgtgtatttatcagcataattttcattaccaaaatgtacagctattatttgccatggaaaaggttagtctcatttagaaaaatcgaaagtgcacagcacttaaagggaatatatgaggtttttttttttttaaaaaaaaacttttatttattatttgtagtatattgtctgaaatgtgtcggcagttttttttcttttaatgtgtcaaatcttgaaatattaaatgtatacattttgtgctatgttttgggaacaaatctgtttgatttatatagttttatattgaattttttttgccctgattgtttagggtgataggtcttaagcagcatatatctatatatctgtatgtgggtatatagagatatatgtgtgtgtgtatgtatatgtacatatacatatatatgagtgtataattctaaatttctaaaaactcattatgaatgttcatcaatttgactattataggccagctttccatttagtcaataaaagcgtacatttttagttacttaccttgaacatattcgtgtgaaaaagaatacatcatttctcacagtcttaagttgatatttatagaaatgaatacctttgtgaacctagacttagaacaaatcctgcttttgaaaaaaaatgttttgcttcttacaaaatcatttgtgttaataacaaaaactttattttcggagtgttctttgtataacttttccaagcttttacattaacgagcaggcctctgtcttaaaagggactcagtatattaatttctgcattttttaaatcaaatgaaaaacgtcaaattggaccaattgtcttggtttcttgattcatttatttgagaaaaaaacaatacaaagaaatgcattcatatcaaaattggaatagaaaggaaaacctatttttaagatatcaacctattttcacatcataaaacatctattacataaaataaaggtccaggcatagtggctcttgcctgtaatcccagcactttgggaggccgaggcaggtggatcactcaaggtcacaagtttgagaccagtctggccaacatggtgaaaccccatctctactaaaagtacaaatattagccgactatgtggcgggcacctgtaatcccacctactcgggaggctgaggcaggagaattgcttgaatccgggaagcagaggttgtagtgagccaagatcgtgccactgcactctatcctgggtaacagcgagactctgtcttaaaaataataacaataataataataataaagacttacttaaccaatattattgattaccagacttttatgaaagccaaagactgcttgctagtaggaaaaaatttcaaataataaccaaagctgaaaaatggtctgtcataaattatttccccggtaatttttgaaaggaaaaatgtataacaagtactatttacatatctgcatttaaaaaagcaattcttagaatacttcctttacattattctcctattttagacattttgtgaaagagaacaaattgtccagtggcctcctgtcagatcaacaattattatactccttaattccatgcaaatttaaatgaatgctataaaattttaaatctgtagcctgggtgtacgtttcactcaagttctcctactgaggactcttgactaacagcatactggcagtttcaccttaacctgctcgttaaataatgtgttggtgtgagatatcaggaatgtctcatgatatcacgtttaccatttacaccatctgcaaccatatgctattaataaaatggaaaaaaacaaaatggtcattttgcatatacttcactctgacctagtttagtccatgatactataattgtgagagcatatccagatgctgtgttctctatgtaaaacagtattgtccattcagaaatgtgtgacccttcatttatggatattgactatatgtaatgcagtgctatcccaatattttcaataaaggactttatgcattcagtgattttctttc

SEQ ID NO: 4879 - protein, 942 aa, Homo sapiens; identical to SEQ ID NO: 4869

SEQ ID NO: 4880 - DNA, 490 bp, Homo sapiens
acgctgctccagagaactctgctctacattgtcagaaaccagctttcaacttgggttccaggatgaagacatgtggaacagaacccgaacttgaacctcagctttggcatccggcttaacctttgccaaggccagcctgcagaacccagccaggagtagctaaaccacagtcaacctgcaaatccatgaaggatatactcagagaagaatcacgagtgccaagagagaccatgaggcaaactgctctccattgaaggtataccagcctacccttcgtgagctaaacacaacctcactcttgccagcattgtaactgactttttaaatctagtaatctgcacttctttgatgccatgaagtcagtattattttcatgtcttggccatcttaagttcctgttttgtgaatattctattcctattccttgttataaaggttttcagagttaagacatgttaaatagaaattattttggaaggttctgtgattc

SEQ ID NO: 4881 - protein, 31 aa, Homo sapiens
MKSVLFSCLGHLKFLFCEYSIPIPCYKGFQS

SEQ ID NO: 4882 - DNA, 1258 bp, Homo sapiens
actccattttatttttcacattggccagtgtaaacttttaagtttacagttgctttgttatcttttcttacagggttacgactcactgattaaaaagagggactttttcaaatactttgcacttttgattgtgtattatggataccaaggaagagaagaaggaacggaaacaaagttattttgctcgactgaaaaagaaaaaacaagccaaacaaaatgcagagacagcctcagctgtagctacaaggactcatactgggaaggaagataataatacagtagttttagagccagacaagtgcaacattgctgtggaagaggaatatatgactgatgagaaaaaaaagagaaaaagtaatcagttaaaggagatcaggcgtacagaactaaagagatattatagtattggtgagtattcatggcgttactgcagtattttcatttaaaaaatctataagaatttttaaaagactatcatttgtgattgatcataataatggtaacagtttatggagcagctgctatgtgcccctggcccttgctttacatacataatcttgtgtaaggggatcacactaaaataatgtctcatttaaatttgtgttcccagcatttagcacagtgcccagaatgtattgtgtactactaaacgtttatctaatgaagagtcactttctctttatgagaaatatttttcttaatgtatgtagacatattcataaatatgctgatagaaatgcctgtactttttggcatttgctagacagtagaaaatggaggagacttggcctagcaagtttttgtttttgttttgttaaaaaaacaaaaacaaaaacaaacaaaaaaaaacacctaggagtcttttttttgagacagagtcttgctctgtcccctaggctggtgtgcaatggcatgatctcggctcactgcaacctctgcctcccaggttcaagcaattctcctgccccagcctcccaagtagctgggattacaggtgcccaccaccatgcccggctaatttgttgtacttttagtagagacggggtttcaccatgttgagcaggctggtcttgaattcctgacctcagacacttgagaatcttaaagggaatcttgaaatgagtccatagtgttatatagtttctcagaataacccgtgcatctgaaactacattcgcagaagtggcgtatctagcttgacctgaatcacccatctcacacctactgttctatcacatgcatacatggattttgtttc

SEQ ID NO: 4883 - protein, 102 aa, Homo sapiens
MDTKEEKKERKQSYFARLKKKKQAKQNAETASAVATRTHTGKEDNNTVVLEPDKCNIAVEEEYMTDEKKKRKSNQLKEIRRTELKRYYSIGEYSWRYCSIFI

SEQ ID NO: 4884 - DNA, 1953 bp, Homo sapiens
aatcatgcaggaaactagatactgagaaaacagttgtagctcagcgtggctacaagtaactgtggtgtggaagcagagtagagagaaaacttgttcctcattagagagagagccacacttctcactgctcacaatgagaggccaaagattacccttggacatccagattttctattgtgccagacctgacgaagagccttttgtgaagatcatcactgttgaagaggcaaagcgcaggaagagcacatgcagctactatgaagacgaggacgaagaggtgctgcctgtcctacggccccacagcgcgctcctggagaatatgcacatcgagcagctggcccgacgccttcctgcaagggtgcaagggtatccatggagactggcctatagcacgttagagcacgggaccagcttaaagacgctctaccggaaatcggcatcactagacagtcctgtcctattggtcatcaaagatatggataatcagatttttggagcatatgcaactcatcctttcaagttcagtgaccactattatggcacaggcgaaacttttctctacacattcagccctcattttaaggtctttaagtggagtggagaaaattcatactttatcaatggagacataagttctttagaacttggtggtggagggggacgatttggtttatggctagatgctgatttataccacggacgaagcaactcttgcagcactttcaataatgatattctttccaaaaaggaagacttcatagttcaggatctggaggtgtgggcatttgattgaaattcagactgccttaaaatataacattaaaaagactgggttcgatcagccctcctaaagctggctggaaaaagaagccccagcccagcctgcctcatcccaccccaatgcttcctttctgccatcatctcagagcatgatcacattgcagaaagattctggaaggtccatgtagagggcagacattgaagaaagaaacttaaaatccaggttgttgaaaagactttgtactcccacttcctccaaatccatacagtgaggaatcagagtgtttatagatatatgagttgaatgcaatttttatttttggtaactgtgaaaaataagatactgtggatatatacatgccttgtgtatttatcagcataattttcattaccaaaatgtacagctattatttgccatggaaaaggttagtctcatttagaaaaatcgaaagtgcacagcacttaaagggaatatatgaggtttttttttttttaaaaaaaaacttttatttattatttgtagtatattgtctgaaatgtgtcggcagttttttttcttttaatgtgtcaaatcttgaaatattaaatgtatacattttgtgctatgttttgggaacaaatctgtttgatttatatagttttatattgaattttttttgccctgattgtttagggtgataggtcttaagcagcatatatctatatatctgtatgtgggtatatagagatatatgtgtgtgtgtatgtatatgtacatatacatatatatgagtgtataattctaaatttctaaaaactcattatgaatgttcatcaatttgactattataggccagctttccatttagtcaataaaagcgtacatttttagttacttaccttgaacatattcgtgtgaaaaagaatacatcatttctcacagtcttaagttgatatttatagaaatgaatacctttgtgaacctagacttagaacaaatcctgcttttgaaaaaaaatgttttgcttcttacaaaatcatttgtgttaataacaaaaactttattttcggagtgttctttgtataacttttccaagcttttacattaacgagcaggcctctgtcttaaaagggactcagtatattaatttctgcattttttaaatcaaatgaaaaacgtcaaattggaccaat

SEQ ID NO: 4885 - protein, 219 aa, Homo sapiens
MRGQRLPLDIQIFYCARPDEEPFVKIITVEEAKRRKSTCSYYEDEDEEVLPVLRPHSALLENMHIEQLARRLPARVQGYPWRLAYSTLEHGTSLKTLYRKSASLDSPVLLVIKDMDNQIFGAYATHPFKFSDHYYGTGETFLYTFSPHFKVFKWSGENSYFINGDISSLELGGGGGRFGLWLDADLYHGRSNSCSTFNNDILSKKEDFIVQDLEVWAFD

SEQ ID NO: 4886 - DNA, 1879 bp, Homo sapiens
aatcatgcaggaaactagatactgagaaaacagttgtagctcagcgtggctacaagtaactgtggtgtggaagcagagtagagagaaaacttgttcctcattagagagagagccacacttctcactgctcacaatgagaggccaaagattacccttggacatccagattttctattgtgccagacctgacgaagagccttttgtgaagatcatcactgttgaagaggcaaagcgcaggaagagcacatgcagctactatgaagacgaggacgaagaggtgctgcctgtcctacggccccacagcgcgctcctggagaatatgcacatcgagcagctggcccgacgccttcctgcaagggtgcaagggtatccatggagactggcctatagcacgttagagcacgggaccagcttaaagacgctctaccggaaatcggcatcactagacagtcctgtcctattggtcatcaaagatatggataatcagatttttggagcatatgcaactcatcctttcaagttcagtgaccactattatggcacaggcgaaacttttctctacacattcagccctcattttaaggggacgatttggtttatggctagatgctgatttataccacggacgaagcaactcttgcagcactttcaataatgatattctttccaaaaaggaagacttcatagttcaggatctggaggtgtgggcatttgattgaaattcagactgccttaaaatataacattaaaaagactgggttcgatcagccctcctaaagctggctggaaaaagaagccccagcccagcctgcctcatcccaccccaatgcttcctttctgccatcatctcagagcatgatcacattgcagaaagattctggaaggtccatgtagagggcagacattgaagaaagaaacttaaaatccaggttgttgaaaagactttgtactcccacttcctccaaatccatacagtgaggaatcagagtgtttatagatatatgagttgaatgcaatttttatttttggtaactgtgaaaaataagatactgtggatatatacatgccttgtgtatttatcagcataattttcattaccaaaatgtacagctattatttgccatggaaaaggttagtctcatttagaaaaatcgaaagtgcacagcacttaaagggaatatatgaggtttttttttttttaaaaaaaaacttttatttattatttgtagtatattgtctgaaatgtgtcggcagttttttttcttttaatgtgtcaaatcttgaaatattaaatgtatacattttgtgctatgttttgggaacaaatctgtttgatttatatagttttatattgaattttttttgccctgattgtttagggtgataggtcttaagcagcatatatctatatatctgtatgtgggtatatagagatatatgtgtgtgtgtatgtatatgtacatatacatatatatgagtgtataattctaaatttctaaaaactcattatgaatgttcatcaatttgactattataggccagctttccatttagtcaataaaagcgtacatttttagttacttaccttgaacatattcgtgtgaaaaagaatacatcatttctcacagtcttaagttgatatttatagaaatgaatacctttgtgaacctagacttagaacaaatcctgcttttgaaaaaaaatgttttgcttcttacaaaatcatttgtgttaataacaaaaactttattttcggagtgttctttgtataacttttccaagcttttacattaacgagcaggcctctgtcttaaaagggactcagtatattaatttctgcattttttaaatcaaatgaaaaacgtcaaattggaccaat

SEQ ID NO: 4887 - protein, 159 aa, Homo sapiens
MRGQRLPLDIQIFYCARPDEEPFVKIITVEEAKRRKSTCSYYEDEDEEVLPVLRPHSALLENMHIEQLARRLPARVQGYPWRLAYSTLEHGTSLKTLYRKSASLDSPVLLVIKDMDNQIFGAYATHPFKFSDHYYGTGETFLYTFSPHFKGTIWFMARC

SEQ ID NO: 4888 - DNA, 3068 bp, Homo sapiens
aatcatgcaggaaactagatactgagaaaacagttgtagctcagcgtggctacaagtaactgtggtgtggaagcagagtagagagaaaacttgttcctcattagagagagagccacacttctcactgctcacaatgagaggccaaagattacccttggacatccagattttctattgtgccagacctgacgaagagccttttgtgaagatcatcactgttgaagaggcaaagcgcaggaagagcacatgcagctactatgaagacgaggacgaagaggtgctgcctgtcctacggccccacagcgcgctcctggagaatatgcacatcgagcagctggcccgacgccttcctgcaagggtgcaagggtatccatggagactggcctatagcacgttagagcacgggaccagcttaaagacgctctaccggaaatcggcatcactagacagtcctgtcctattggtcatcaaagatatggataatcagatttttggagcatatgcaactcatcctttcaagttcagtgaccactattatggcacaggcgaaacttttctctacacattcagccctcattttaaggggacgatttggtttatggctagatgctgatttataccacggacgaagcaactcttgcagcactttcaataatgatattctttccaaaaaggaagacttcatagttcaggatctggaggtgtgggcatttgattgaaattcagactgccttaaaatataacattaaaaagactgggttcgatcagccctcctaaagctggctggaaaaagaagccccagcccagcctgcctcatcccaccccaatgcttcctttctgccatcatctcagagcatgatcacattgcagaaagattctggaaggtccatgtagagggcagacattgaagaaagaaacttaaaatccaggttgttgaaaagactttgtactcccacttcctccaaatccatacagtgaggaatcagagtgtttatagatatatgagttgaatgcaatttttatttttggtaactgtgaaaaataagatactgtggatatatacatgccttgtgtatttatcagcataattttcattaccaaaatgtacagctattatttgccatggaaaaggttagtctcatttagaaaaatcgaaagtgcacagcacttaaagggaatatatgaggtttttttttttttaaaaaaaaacttttatttattatttgtagtatattgtctgaaatgtgtcggcagttttttttcttttaatgtgtcaaatcttgaaatattaaatgtatacattttgtgctatgttttgggaacaaatctgtttgatttatatagttttatattgaattttttttgccctgattgtttagggtgataggtcttaagcagcatatatctatatatctgtatgtgggtatatagagatatatgtgtgtgtgtatgtatatgtacatatacatatatatgagtgtataattctaaatttctaaaaactcattatgaatgttcatcaatttgactattataggccagctttccatttagtcaataaaagcgtacatttttagttacttaccttgaacatattcgtgtgaaaaagaatacatcatttctcacagtcttaagttgatatttatagaaatgaatacctttgtgaacctagacttagaacaaatcctgcttttgaaaaaaaatgttttgcttcttacaaaatcatttgtgttaataacaaaaactttattttcggagtgttctttgtataacttttccaagcttttacattaacgagcaggcctctgtcttaaaagggactcagtatattaatttctgcattttttaaatcaaatgaaaaacgtcaaattggaccaattgtcttggtttcttgattcatttatttgagaaaaaaacaatacaaagaaatgcattcatatcaaaattggaatagaaaggaaaacctatttttaagatatcaacctattttcacatcataaaacatctattacataaaataaaggtccaggcatagtggctcttgcctgtaatcccagcactttgggaggccgaggcaggtggatcactcaaggtcacaagtttgagaccagtctggccaacatggtgaaaccccatctctactaaaagtacaaatattagccgactatgtggcgggcacctgtaatcccacctactcgggaggctgaggcaggagaattgcttgaatccgggaagcagaggttgtagtgagccaagatcgtgccactgcactctatcctgggtaacagcgagactctgtcttaaaaataataacaataataataataataaagacttacttaaccaatattattgattaccagacttttatgaaagccaaagactgcttgctagtaggaaaaaatttcaaataataaccaaagctgaaaaatggtctgtcataaattatttccccggtaatttttgaaaggaaaaatgtataacaagtactatttacatatctgcatttaaaaaagcaattcttagaatacttcctttacattattctcctattttagacattttgtgaaagagaacaaattgtccagtggcctcctgtcagatcaacaattattatactccttaattccatgcaaatttaaatgaatgctataaaattttaaatctgtagcctgggtgtacgtttcactcaagttctcctactgaggactcttgactaacagcatactggcagtttcaccttaacctgctcgttaaataatgtgttggtgtgagatatcaggaatgtctcatgatatcacgtttaccatttacaccatctgcaaccatatgctattaataaaatggaaaaaaacaaaatggtcattttgcatatacttcactctgacctagtttagtccatgatactataattgtgagagcatatccagatgctgtgttctctatgtaaaacagtattgtccattcagaaatgtgtgacccttcatttatggatattgactatatgtaatgcagtgctatcccaatattttcaataaaggactttatgcattcagtgattttctttc

SEQ ID NO: 4889 - protein, 159 aa, Homo sapiens; identical to SEQ ID NO: 4887

SEQ ID NO: 4890 - DNA, 3142 bp, Homo sapiens
aatcatgcaggaaactagatactgagaaaacagttgtagctcagcgtggctacaagtaactgtggtgtggaagcagagtagagagaaaacttgttcctcattagagagagagccacacttctcactgctcacaatgagaggccaaagattacccttggacatccagattttctattgtgccagacctgacgaagagccttttgtgaagatcatcactgttgaagaggcaaagcgcaggaagagcacatgcagctactatgaagacgaggacgaagaggtgctgcctgtcctacggccccacagcgcgctcctggagaatatgcacatcgagcagctggcccgacgccttcctgcaagggtgcaagggtatccatggagactggcctatagcacgttagagcacgggaccagcttaaagacgctctaccggaaatcggcatcactagacagtcctgtcctattggtcatcaaagatatggataatcagatttttggagcatatgcaactcatcctttcaagttcagtgaccactattatggcacaggcgaaacttttctctacacattcagccctcattttaaggtctttaagtggagtggagaaaattcatactttatcaatggagacataagttctttagaacttggtggtggagggggacgatttggtttatggctagatgctgatttataccacggacgaagcaactcttgcagcactttcaataatgatattctttccaaaaaggaagacttcatagttcaggatctggaggtgtgggcatttgattgaaattcagactgccttaaaatataacattaaaaagactgggttcgatcagccctcctaaagctggctggaaaaagaagccccagcccagcctgcctcatcccaccccaatgcttcctttctgccatcatctcagagcatgatcacattgcagaaagattctggaaggtccatgtagagggcagacattgaagaaagaaacttaaaatccaggttgttgaaaagactttgtactcccacttcctccaaatccatacagtgaggaatcagagtgtttatagatatatgagttgaatgcaatttttatttttggtaactgtgaaaaataagatactgtggatatatacatgccttgtgtatttatcagcataattttcattaccaaaatgtacagctattatttgccatggaaaaggttagtctcatttagaaaaatcgaaagtgcacagcacttaaagggaatatatgaggtttttttttttttaaaaaaaaacttttatttattatttgtagtatattgtctgaaatgtgtcggcagttttttttcttttaatgtgtcaaatcttgaaatattaaatgtatacattttgtgctatgttttgggaacaaatctgtttgatttatatagttttatattgaattttttttgccctgattgtttagggtgataggtcttaagcagcatatatctatatatctgtatgtgggtatatagagatatatgtgtgtgtgtatgtatatgtacatatacatatatatgagtgtataattctaaatttctaaaaactcattatgaatgttcatcaatttgactattataggccagctttccatttagtcaataaaagcgtacatttttagttacttaccttgaacatattcgtgtgaaaaagaatacatcatttctcacagtcttaagttgatatttatagaaatgaatacctttgtgaacctagacttagaacaaatcctgcttttgaaaaaaaatgttttgcttcttacaaaatcatttgtgttaataacaaaaactttattttcggagtgttctttgtataacttttccaagcttttacattaacgagcaggcctctgtcttaaaagggactcagtatattaatttctgcattttttaaatcaaatgaaaaacgtcaaattggaccaattgtcttggtttcttgattcatttatttgagaaaaaaacaatacaaagaaatgcattcatatcaaaattggaatagaaaggaaaacctatttttaagatatcaacctattttcacatcataaaacatctattacataaaataaaggtccaggcatagtggctcttgcctgtaatcccagcactttgggaggccgaggcaggtggatcactcaaggtcacaagtttgagaccagtctggccaacatggtgaaaccccatctctactaaaagtacaaatattagccgactatgtggcgggcacctgtaatcccacctactcgggaggctgaggcaggagaattgcttgaatccgggaagcagaggttgtagtgagccaagatcgtgccactgcactctatcctgggtaacagcgagactctgtcttaaaaataataacaataataataataataaagacttacttaaccaatattattgattaccagacttttatgaaagccaaagactgcttgctagtaggaaaaaatttcaaataataaccaaagctgaaaaatggtctgtcataaattatttccccggtaatttttgaaaggaaaaatgtataacaagtactatttacatatctgcatttaaaaaagcaattcttagaatacttcctttacattattctcctattttagacattttgtgaaagagaacaaattgtccagtggcctcctgtcagatcaacaattattatactccttaattccatgcaaatttaaatgaatgctataaaattttaaatctgtagcctgggtgtacgtttcactcaagttctcctactgaggactcttgactaacagcatactggcagtttcaccttaacctgctcgttaaataatgtgttggtgtgagatatcaggaatgtctcatgatatcacgtttaccatttacaccatctgcaaccatatgctattaataaaatggaaaaaaacaaaatggtcattttgcatatacttcactctgacctagtttagtccatgatactataattgtgagagcatatccagatgctgtgttctctatgtaaaacagtattgtccattcagaaatgtgtgacccttcatttatggatattgactatatgtaatgcagtgctatcccaatattttcaataaaggactttatgcattcagtgattttctttc

SEQ ID NO: 4891 - protein, 219 aa, Homo sapiens; identical to SEQ ID NO: 4885

SEQ ID NO: 4892 - DNA, 619 bp, Homo sapiens
actgagaaaacagttgtagctcagcgtggctacaagtaactgtggtgtggaagcagagtagagagaaaacttgttcctcattagagagagagccacacttctcactgctcacaatgagaggccaaagattacccttggacatccagattttctattgtgccagacctgacgaagagccttttgtgaagatcatcactgttgaagaggcaaagcgcaggaagagcacatgcagctactatgaagacgaggacgaagaggtgctgcctgtcctacggccccacagcgcgctcctggagaatatgcacatcgagcagctggcccgacgccttcctgcaagggtgcaagggtatccatggagactggcctatagcacgttagagcacgggaccagcttaaagacgctctaccggaaatcggcatcactagacagtcctgtcctattggtcatcaaagatatggataatcagatttttggagcatatgcaactcatcctttcaagttcagtgaccactattatggcacaggcgaaacttttctctacacattcagccctcattttaaggtacctagataggagaaatatccaactcccatatgtcacagtgtcctcagttgggg

SEQ ID NO: 4893 - protein, 153 aa, Homo sapiens
MRGQRLPLDIQIFYCARPDEEPFVKIITVEEAKRRKSTCSYYEDEDEEVLPVLRPHSALLENMHIEQLARRLPARVQGYPWRLAYSTLEHGTSLKTLYRKSASLDSPVLLVIKDMDNQIFGAYATHPFKFSDHYYGTGETFLYTFSPHFKVPR

SEQ ID NO: 4894 - DNA, 612 bp, Homo sapiens
agagagaaaacttgttcctcattagagagagagccacacttctcactgctcacaatgagaggccaaagattacccttggacatccagattttctattgtgccagacctgacgaagagccttttgtgaagatcatcactgttgaagaggcaaagcgcaggaagagcacatgcagctactatgaagacgaggacgaagaggtgctgcctgtcctacggccccacagcgcgctcctggagaatatgcacatcgagcagctggcccgacgccttcctgcaagggtgcaagggtatccatggagactggcctatagcacgttagagcacgggaccagcttaaagacgctctaccggaaatcggcatcactagacagtcctgtcctattggtcatcaaagatatggataatcaggtgaggcctgtccctctcataaagaatattttttaataatttttcaaaattcccaacagtagagagactagtaccatatacttccatcacccagattccacagttaacaggattttgccttctgtgtcttttatctttgttttttctctgctgaaatattttgaagtaaatcccaatcattatggcatttcacccctacatatt

SEQ ID NO: 4895 - protein, 129 aa, Homo sapiens [sequence omitted]

SEQ ID NO: 4896 - DNA, 1711 bp, Homo sapiens
agagagaaaacttgttcctcattagagagagagccacacttctcactgctcacaatgagaggccaaagattacccttggacatccagattttctattgtgccagacctgacgaagagccttttgtgaagatcatcactgttgaagaggcaaagcgcaggaagagcacatgcagctactatgaagacgaggacgaagaggtgctgcctgtcctacggccccacagcgcgctcctggagaatatgcacatcgagcagcatatgcaactcatcctttcaagttcagtgaccactattatggcacaggcgaaacttttctctacacattcagccctcattttaaggtctttaagtggagtggagaaaattcatactttatcaatggagacataagttctttagaacttggtggtggagggggacgatttggtttatggctagatgctgatttataccacggacgaagcaactcttgcagcactttcaataatgatattctttccaaaaaggaagacttcatagttcaggatctggaggtgtgggcatttgattgaaattcagactgccttaaaatataacattaaaaagactgggttcgatcagccctcctaaagctggctggaaaaagaagccccagcccagcctgcctcatcccaccccaatgcttcctttctgccatcatctcagagcatgatcacattgcagaaagattctggaaggtccatgtagagggcagacattgaagaaagaaacttaaaatccaggttgttgaaaagactttgtactcccacttcctccaaatccatacagtgaggaatcagagtgtttatagatatatgagttgaatgcaatttttatttttggtaactgtgaaaaataagatactgtggatatatacatgccttgtgtatttatcagcataattttcattaccaaaatgtacagctattatttgccatggaaaaggttagtctcatttagaaaaatcgaaagtgcacagcacttaaagggaatatatgaggtttttttttttttaaaaaaaaacttttatttattatttgtagtatattgtctgaaatgtgtcggcagttttttttcttttaatgtgtcaaatcttgaaatattaaatgtatacattttgtgctatgttttgggaacaaatctgtttgatttatatagttttatattgaattttttttgccctgattgtttagggtgataggtcttaagcagcatatatctatatatctgtatgtgggtatatagagatatatgtgtgtgtgtatgtatatgtacatatacatatatatgagtgtataattctaaatttctaaaaactcattatgaatgttcatcaatttgactattataggccagctttccatttagtcaataaaagcgtacatttttagttacttaccttgaacatattcgtgtgaaaaagaatacatcatttctcacagtcttaagttgatatttatagaaatgaatacctttgtgaacctagacttagaacaaatcctgcttttgaaaaaaaatgttttgcttcttacaaaatcatttgtgttaataacaaaaactttattttcggagtgttctttgtataacttttccaagcttttacattaacgagcaggcctctgtcttaaaagggactcagtatattaatttctgcattttttaaatcaaatgaaaaacgtcaaattggaccaat

SEQ ID NO: 4897 - protein, 111 aa, Homo sapiens
MRGQRLPLDIQIFYCARPDEEPFVKIITVEEAKRRKSTCSYYEDEDEEVLPVLRPHSALLENMHIEQHMQLILSSSVTTIMAQAKLFSTHSALILRSLSGVEKIHTLSMET

SEQ ID NO: 4898 - DNA, 2900 bp, Homo sapiens
agagagaaaacttgttcctcattagagagagagccacacttctcactgctcacaatgagaggccaaagattacccttggacatccagattttctattgtgccagacctgacgaagagccttttgtgaagatcatcactgttgaagaggcaaagcgcaggaagagcacatgcagctactatgaagacgaggacgaagaggtgctgcctgtcctacggccccacagcgcgctcctggagaatatgcacatcgagcagcatatgcaactcatcctttcaagttcagtgaccactattatggcacaggcgaaacttttctctacacattcagccctcattttaaggtctttaagtggagtggagaaaattcatactttatcaatggagacataagttctttagaacttggtggtggagggggacgatttggtttatggctagatgctgatttataccacggacgaagcaactcttgcagcactttcaataatgatattctttccaaaaaggaagacttcatagttcaggatctggaggtgtgggcatttgattgaaattcagactgccttaaaatataacattaaaaagactgggttcgatcagccctcctaaagctggctggaaaaagaagccccagcccagcctgcctcatcccaccccaatgcttcctttctgccatcatctcagagcatgatcacattgcagaaagattctggaaggtccatgtagagggcagacattgaagaaagaaacttaaaatccaggttgttgaaaagactttgtactcccacttcctccaaatccatacagtgaggaatcagagtgtttatagatatatgagttgaatgcaatttttatttttggtaactgtgaaaaataagatactgtggatatatacatgccttgtgtatttatcagcataattttcattaccaaaatgtacagctattatttgccatggaaaaggttagtctcatttagaaaaatcgaaagtgcacagcacttaaagggaatatatgaggtttttttttttttaaaaaaaaacttttatttattatttgtagtatattgtctgaaatgtgtcggcagttttttttcttttaatgtgtcaaatcttgaaatattaaatgtatacattttgtgctatgttttgggaacaaatctgtttgatttatatagttttatattgaattttttttgccctgattgtttagggtgataggtcttaagcagcatatatctatatatctgtatgtgggtatatagagatatatgtgtgtgtgtatgtatatgtacatatacatatatatgagtgtataattctaaatttctaaaaactcattatgaatgttcatcaatttgactattataggccagctttccatttagtcaataaaagcgtacatttttagttacttaccttgaacatattcgtgtgaaaaagaatacatcatttctcacagtcttaagttgatatttatagaaatgaatacctttgtgaacctagacttagaacaaatcctgcttttgaaaaaaaatgttttgcttcttacaaaatcatttgtgttaataacaaaaactttattttcggagtgttctttgtataacttttccaagcttttacattaacgagcaggcctctgtcttaaaagggactcagtatattaatttctgcattttttaaatcaaatgaaaaacgtcaaattggaccaattgtcttggtttcttgattcatttatttgagaaaaaaacaatacaaagaaatgcattcatatcaaaattggaatagaaaggaaaacctatttttaagatatcaacctattttcacatcataaaacatctattacataaaataaaggtccaggcatagtggctcttgcctgtaatcccagcactttgggaggccgaggcaggtggatcactcaaggtcacaagtttgagaccagtctggccaacatggtgaaaccccatctctactaaaagtacaaatattagccgactatgtggcgggcacctgtaatcccacctactcgggaggctgaggcaggagaattgcttgaatccgggaagcagaggttgtagtgagccaagatcgtgccactgcactctatcctgggtaacagcgagactctgtcttaaaaataataacaataataataataataaagacttacttaaccaatattattgattaccagacttttatgaaagccaaagactgcttgctagtaggaaaaaatttcaaataataaccaaagctgaaaaatggtctgtcataaattatttccccggtaatttttgaaaggaaaaatgtataacaagtactatttacatatctgcatttaaaaaagcaattcttagaatacttcctttacattattctcctattttagacattttgtgaaagagaacaaattgtccagtggcctcctgtcagatcaacaattattatactccttaattccatgcaaatttaaatgaatgctataaaattttaaatctgtagcctgggtgtacgtttcactcaagttctcctactgaggactcttgactaacagcatactggcagtttcaccttaacctgctcgttaaataatgtgttggtgtgagatatcaggaatgtctcatgatatcacgtttaccatttacaccatctgcaaccatatgctattaataaaatggaaaaaaacaaaatggtcattttgcatatacttcactctgacctagtttagtccatgatactataattgtgagagcatatccagatgctgtgttctctatgtaaaacagtattgtccattcagaaatgtgtgacccttcatttatggatattgactatatgtaatgcagtgctatcccaatattttcaataaaggactttatgcattcagtgattttctttc

SEQ ID NO: 4899 - protein, 111 aa, Homo sapiens; identical to SEQ ID NO: 4897

SEQ ID NO: 4900 - DNA, 841 bp, Homo sapiens
atggctagatgctgatttataccacggacgaagcaactcttgcagcactttcaataatgatattctttccaaaaaggaagacttcatagttcaggatctggaggtgtgggcatttgattgaaattcagactgccttaaaatataacattaaaaagactgggttcgatcagccctcctaaagctggctggaaaaagaagccccagcccagcctgcctcatcccaccccaatgcttcctttctgccatcatctcagagcatgatcacattgcagaaagattctggaaggtccatgtagagggcagacattgaagaaagaaacttaaaatccaggttgttgaaaagactttgtactcccacttcctccaaatccatacagtgaggaatcagagtgtttatagatatatgagttgaatgcaaatttaaatgaatgctataaaattttaaatctgtagcctgggtgtacgtttcactcaagttctcctactgaggactcttgactaacagcatactggcagtttcaccttaacctgctcgttaaataatgtgttggtgtgagatatcaggaatgtctcatgatatcacgtttaccatttacaccatctgcaaccatatgctattaataaaatggaaaaaaacaaaatggtcattttgcatatacttcactctgacctagtttagtccatgatactataattgtgagagcatatccagatgctgtgttctctatgtaaaacagtattgtccattcagaaatgtgtgacccttcatttatggatattgactatatgtaatgcagtgctatcccaatattttcaataaaggactttatgcattcagtga

SEQ ID NO: 4901 - protein, 43 aa, Homo sapiens
MCWCEISGMSHDITFTIYTICNHMLLIKWKKTKWSFCIYFTLT

SEQ ID NO: 4902 - DNA, 7711 bp, Homo sapiens
attttgaagagaggggtcccggggagctccctccaagatctagaggctccgcggccacccctgccgggtcctgccaagacttgctagaaggaacgagtcgcgtgccttagttagttggttcccgtcacaggaagaaacgcctttgcagtgggtttaattgcttctgggccgagcgaattccccgccgtacaactcagtggtgcggactttgcctcctgctaccctgttgctgcgccgagcggggtgggaaagtttctggagttgtcagtcgcgcagcccgtggccacctagacccgaggtgcgggcgcctgcgaagggcccccgcggggtggccggggccgccggggcatgcagcgcgggggcgcggctcggtgacgccgcgggcggggacccggcatccgggcaggctgcgcgcgggtgcggggcgagggcgccgcggggactgggacgcacggcccgcgcgcgggacacggccatggaggacgcgggagcagctggcccggggccggagcctgagcccgagcccgagccggagcccgagcccgcgccggagccggaaccggagcccaagccgggtgctggcacatccgaggcgttctcccgactctggaccgacgtgatgggtatcctggacggttcactgggaaacatcgatgacctggcgcagcagtatgcagattattacaacacctgtttctccgacgtgtgcgagaggatggaggagctgcggaaacggcgggtttcccaggacctggaagtggagaaacccgatgctagccccacgtcacttcagctgcggtcccagatcgaagagtcgcttggcttctgtagcgccgtgtcaaccccagaagtggaaagaaagaaccctcttcataaatcaaactcagaagacagctctgtaggaaaaggagactggaagaagaaaaataagtatttctggcagaacttccgaaagaaccagaaaggaataatgagacagacttcaaaaggagaagacgttggttatgttgccagtgaaataacgatgagcgatgaggagcggattcagctaatgatgatggtcaaagaaaagatgatcacaattgaggaagcacttgctaggctcaaggaatacgaggcccagcaccggcagtcggctgccctggaccctgctgactggccagatggttcttacccaacgtttgatggctcatcaaactgcaattcaagagaacaatcggatgatgagactgaggagtcggtgaagtttaagaggttacacaagctggtaaactccactcgcagagtcagaaagaaactaattagggtggaagaaatgaaaaaacccagcactgaaggtggggaggagcacgtgtttgagaattcgccggtcctggatgaacggtccgccctctactctggcgtgcacaagaagccccttttctttgatggctctcctgagaaacctcccgaagatgactcagactctctcaccacgtctccatcctccagcagcctggacacctggggggctggccggaagttggtcaaaaccttcagcaaaggagagagccggggcctgattaagccccccaagaagatggggacattcttctcctacccagaagaagaaaaggcccagaaagtgtcccgctccctcaccgagggggagatgaagaagggtctcgggtccctaagccacgggagaacctgcagttttggaggatttgacttgacgaatcgctctctgcacgttggcagtaataattctgacccaatgggtaaagaaggagactttgtgtacaaagaagtcatcaaatcacctactgcctctcgcatctctcttgggaaaaaggtgaaatcagtgaaagagacgatgagaaagagaatgtctaaaaaatacagcagctctgtctctgagcaggactcgggccttgatggaatgcctggctcccctccgccttcacagcccgaccccgaacacttggacaagcccaagctcaaggccgggggttctgtagaaagtcttcgcagttctctcagtgggcagagctccatgagcggtcaaacagtgagcaccactgattcctcaaccagcaaccgggaaagcgtcaagtcggaagatggggatgacgaagagccgccttaccgaggcccgttctgcgggcgtgccagggtgcacaccgacttcacccccagtccctatgacacagactcactcaagctcaagaaaggagatatcatcgatataatcagcaagccacccatggggacctggatgggcctgctgaacaacaaagtcggcacgttcaagttcatctacgtggacgtgctcagtgaagacgaggagaaacccaaacgccccaccaggaggcgtcggaaaggacgaccaccccagcccaagtctgtggaggatctcctggatcggattaacctaaaagagcacatgcccactttcctgttcaatggatatgaagatttggacacctttaagctgctggaggaggaagacttggatgagttaaatatcagggacccggaacacagagctgttctcttgacagcagtggagctgttacaagagtatgacagtaacagcgaccagtcaggatcccaggagaagctgctcgttgacagccagggcctgagtggatgctcaccccgagactcaggatgctacgaaagcagtgagaacctggaaaacggcaagactcggaaagctagcctcctatctgccaagtcatccaccgagcccagcttgaagtcttttagcagaaaccagttgggcaattacccaacattgcctttaatgaaatcaggggatgcactgaagcagggacaggaggagggcaggctgggtggtggccttgccccagacacgtccaagagctgtgacccacctggtgtgactggtttgaataaaaaccgaagaagcctcccagtttccatctgccggagctgtgagaccctggagggcccccagactgtggacacttggccccgatcccattccctggatgaccttcaagtggagcctggtgctgagcaagacgtgcctaccgaggtgacagaaccgccccctcagattgtacctgaagtgccacagaagacgaccgcctcttccacgaaggcccagcccctggagcaagactctgctgtcgacaatgcattgctactgacccaaagcaagagattttctgaacctcagaaattgacaactaagaaactggagggctcaatcgcagcctctggtcgcggcctgtcaccccctcagtgtttgcccagaaactatgatgctcagcctcctggagctaaacacggtttagcaaggacgcctctggagggccacagaaaaggacacgagtttgaaggaacacaccatcccctgggcaccaaagaaggggtagatgctgagcagagaatgcagcccaaaattccatcacagcctccacctgttcctgccaaaaagagcagagaacgccttgctaacggactccaccctgttcccatgggccccagtggggccctccccagtcccgatgcgccatgcctgccagtgaaaaggggcagccccgccagccccaccagccctagcgactgtcccccagcactggctcccaggcctctctcagggcaggcgcctggcagcccaccaagcacaaggccgcccccctggctctcagagctccccgagaacacaagcctccaggagcacggtgtgaagctgggcccggctttgaccaggaaggtctcctgtgcccggggagtggatctagaaacgctcactgaaaacaagctgcacgctgaaggcatcgatctcacggaggagccgtattctgataagcatggccgctgtgggattcctgaagccctggtgcagagatacgcagaggacttggatcagcccgagcgggacgtcgccgccaacatggaccagatccgggtgaagcagcttcggaagcagcaccgcatggcgattccaagtggtggactcacggaaatctgccgaaagcccgtctctcctgggtgcatttcgtctgtgtcagattggctcatttccatcggtctgcccatgtacgccggcaccctctccaccgcgggcttcagcacactgagccaagtgccttctctgtctcacacttgccttcaggaggccggcatcacagaggagagacacataagaaagctcctatctgcagccagactcttcaaactgccgccaggccctgaggccatgtagccaggcccggaatgggcctctctggacaagagccaccctttcactgtgcatatgatgctgatgcaattcctccatcatctctggacgtgcagaccagatccagaagaaaggcctggcgtgtggccaaacagcgtgaaaccttggcacaggactgaggatcctctcctccagaaaagccccctcgaggaaataaattagtgcggttctctttgacccccaaagacaagacaagcacttatttttattttcagaagacaaaagaaccaagatgccaactggctgcgaatgctctatctccagtctgtctctgtgtactggtagaggctgggaggagtagggggcagcctgttccatttctgatagtgcccttgctcttctgtctgtcatcttgcaggatgcccgagggccagatgggcttagctaggccaaagtaacagactcaagagttattgtacattactgaccacgctcatttgttcaaaagttagaacatctggctgcaccaggaaaaaaaaaaaaaaaaagtcctgttcttctttagataaacaagagacattttcataattgctttctagcaatcagcttttatttgccttaatataagcttttaagcagttatctaactagtgtccacaaccctgtaaccatacttccacatcttcagcttaggcagacatcgaacctctctgggatgtttccagcaaaagtgagcttttctaatcgtctcattgtaacatggcttattttgtagaggtattcatcagccacacacttcatgttggtttttggtttttaagctaactacaaatctagtaaaaagctatctgaaattcacaaatatcatgtgtgtgcgtgcgtgcgtgcgcgtgtgtgtctgtattcatagtgactgcttttggttttaaccagtttagtatcgttactgtgtggatcgtcgcgctgcagtattgacttggaatcctgaccatgtccatcccaaaattcagtcctcagttaacggatcatgtttgcaaaaggtcactgtgaggctgcatatttcagaaagatgtccttaataagggaagtcatgtataagatgttttctaaaagacttttcagtattacaactaatactattattatccttctttttttatttagataattcttttaatttaaacaaaggttcactatggaaccagacaaatctcattagccatgtgttaagtatttgctactttaaattgttttacaactgatttcagcacattctatccttttttttttttgaaatggagtttcgctcttgtcacccaggctggagtgcaatggcacgatcttggctcactgcaacctcagtctcccaggttcaagtgattctcctgccttagcctcccgagtagctgggattataggcacccaccaccacgcccagctaatttttgtattattagtagagacagggtttcaccatgttggccaggctggtctcaaactcaactcctgacctcaggtggtccacccgcctcagcctcccaaagtgctgggattacaggtgtgagccaccgcacctggcctctgtcctcttttagtctagtgtctggttttctagcaaacagtaaatttaaacaagtaaactattatggtttccattgcttacaaaatgattttcctttacattcttatcatgaacactattttaagcatcaaatgcaatcatctaaaatataaaggtcaatcatttataatagaaacaccttgaccacaagcccttgattgaacattttataatatttcatctacttattaaaacaaataatttcccttgggttggaggggaagtgatttcataaattaattagaaagccatctttagcatattgcttatgtctggatccatgtttctgaggaaaaagacattctcaggtgatgtatttttttcatgcattagtatgcatttttaaaaaataatgcatgtttctttaataattaattttcatcttctataagatgccatgtgaagaagttgtggaaatgtagaataaaaagctaaagctgccaaatttctgttgaactcttaaaaacagctcatgtttgtttgtcctctcgggttgtggcctagcctatttgcaatgtaatgaagctgcagggttcttgtatagctaaagcgttcaatgcatttcacgtgctgtggtggatgtgggtgctgtagacaggcttcttctcttcctgctctcaaaatacctcggcttgacatttggacagatcctgtcattgtttaagctgagcaaaaaaccacacaaaagttgtgtaagagatgagataacaaaggagcgagagaaatctcatgtgaatttccaagttttaattcgttctccatgaaggattttcatttcagtgaaagtcgcagcagaagagggaactttctggagtttttgagaatgccaaaccacatttttatcacacttctttggaaatcaatgcctttgcatagaaaatcaaattcagggaccacaaagaattttcagtgggaatgtctagtctgaggggtctgaggttgtttttactttattgtgttgtttaaatattttaaaaatatctttagcgtttggtcttttttttttctgtaaacatttaatttggtctgagaaaagctgaatgtttgggtgtgacgtttgactgaggtggattggggctgcctgtggacattagtgaacaggtggtaggcttcaggaatatccagttttaatcagttgcatttggtacagaattttgagtaatggtgaaaattgttgtctttggaaagcacaaaagaaacctggaaaggcagttcggctcaggtagctacacataacattgtgtatgattttcacttcaaagctgtctggaaggaaatgcagtcagctccagctagtactatttatgtacccagataactaagatattgtttcatggccttgccttagtcagaggcccttttctctgtcctgaacccccaggtatgggtgaaattggaaattactaatctattggaaatcagttcctgacatagtaaagtttgctttcataactgcagcaaaaaaggtcaacttgccaagtcactgctgccatgtgtgtactgtattattttcagaaaaaaatataatagtctgagtccaagttatcttgatttaaaattgatagagaaaagaaactgtcgagcaagttatataacaactaacaacattgcactttctgtatatgaaatcaatatttaaataacttatttttctccattgctgttcttaaaaacattgtaagtagctgtaatataccagtaccaatatgttcttgcaattgcttcagcccaagaaagctgtgtattgttttaaaaattgtaaaaattattgtgatgattcatttagcataaagagaggtggacggaagggttttcctatgtatcaaaacttgtctataattatgtcatctatgtacctagaaaaaagtaaataaatttcttcagttgaatatgcc

SEQ ID NO: 4903 - protein, 1247 aa, Homo sapiens; identical to SEQ ID NO: 630

SEQ ID NO: 4904 - DNA, 5218 bp, Homo sapiens
tgttcattagacttctctgagaagctggtaatacaaaatattgaagcccgaatctacaattaaacttttattactgatttttaaaaaagataattagctgtaacattaatgtgtgttgtggggcacagggcggtcactcagtggcttttactagaaaaacaacagtgaatttgaatcaagttctgcaaatacagaaatcactaagatataagcagttccgtgaagtttgcaaccacctaaaaggataataaagttttcattctttataacatcagcattgttcctactgaaattaaaaagtgtggtcaaacacagtcactgaatcaaccgttttctttctgggcaaatgtggcatcttcattcactgagagaaaagggtcaccatgaattaacttgggcagttcgatgggaaagttaccagcgtttttggctaggatggggaagcggtgagtgagtaattctcttggcctgattggacaactgtaaacataaccttctccccccctcttctcagcgatttaaagctaaacaaaatgaaagtctgtttgaaaagcttgctgttggtgtcagagccgtgggatttcaaacctgggttttcaggatgcctgagtacatggatcctctaacacatatcccttcattatctctactgaatgtagctgatgttaggggaagttctgtgctggagacagggaatctcacagcactggactcatggagggtttttcttttgttttttaggctttttaaaaaaaatggttggtttttgcatgttaaggggattctagacctctggggtaggcagagttccagtggcctgtgaaagggaaaaatgagtgaagtttccttacgacatgactcatgtgtttttttctcatcatttctcgttttctactttcatcctgtccacgtatttgtgattcagagatgtcctgcaaacggggactgctgggttggtgcactgccggctggcttaagcataactgaagtttttctgccctaccctcttttccacagagaacctgcagttttggaggatttgacttgacgaatcgctctctgcacgttggcagtaataattctgacccaatgggtaaagaaggagactttgtgtacaaagaagtcatcaaatcacctactgcctctcgcatctctcttgggaaaaaggtgaaatcagtgaaagagacgatgagaaagagaatgtctaaaaaatacagcagctctgtctctgagcaggcggtcaaacagtgagcaccactgattcctcaaccagcaaccgggaaagcgtcaagtcggaagatggggatgacgaagagccgccttaccgaggcccgttctgcgggcgtgccagggtgcacaccgacttcacccccagtccctatgacacagactcactcaagctcaagaaaggagatatcatcgatataatcagcaagccacccatggggacctggatgggcctgctgaacaacaaagtcggcacgttcaagttcatctacgtggacgtgctcagtgaagacgaggagaaacccaaacgccccaccaggaggcgtcggaaaggacgaccaccccagcccaagtctgtggaggatctcctggatcggattaacctaaaagagcacatgcccactttcctgttcaatggatatgaagatttggacacctttaagctgctggaggaggaagacttggatgagttaaatatcagggacccggaacacagagctgttctcttgacagcagtggagctgttacaagagtatgacagtaacagcgaccagtcaggatcccaggagaagctgctcgttgacagccagggcctgagtggatgctcaccccgagactcaggatgctacgaaagcagtgagaacctggaaaacggcaagactcggaaagctagcctcctatctgccaagtcatccaccgagcccagcttgaagtcttttagcagaaaccagttgggcaattacccaacattgcctttaatgaaatcaggggatgcactgaagcagggacaggaggagggcaggctgggtggtggccttgccccagacacgtccaagagctgtgacccacctggtgtgactggtttgaataaaaaccgaagaagcctcccagtttccatctgccggagctgtgagaccctggagggcccccagactgtggacacttggccccgatcccattccctggatgaccttcaagtggagcctggtgctgagcaagacgtgcctaccgaggtgacagaaccgccccctcagattgtacctgaagtgccacagaagacgaccgcctcttccacgaaggcccagcccctggagcaagactctgctgtcgacaatgcattgctactgacccaaagcaagagattttctgaacctcagaaattgacaactaagaaactggagggctcaatcgcagcctctggtcgcggcctgtcaccccctcagtgtttgcccagaaactatgatgctcagcctcctggagctaaacacggtttagcaaggacgcctctggagggccacagaaaaggacacgagtttgaaggaacacaccatcccctgggcaccaaagaaggggtagatgctgagcagagaatgcagcccaaaattccatcacagcctccacctgttcctgccaaaaagagcagagaacgccttgctaacggactccaccctgttcccatgggccccagtggggccctccccagtcccgatgcgccatgcctgccagtgaaaaggggcagccccgccagccccaccagccctagcgactgtcccccagcactggctcccaggcctctctcagggcaggcgcctggcagcccaccaagcacaaggccgcccccctggctctcagagctccccgagaacacaagcctccaggagcacggtgtgaagctgggcccggctttgaccaggaaggtctcctgtgcccggggagtggatctagaaacgctcactgaaaacaagctgcacgctgaaggcatcgatctcacggaggagccgtattctgataagcatggccgctgtgggattcctgaagccctggtgcagagatacgcagaggacttggatcagcccgagcgggacgtcgccgccaacatggaccagatccgggtgaagcagcttcggaagcagcaccgcatggcgattccaagtggtggactcacggaaatctgccgaaagcccgtctctcctgggtgcatttcgtctgtgtcagattggctcatttccatcggtctgcccatgtacgccggcaccctctccaccgcgggcttcagcacactgagccaagtgccttctctgtctcacacttgccttcaggaggccggcatcacagaggagagacacataagaaagctcctatctgcagccagactcttcaaactgccgccaggccctgaggccatgtagccaggcccggaatgggcctctctggacaagagccaccctttcactgtgcatatgatgctgatgcaattcctccatcatctctggacgtgcagaccagatccagaagaaaggcctggcgtgtggccaaacagcgtgaaaccttggcacaggactgaggatcctctcctccagaaaagccccctcgaggaaataaattagtgcggttctctttgacccccaaagacaagacaagcacttatttttattttcagaagacaaaagaaccaagatgccaactggctgcgaatgctctatctccagtctgtctctgtgtactggtagaggctgggaggagtagggggcagcctgttccatttctgatagtgcccttgctcttctgtctgtcatcttgcaggatgcccgagggccagatgggcttagctaggccaaagtaacagactcaagagttattgtacattactgaccacgctcatttgttcaaaagttagaacatctggctgcaccaggaaaaaaaaaaaaaaaaagtcctgttcttctttagataaacaagagacattttcataattgctttctagcaatcagcttttatttgccttaatataagcttttaagcagttatctaactagtgtccacaaccctgtaaccatacttccacatcttcagcttaggcagacatcgaacctctctgggatgtttccagcaaaagtgagcttttctaatcgtctcattgtaacatggcttattttgtagaggtattcatcagccacacacttcatgttggtttttggtttttaagctaactacaaatctagtaaaaagctatctgaaattcacaaatatcatgtgtgtgcgtgcgtgcgtgcgcgtgtgtgtctgtattcatagtgactgcttttggttttaaccagtttagtatcgttactgtgtggatcgtcgcgctgcagtattgacttggaatcctgaccatgtccatcccaaaattcagtcctcagttaacggatcatgtttgcaaaaggtcactgtgaggctgcatatttcagaaagatgtccttaataagggaagtcatgtataagatgttttctaaaagacttttcagtattacaactaatactattattatccttctttttttatttagataattcttttaatttaaacaaaggttcactatggaaccagaaatgcagtcagctccagctagtactatttatgtacccagataactaagatattgtttcatggccttgccttagtcagaggcccttttctctgtcctgaacccccaggtatgggtgaaattggaaattactaatctattggaaatcagttcctgacatagtaaagtttgctttcataactgcagcaaaaaaggtcaacttgccaagtcactgctgccatgtgtgtactgtattattttcagaaaaaaatataatagtctgagtccaagttatcttgatttaaaattgatagagaaaagaaactgtcgagcaagttatataacaactaacaacattgcactttctgtatatgaaatcaatatttaaataacttatttttctccattgctgttcttaaaaacattgtaagtagctgtaatataccagtaccaatatgttcttgcaattgcttcagcccaagaaagctgtgtattgttttaaaaattgtaaaaattattgtgatgattcatttagcataaagagaggtggacggaagggttttcctatgtatcaaaacttgtctataattatgtcatctatgtacctagaaaaaagtaaataaatttcttcagttgaatatgcc

SEQ ID NO: 4905 - protein, 657 aa, Homo sapiens
MGTWMGLLNNKVGTFKFIYVDVLSEDEEKPKRPTRRRRKGRPPQPKSVEDLLDRINLKEHMPTFLFNGYEDLDTFKLLEEEDLDELNIRDPEHRAVLLTAVELLQEYDSNSDQSGSQEKLLVDSQGLSGCSPRDSGCYESSENLENGKTRKASLLSAKSSTEPSLKSFSRNQLGNYPTLPLMKSGDALKQGQEEGRLGGGLAPDTSKSCDPPGVTGLNKNRRSLPVSICRSCETLEGPQTVDTWPRSHSLDDLQVEPGAEQDVPTEVTEPPPQIVPEVPQKTTASSTKAQPLEQDSAVDNALLLTQSKRFSEPQKLTTKKLEGSIAASGRGLSPPQCLPRNYDAQPPGAKHGLARTPLEGHRKGHEFEGTHHPLGTKEGVDAEQRMQPKIPSQPPPVPAKKSRERLANGLHPVPMGPSGALPSPDAPCLPVKRGSPASPTSPSDCPPALAPRPLSGQAPGSPPSTRPPPWLSELPENTSLQEHGVKLGPALTRKVSCARGVDLETLTENKLHAEGIDLTEEPYSDKHGRCGIPEALVQRYAEDLDQPERDVAANMDQIRVKQLRKQHRMAIPSGGLTEICRKPVSPGCISSVSDWLISIGLPMYAGTLSTAGFSTLSQVPSLSHTCLQEAGITEERHIRKLLSAARLFKLPPGPEAM

SEQ ID NO: 4906 - DNA, 1170 bp, Homo sapiens
gcggcgtcacagagcgcatgcgtgccgcgggggatgccgggagcgcgcagtggcggcagcggcggcgacggcagtaacagcggcagctacagcggggacgcgagcggggcggtgacggtgtgggaggtggtctcactcttgggaaaactgctgggcaccgtcgtcgcgctgaaggtggttctgtacctgctccgagtgtgcttagcgatggcctggaaatccggcggcgccagccactcggagctaatccacaatctccgcaaaaatggaatcatcaagacagataaagtatttgaagtgatgctggctacagaccgctcccactatgcaaaatgtaacccatacatggattctccacaatcaataggtttccaagcaacaatcagtgctccacacatgcatgcatatgcgctagaacttctatttgatcagttgcatgaaggagctaaagctcttgatgtaggatctggaagtggaatccttactgcatgttttgcacgtatggttggatgtactggaaaagtcataggaattgatcacattaaagagctagtagatgactcagtaaataatgtcaggaaggacgatccaacacttctgtcttcagggagagtacagcttgttgtgggggatggaagaatgggatatgctgaagaagccccttatgatgccattcatgtgggagctgcagcccctgttgtaccccaggcgctaatagatcagttaaagcccggaggaagattgatattgcctgttggtcctgcaggcggaaaccaaatgttggagcagtatgacaagctacaagatggcagcatcaaaatgaagcctctgatgggggtgatatacgtgcctttaacagataaagaaaagcagtggtccagggatgaattgtaaaagcaacatcagcttgaccagtataaaattacagtggattgctcatctcagtcctcaaagctttttgaaaaccaacaccatcacagcttgttttggactttgttacactgttattttcagcatgaaaatgtgtgtttttttagggtttctgattcttcaaagaggcacagagccaaattggtagaggaaggatgcaaagtataaatttgtgtaatattactttaacatgcccatattttacttggaaatattaaaagaaagggttctgtaaaatgg

SEQ ID NO: 4907 - protein, 286 aa, Homo sapiens
MPGARSGGSGGDGSNSGSYSGDASGAVTVWEVVSLLGKLLGTVVALKVVLYLLRVCLAMAWKSGGASHSELIHNLRKNGIIKTDKVFEVMLATDRSHYAKCNPYMDSPQSIGFQATISAPHMHAYALELLFDQLHEGAKALDVGSGSGILTACFARMVGCTGKVIGIDHIKELVDDSVNNVRKDDPTLLSSGRVQLVVGDGRMGYAEEAPYDAIHVGAAAPVVPQALIDQLKPGGRLILPVGPAGGNQMLEQYDKLQDGSIKMKPLMGVIYVPLTDKEKQWSRDEL

SEQ ID NO: 4908 - DNA, 1687 bp, Homo sapiens
gcggcgtcacagagcgcatgcgtgccgcgggggatgccgggagcgcgcagtggcggcagcggcggcgacggcagtaacagcggcagctacagcggggacgcgagcggggcggtgacggtgtgggaggtggtctcactcttgggaaaactgctgggcaccgtcgtcgcgctgaaggtggttctgtacctgctccgagtgtgcttagcgatggcctggaaatccggcggcgccagccactcggagctaatccacaatctccgcaaaaatggaatcatcaagacagataaagtatttgaagtgatgctggctacagaccgctcccactatgcaaaatgtaacccatacatggattctccacaatcaataggtttccaagcaacaatcagtgctccacacatgcatgcatatgcgctagaacttctatttgatcagttgcatgaaggagctaaagctcttgatgtaggatctggaagtggaatccttactgcatgttttgcacgtatggttggatgtactggaaaagtcataggaattgatcacattaaagagctagtagatgactcagtaaataatgtcaggaaggacgatccaacacttctgtcttcagggagagtacagcttgttgtgggggatggaagaatgggatatgctgaagaagccccttatgatgccattcatgtgggagctgcagcccctgttgtaccccaggcgctaatagatcagttaaagcccggaggaagattgatattgcctgttggtcctgcaggcggaaaccaaatgttggagcagtatgacaagctacaagatggcagcatcaaaatgaagcctctgatgggggtgatatacgtgcctttaacagataaagaaaagcagtggtccagggatgaattgtaaaagcaacatcagcttgaccagtataaaattacagtggattgctcatctcagtcctcaaagctttttgaaaaccaacaccatcacagcttgttttggactttgttacactgttattttcagcatgaaaatgtgtgtttttttagggtttctgattcttcaaagaggcacagagccaaattggtagaggaaggatgcaaagtataaatttgtgtaatattactttaacatgcccatattttacttggaaatattaaaagaaagggttctgtaaaatggaaaacttagtttgtgaattgattttgaggagtggtttttcttttcttggacacttaattctgttctgatattaatttatcagattgcttttgtgcattggataacaccaccattcacaagttaagattcttggtatttggatatctgttagatgctactaagaaaatagagatgagctttctttttaaagcttttgatgtggtgtcatagaatagcatgttgtagatacaatcagctgctttgttaccttaaaactaggcatttgtaaatattaaaccataagatggcaggtgatgtcctgtaaacactcagctgttcagattggacataactgacttagttcttcccttctctctctctcaaaattataggagacttgtagtttagtgtggttttctgtttctaatttgctgctgataatgtatatgaacttaacatgctgtgtaagctgtgtcctagttcttgaacagtttatgcagtgctgctttgccaaataaagttaaaagtaaaagaggca

SEQ ID NO: 4909 - protein, 286 aa, Homo sapiens; identical to SEQ ID NO: 4907

SEQ ID NO: 4910 - DNA, 1612 bp, Homo sapiens
atgcgtgccgcgggggatgccgggagcgcgcagtggcggcagcggcggcgacggcagtaacagcggcagctacagcggggacgcgagcggggcggtgacggtgtgggaggtggtctcactcttgggaaaactgctgggcaccgtcgtcgcgctgaaggtggttctgtacctgctccgagtgtgcttagcgatggcctggaaatccggcggcgccagccactcggagctaatccacaatctccgcaaaaatggaatcatcaagacagataaagtatttgaagtgatgctggctacagaccgctcccactatgcaaaatgtaacccatacatggattctccacaatcaataggtttccaagcaacaatcagtgctccacacatggttggatgtactggaaaagtcataggaattgatcacattaaagagctagtagatgactcagtaaataatgtcaggaaggacgatccaacacttctgtcttcagggagagtacagcttgttgtgggggatggaagaatgggatatgctgaagaagccccttatgatgccattcatgtgggagctgcagcccctgttgtaccccaggcgctaatagatcagttaaagcccggaggaagattgatattgcctgttggtcctgcaggcggaaaccaaatgttggagcagtatgacaagctacaagatggcagcatcaaaatgaagcctctgatgggggtgatatacgtgcctttaacagataaagaaaagcagtggtccaggtggaagtgattttatcttctgctctttcttcttccacacatgcaagggatgaattgtaaaagcaacatcagcttgaccagtataaaattacagtggattgctcatctcagtcctcaaagctttttgaaaaccaacaccatcacagcttgttttggactttgttacactgttattttcagcatgaaaatgtgtgtttttttagggtttctgattcttcaaagaggcacagagccaaattggtagaggaaggatgcaaagtataaatttgtgtaatattactttaacatgcccatattttacttggaaatattaaaagaaagggttctgtaaaatggaaaacttagtttgtgaattgattttgaggagtggtttttcttttcttggacacttaattctgttctgatattaatttatcagattgcttttgtgcattggataacaccaccattcacaagttaagattcttggtatttggatatctgttagatgctactaagaaaatagagatgagctttctttttaaagcttttgatgtggtgtcatagaatagcatgttgtagatacaatcagctgctttgttaccttaaaactaggcatttgtaaatattaaaccataagatggcaggtgatgtcctgtaaacactcagctgttcagattggacataactgacttagttcttcccttctctctctctcaaaattataggagacttgtagtttagtgtggttttctgtttctaatttgctgctgataatgtatatgaacttaacatgctgtgtaagctgtgtcctagttcttgaacagtttatgcagtgctgctttgccaaataaagttaaaagtaaaagaggca

SEQ ID NO: 4911 - protein, 250 aa, Homo sapiens
MPGARSGGSGGDGSNSGSYSGDASGAVTVWEVVSLLGKLLGTVVALKVVLYLLRVCLAMAWKSGGASHSELIHNLRKNGIIKTDKVFEVMLATDRSHYAKCNPYMDSPQSIGFQATISAPHMVGCTGKVIGIDHIKELVDDSVNNVRKDDPTLLSSGRVQLVVGDGRMGYAEEAPYDAIHVGAAAPVVPQALIDQLKPGGRLILPVGPAGGNQMLEQYDKLQDGSIKMKPLMGVIYVPLTDKEKQWSRWK

SEQ ID NO: 4912 - DNA, 1565 bp, Homo sapiens
atgcgtgccgcgggggatgccgggagcgcgcagtggcggcagcggcggcgacggcagtaacagcggcagctacagcggggacgcgagcggggcggtgacggtgtgggaggtggtctcactcttgggaaaactgctgggcaccgtcgtcgcgctgaaggtggttctgtacctgctccgagtgtgcttagcgatggcctggaaatccggcggcgccagccactcggagctaatccacaatctccgcaaaaatggaatcatcaagacagataaagtatttgaagtgatgctggctacagaccgctcccactatgcaaaatgtaacccatacatggattctccacaatcaataggtttccaagcaacaatcagtgctccacacatggttggatgtactggaaaagtcataggaattgatcacattaaagagctagtagatgactcagtaaataatgtcaggaaggacgatccaacacttctgtcttcagggagagtacagcttgttgtgggggatggaagaatgggatatgctgaagaagccccttatgatgccattcatgtgggagctgcagcccctgttgtaccccaggcgctaatagatcagttaaagcccggaggaagattgatattgcctgttggtcctgcaggcggaaaccaaatgttggagcagtatgacaagctacaagatggcagcatcaaaatgaagcctctgatgggggtgatatacgtgcctttaacagataaagaaaagcagtggtccagggatgaattgtaaaagcaacatcagcttgaccagtataaaattacagtggattgctcatctcagtcctcaaagctttttgaaaaccaacaccatcacagcttgttttggactttgttacactgttattttcagcatgaaaatgtgtgtttttttagggtttctgattcttcaaagaggcacagagccaaattggtagaggaaggatgcaaagtataaatttgtgtaatattactttaacatgcccatattttacttggaaatattaaaagaaagggttctgtaaaatggaaaacttagtttgtgaattgattttgaggagtggtttttcttttcttggacacttaattctgttctgatattaatttatcagattgcttttgtgcattggataacaccaccattcacaagttaagattcttggtatttggatatctgttagatgctactaagaaaatagagatgagctttctttttaaagcttttgatgtggtgtcatagaatagcatgttgtagatacaatcagctgctttgttaccttaaaactaggcatttgtaaatattaaaccataagatggcaggtgatgtcctgtaaacactcagctgttcagattggacataactgacttagttcttcccttctctctctctcaaaattataggagacttgtagtttagtgtggttttctgtttctaatttgctgctgataatgtatatgaacttaacatgctgtgtaagctgtgtcctagttcttgaacagtttatgcagtgctgctttgccaaataaagttaaaagtaaaagaggca

SEQ ID NO: 4913 - protein, 251 aa, Homo sapiens
MPGARSGGSGGDGSNSGSYSGDASGAVTVWEVVSLLGKLLGTVVALKVVLYLLRVCLAMAWKSGGASHSELIHNLRKNGIIKTDKVFEVMLATDRSHYAKCNPYMDSPQSIGFQATISAPHMVGCTGKVIGIDHIKELVDDSVNNVRKDDPTLLSSGRVQLVVGDGRMGYAEEAPYDAIHVGAAAPVVPQALIDQLKPGGRLILPVGPAGGNQMLEQYDKLQDGSIKMKPLMGVIYVPLTDKEKQWSRDEL

SEQ ID NO: 4914 - DNA, 1022 bp, Homo sapiens
gtgccgcgggggatgccgggagcgcgcagtggcggcagcggcggcgacggcagtaacagcggcagctacagcggggacgcgagcggggcggtgacggtgtgggaggtggtctcactcttgggaaaactgctgggcaccgtcgtcgcgctgaaggtggttctgtacctgctccgagtgtgcttagcgatggcctggaaatccggcggcgccagccactcggagctaatccacaatctccgcaaaaatggaatcatcaagacagataaagtatttgaagtgatgctggctacagaccgctcccactatgcaaaatgtaacccatacatggattctccacaatcaataggtttccaagcaacaatcagtgctccacacatgcatgcatatgcgctagaacttctatttgatcagttgcatgaaggagctaaagctcttgatgtaggatctggaagtggaatccttactgcatgttttgcacgtatggttggatgtactggaaaagtcataggaattgatcacattaaagagctagtagatgactcagtaaataatgtcaggaaggacgatccaacacttctgtcttcagggagagtacagcttgttgtgggggatggaagaatgggatatgctgaagaagccccttatgatgccattcatgtgggagctgcagcccctgttgtaccccaggcgctaatagatcagttaaagcccggaggaagattgatattgcctgttggtcctgcaggcggaaaccaaatgttggagcagtatgacaagctacaagatggcagcatcaaaatgaagcctctgatgggggtgatatacgtgcctttaacagataaagaaaagcagtggtccaggtggaagtgattttatcttctgctctttcttcttccacacatgcaaggtgaaagggtgtggattttaagacattagactacaagagctgtttttggttgtcacctttatgctcctccattataacgtcagaaattcattacattaaaaatgtgaaaaatgtt

SEQ ID NO: 4915 - protein, 285 aa, Homo sapiens
MPGARSGGSGGDGSNSGSYSGDASGAVTVWEVVSLLGKLLGTVVALKVVLYLLRVCLAMAWKSGGASHSELIHNLRKNGIIKTDKVFEVMLATDRSHYAKCNPYMDSPQSIGFQATISAPHMHAYALELLFDQLHEGAKALDVGSGSGILTACFARMVGCTGKVIGIDHIKELVDDSVNNVRKDDPTLLSSGRVQLVVGDGRMGYAEEAPYDAIHVGAAAPVVPQALIDQLKPGGRLILPVGPAGGNQMLEQYDKLQDGSIKMKPLMGVIYVPLTDKEKQWSRWK

SEQ ID NO: 4916 - DNA, 1129 bp, Homo sapiens
gtgccgcgggggatgccgggagcgcgcagtggcggcagcggcggcgacggcagtaacagcggcagctacagcggggacgcgagcggggcggtgacggtgtgggaggtggtctcactcttgggaaaactgctgggcaccgtcgtcgcgctgaaggtggttctgtacctgctccgagtgtgcttagcgatggcctggaaatccggcggcgccagccactcggagctaatccacaatctccgcaaaaatggaatcatcaagacagataaagtatttgaagtgatgctggctacagaccgctcccactatgcaaaatgtaacccatacatggattctccacaatcaataggtttccaagcaacaatcagtgctccacacatgcatgcatatgcgctagaacttctatttgatcagttgcatgaaggagctaaagctcttgatgtaggatctggaagtggaatccttactgcatgttttgcacgtatggttggatgtactggaaaagtcataggaattgatcacattaaagagctagtagatgactcagtaaataatgtcaggaaggacgatccaacacttctgtcttcagggagagtacagcttgttgtgggggatggaagaatgggatatgctgaagaagccccttatgatgccattcatgtgggagctgcagcccctgttgtaccccaggcgctaatagatcagttaaagcccggaggaagattgatattgcctgttggtcctgcaggcggaaaccaaatgttggagcagtatgacaagctacaagatggcagcatcaaaatgaagcctctgatgggggtgatatacgtgcctttaacagataaagaaaagcagtggtccaggtggaagtgattttatcttctgctctttcttcttccacacatgcaaggtgaaagggtgtggattttaagacattagactacaagagctgtttttggttgtcacctttatgctcctccattataacgtcagaaattcattacattaaaaatgtgaaaaatgttgcatggtctgcccttattttggtttaacatatatatctttgggaaagggagggtgagacttggttggcacaaaggctttttttgtttgtttgtttgtttttttttta

SEQ ID NO: 4917 - protein, 285 aa, Homo sapiens; identical to SEQ ID NO: 4915

SEQ ID NO: 4918 - DNA, 1196 bp, Homo sapiens
gtgccgcgggggatgccgggagcgcgcagtggcggcagcggcggcgacggcagtaacagcggcagctacagcggggacgcgagcggggcggtgacggtgtgggaggtggtctcactcttgggaaaactgctgggcaccgtcgtcgcgctgaaggtggttctgtacctgctccgagtgtgcttagcgatggcctggaaatccggcggcgccagccactcggagctaatccacaatctccgcaaaaatggaatcatcaagacagataaagtatttgaagtgatgctggctacagaccgctcccactatgcaaaatgtaacccatacatggattctccacaatcaataggtttccaagcaacaatcagtgctccacacatgcatgcatatgcgctagaacttctatttgatcagttgcatgaaggagctaaagctcttgatgtaggatctggaagtggaatccttactgcatgttttgcacgtatggttggatgtactggaaaagtcataggaattgatcacattaaagagctagtagatgactcagtaaataatgtcaggaaggacgatccaacacttctgtcttcagggagagtacagcttgttgtgggggatggaagaatgggatatgctgaagaagccccttatgatgccattcatgtgggagctgcagcccctgttgtaccccaggcgctaatagatcagttaaagcccggaggaagattgatattgcctgttggtcctgcaggcggaaaccaaatgttggagcagtatgacaagctacaagatggcagcatcaaaatgaagcctctgatgggggtgatatacgtgcctttaacagataaagaaaagcagtggtccaggtggaagtgattttatcttctgctctttcttcttccacacatgcaagggatgaattgtaaaagcaacatcagcttgaccagtataaaattacagtggattgctcatctcagtcctcaaagctttttgaaaaccaacaccatcacagcttgttttggactttgttacactgttattttcagcatgaaaatgtgtgtttttttagggtttctgattcttcaaagaggcacagagccaaattggtagaggaaggatgcaaagtataaatttgtgtaatattactttaacatgcccatattttacttggaaatattaaaagaaagggttctgtaaaatgg

SEQ ID NO: 4919 - protein, 285 aa, Homo sapiens; identical to SEQ ID NO: 4915

SEQ ID NO: 4920 - DNA, 1713 bp, Homo sapiens
gtgccgcgggggatgccgggagcgcgcagtggcggcagcggcggcgacggcagtaacagcggcagctacagcggggacgcgagcggggcggtgacggtgtgggaggtggtctcactcttgggaaaactgctgggcaccgtcgtcgcgctgaaggtggttctgtacctgctccgagtgtgcttagcgatggcctggaaatccggcggcgccagccactcggagctaatccacaatctccgcaaaaatggaatcatcaagacagataaagtatttgaagtgatgctggctacagaccgctcccactatgcaaaatgtaacccatacatggattctccacaatcaataggtttccaagcaacaatcagtgctccacacatgcatgcatatgcgctagaacttctatttgatcagttgcatgaaggagctaaagctcttgatgtaggatctggaagtggaatccttactgcatgttttgcacgtatggttggatgtactggaaaagtcataggaattgatcacattaaagagctagtagatgactcagtaaataatgtcaggaaggacgatccaacacttctgtcttcagggagagtacagcttgttgtgggggatggaagaatgggatatgctgaagaagccccttatgatgccattcatgtgggagctgcagcccctgttgtaccccaggcgctaatagatcagttaaagcccggaggaagattgatattgcctgttggtcctgcaggcggaaaccaaatgttggagcagtatgacaagctacaagatggcagcatcaaaatgaagcctctgatgggggtgatatacgtgcctttaacagataaagaaaagcagtggtccaggtggaagtgattttatcttctgctctttcttcttccacacatgcaagggatgaattgtaaaagcaacatcagcttgaccagtataaaattacagtggattgctcatctcagtcctcaaagctttttgaaaaccaacaccatcacagcttgttttggactttgttacactgttattttcagcatgaaaatgtgtgtttttttagggtttctgattcttcaaagaggcacagagccaaattggtagaggaaggatgcaaagtataaatttgtgtaatattactttaacatgcccatattttacttggaaatattaaaagaaagggttctgtaaaatggaaaacttagtttgtgaattgattttgaggagtggtttttcttttcttggacacttaattctgttctgatattaatttatcagattgcttttgtgcattggataacaccaccattcacaagttaagattcttggtatttggatatctgttagatgctactaagaaaatagagatgagctttctttttaaagcttttgatgtggtgtcatagaatagcatgttgtagatacaatcagctgctttgttaccttaaaactaggcatttgtaaatattaaaccataagatggcaggtgatgtcctgtaaacactcagctgttcagattggacataactgacttagttcttcccttctctctctctcaaaattataggagacttgtagtttagtgtggttttctgtttctaatttgctgctgataatgtatatgaacttaacatgctgtgtaagctgtgtcctagttcttgaacagtttatgcagtgctgctttgccaaataaagttaaaagtaaaagaggca

SEQ ID NO: 4921 - protein, 285 aa, Homo sapiens; identical to SEQ ID NO: 4915

SEQ ID NO: 4922 - DNA, 1347 bp, Homo sapiens
gcgggggatgccgggagcgcgcagtggcggcagcggcggcgacggcagtaacagcggcagctacagcggggacgcgagcggggcggtgacggtgtgggaggtggtctcactcttgggaaaactgctgggcaccgtcgtcgcgctgaaggtggttctgtacctgctccgagtgtgcttagcgatggcctggaaatccggcggcgccagccactcggagctaatccacaatctccgcaaaaatggaatcatcaagacagataaagtatttgaagtgatgctggctacagaccgctcccactatgcaaaatgtaacccatacatggattctccacaatcaatagcaggttttgctgaactgctgagccttggcagtgggcgcctttgaggcttagaagtgcctcaggattctgtcagtcggctgccatgctatcttcttttgacgcactataacagtcagcagagaagatcctggggagcttctgaaccccgaaggcacctgctaccaccgctcagtgaaacttgcttcagaggcagaaagaagcaggtttccaagcaacaatcagtgctccacacatgcatgcatatgcgctagaacttctatttgatcagttgcatgaaggagctaaagctcttgatgtaggatctggaagtggaatccttactgcatgttttgcacgtatggttggatgtactggaaaagtcataggaattgatcacattaaagagctagtagatgactcagtaaataatgtcaggaaggacgatccaacacttctgtcttcagggagagtacagcttgttgtgggggatggaagaatgggatatgctgaagaagccccttatgatgccattcatgtgggagctgcagcccctgttgtaccccaggcgctaatagatcagttaaagcccggaggaagattgatattgcctgttggtcctgcaggcggaaaccaaatgttggagcagtatgacaagctacaagatggcagcatcaaaatgaagcctctgatgggggtgatatacgtgcctttaacagataaagaaaagcagtggtccagggatgaattgtaaaagcaacatcagcttgaccagtataaaattacagtggattgctcatctcagtcctcaaagctttttgaaaaccaacaccatcacagcttgttttggactttgttacactgttattttcagcatgaaaatgtgtgtttttttagggtttctgattcttcaaagaggcacagagccaaattggtagaggaaggatgcaaagtataaatttgtgtaatattactttaacatgcccatattttacttggaaatattaaaagaaagggttctgtaaaatgg

SEQ ID NO: 4923 - protein, 165 aa, Homo sapiens
MHAYALELLFDQLHEGAKALDVGSGSGILTACFARMVGCTGKVIGIDHIKELVDDSVNNVRKDDPTLLSSGRVQLVVGDGRMGYAEEAPYDAIHVGAAAPVVPQALIDQLKPGGRLILPVGPAGGNQMLEQYDKLQDGSIKMKPLMGVIYVPLTDKEKQWSRDEL

SEQ ID NO: 4924 - DNA, 1864 bp, Homo sapiens
gcgggggatgccgggagcgcgcagtggcggcagcggcggcgacggcagtaacagcggcagctacagcggggacgcgagcggggcggtgacggtgtgggaggtggtctcactcttgggaaaactgctgggcaccgtcgtcgcgctgaaggtggttctgtacctgctccgagtgtgcttagcgatggcctggaaatccggcggcgccagccactcggagctaatccacaatctccgcaaaaatggaatcatcaagacagataaagtatttgaagtgatgctggctacagaccgctcccactatgcaaaatgtaacccatacatggattctccacaatcaatagcaggttttgctgaactgctgagccttggcagtgggcgcctttgaggcttagaagtgcctcaggattctgtcagtcggctgccatgctatcttcttttgacgcactataacagtcagcagagaagatcctggggagcttctgaaccccgaaggcacctgctaccaccgctcagtgaaacttgcttcagaggcagaaagaagcaggtttccaagcaacaatcagtgctccacacatgcatgcatatgcgctagaacttctatttgatcagttgcatgaaggagctaaagctcttgatgtaggatctggaagtggaatccttactgcatgttttgcacgtatggttggatgtactggaaaagtcataggaattgatcacattaaagagctagtagatgactcagtaaataatgtcaggaaggacgatccaacacttctgtcttcagggagagtacagcttgttgtgggggatggaagaatgggatatgctgaagaagccccttatgatgccattcatgtgggagctgcagcccctgttgtaccccaggcgctaatagatcagttaaagcccggaggaagattgatattgcctgttggtcctgcaggcggaaaccaaatgttggagcagtatgacaagctacaagatggcagcatcaaaatgaagcctctgatgggggtgatatacgtgcctttaacagataaagaaaagcagtggtccagggatgaattgtaaaagcaacatcagcttgaccagtataaaattacagtggattgctcatctcagtcctcaaagctttttgaaaaccaacaccatcacagcttgttttggactttgttacactgttattttcagcatgaaaatgtgtgtttttttagggtttctgattcttcaaagaggcacagagccaaattggtagaggaaggatgcaaagtataaatttgtgtaatattactttaacatgcccatattttacttggaaatattaaaagaaagggttctgtaaaatggaaaacttagtttgtgaattgattttgaggagtggtttttcttttcttggacacttaattctgttctgatattaatttatcagattgcttttgtgcattggataacaccaccattcacaagttaagattcttggtatttggatatctgttagatgctactaagaaaatagagatgagctttctttttaaagcttttgatgtggtgtcatagaatagcatgttgtagatacaatcagctgctttgttaccttaaaactaggcatttgtaaatattaaaccataagatggcaggtgatgtcctgtaaacactcagctgttcagattggacataactgacttagttcttcccttctctctctctcaaaattataggagacttgtagtttagtgtggttttctgtttctaatttgctgctgataatgtatatgaacttaacatgctgtgtaagctgtgtcctagttcttgaacagtttatgcagtgctgctttgccaaataaagttaaaagtaaaagaggca

SEQ ID NO: 4925 - protein, 165 aa, Homo sapiens; identical to SEQ ID NO: 4923

SEQ ID NO: 4926 - DNA, 855 bp, Homo sapiens
gggatgccgggagcgcgcagtggcggcagcggcggcgacggcagtaacagcggcagctacagcggggacgcgagcggggcggtgacggtgtgggaggtggtctcactcttgggaaaactgctgggcaccgtcgtcgcgctgaaggtggttctgtacctgctccgagtgtgcttagcgatggcctggaaatccggcggcgccagccactcggagctaatccacaatctccgcaaaaatggaatcatcaagacagataaagtatttgaagtgatgctggctacagaccgctcccactatgcaaaatgtaacccatacatggattctccacaatcaataggtttccaagcaacaatcagtgctccacacatgcatgcatatgcgctagaacttctatttgatcagttgcatgaaggagctaaagctcttgatgtaggatctggaagtggaatccttactgcatgttttgcacgtatggttggatgtactggaaaagtcataggaattgatcacattaaagagctagtagatgactcagtaaataatgtcaggaagattgatattgcctgttggtcctgcaggcggaaaccaaatgttggagcagtatgacaagctacaagatggcagcatcaaaatgaagcctctgatgggggtgatatacgtgcctttaacagataaagaaaagcagtggtccaggtggaagtgattttatcttctgctctttcttcttccacacatgcaaggtgaaagggtgtggattttaagacattagactacaagagctgtttttggttgtcacctttatgctcctccattataacgtcagaaattcattacattaaaaatgtgaaaaatgtt

SEQ ID NO: 4927 - protein, 200 aa, Homo sapiens
MPGARSGGSGGDGSNSGSYSGDASGAVTVWEVVSLLGKLLGTVVALKVVLYLLRVCLAMAWKSGGASHSELIHNLRKNGIIKTDKVFEVMLATDRSHYAKCNPYMDSPQSIGFQATISAPHMHAYALELLFDQLHEGAKALDVGSGSGILTACFARMVGCTGKVIGIDHIKELVDDSVNNVRKIDIACWSCRRKPNVGAV

SEQ ID NO: 4928 - DNA, 962 bp, Homo sapiens
gggatgccgggagcgcgcagtggcggcagcggcggcgacggcagtaacagcggcagctacagcggggacgcgagcggggcggtgacggtgtgggaggtggtctcactcttgggaaaactgctgggcaccgtcgtcgcgctgaaggtggttctgtacctgctccgagtgtgcttagcgatggcctggaaatccggcggcgccagccactcggagctaatccacaatctccgcaaaaatggaatcatcaagacagataaagtatttgaagtgatgctggctacagaccgctcccactatgcaaaatgtaacccatacatggattctccacaatcaataggtttccaagcaacaatcagtgctccacacatgcatgcatatgcgctagaacttctatttgatcagttgcatgaaggagctaaagctcttgatgtaggatctggaagtggaatccttactgcatgttttgcacgtatggttggatgtactggaaaagtcataggaattgatcacattaaagagctagtagatgactcagtaaataatgtcaggaagattgatattgcctgttggtcctgcaggcggaaaccaaatgttggagcagtatgacaagctacaagatggcagcatcaaaatgaagcctctgatgggggtgatatacgtgcctttaacagataaagaaaagcagtggtccaggtggaagtgattttatcttctgctctttcttcttccacacatgcaaggtgaaagggtgtggattttaagacattagactacaagagctgtttttggttgtcacctttatgctcctccattataacgtcagaaattcattacattaaaaatgtgaaaaatgttgcatggtctgcccttattttggtttaacatatatatctttgggaaagggagggtgagacttggttggcacaaaggctttttttgtttgtttgtttgtttttttttta

SEQ ID NO: 4929 - protein, 200 aa, Homo sapiens; identical to SEQ ID NO: 4927

SEQ ID NO: 4930 - DNA, 574 bp, Homo sapiens
agtttgatgttttttaaatagcagaatatgtaaggctgtatttggtgtatgggagatatgagaaagtatttgccatacattatattctcacaaagcttgtattctagaagagatatgtcatatatgtaactgggaaattagcgatatgataacatataattaacacaggatatctattggaaggaaaataaaatatgcatatgagggagagaattgtgcagtgagtggtcaaggagacatcacacacggatggaacttgaactgaatcttaaagaatagtaggatatatggccgggcatggtggctcacgcctgtaatcccagcactttgggaggctaaggcagatgaatcacttgcgctcagaagttcgagaccagcctgggcaacatggcaaaactccatctctacaaaaaatacaaaaaattagatgtggcaggcacttgtagtcccagctactcaagaggctgaggtgggaggatagcttggattgcgtgagcctgacaggttgaggctgcagtgagccatgcttgtactactgcattccagcctgggtgacaaagtgagaccctgtctc

SEQ ID NO: 4931 - protein, 33 aa, Homo sapiens
MNHLRSEVRDQPGQHGKTPSLQKIQKIRCGRHL

SEQ ID NO: 4932 - DNA, 373 bp, Homo sapiens
cagttgctggtacagtgctgcacctggctgagtgaatggtttcttttggagctgataaagctgccttatgaaatcagctgacagggatgaattgtaaaagcaacatcagcttgaccagtataaaattacagtggattgctcatctcagtcctcaaagctttttgaaaaccaacaccatcacagcttgttttggactttgttacactgttattttcagcatgaaaatgtgtgtttttttagggtttctgattcttcaaagaggcacagagccaaattggtagaggaaggatgcaaagtataaatttgtgtaatattactttaacatgcccatattttacttggaaatattaaaagaaagggttctgtaaaatgg

SEQ ID NO: 4933 - protein, 64 aa, Homo sapiens
MNCKSNISLTSIKLQWIAHLSPQSFLKTNTITACFGLCYTVIFSMKMCVFLGFLILQRGTEPNW

SEQ ID NO: 4934 - DNA, 890 bp, Homo sapiens
cagttgctggtacagtgctgcacctggctgagtgaatggtttcttttggagctgataaagctgccttatgaaatcagctgacagggatgaattgtaaaagcaacatcagcttgaccagtataaaattacagtggattgctcatctcagtcctcaaagctttttgaaaaccaacaccatcacagcttgttttggactttgttacactgttattttcagcatgaaaatgtgtgtttttttagggtttctgattcttcaaagaggcacagagccaaattggtagaggaaggatgcaaagtataaatttgtgtaatattactttaacatgcccatattttacttggaaatattaaaagaaagggttctgtaaaatggaaaacttagtttgtgaattgattttgaggagtggtttttcttttcttggacacttaattctgttctgatattaatttatcagattgcttttgtgcattggataacaccaccattcacaagttaagattcttggtatttggatatctgttagatgctactaagaaaatagagatgagctttctttttaaagcttttgatgtggtgtcatagaatagcatgttgtagatacaatcagctgctttgttaccttaaaactaggcatttgtaaatattaaaccataagatggcaggtgatgtcctgtaaacactcagctgttcagattggacataactgacttagttcttcccttctctctctctcaaaattataggagacttgtagtttagtgtggttttctgtttctaatttgctgctgataatgtatatgaacttaacatgctgtgtaagctgtgtcctagttcttgaacagtttatgcagtgctgctttgccaaataaagttaaaagtaaaagaggca

SEQ ID NO: 4935 - protein, 64 aa, Homo sapiens; identical to SEQ ID NO: 4933

SEQ ID NO: 4936 - DNA, 681 bp, Homo sapiens
ggtgtgagccaccacacccggtcgagggtttcaactcttttccagtcaataacattagaagaaaatgacattctgggaggaaaataatccattaacattgttcatgcaagtgttttaaattccactgccctaattttaaatactgccattgttcaaaaaaagttcactgtgcagtggtgcgatctcggctcactgcaacctctacctcccgggttcaagtgattctcctgcctcagccttccacgtcaccatgcccagctaattttttgtatttttagtagatacagggtttcactgggttagccaagatggtctccatctcctgaccctgggatctgcctgccttggcctcccaaagtgttgggattacaggcgtgagccaccgtccctggcccactgaacttttaaaattggtatataatgtacctctattaaaagcatctctatgtgtgggtcaaaggaaaatctagtaaagggccatgtgaacagccatcagtaactgaagagaggtgttgctgagtggcactgagttgtggggccagaacacaggttttgaagtcattgggagcaagatgaaaaaaatcctgttattttcctatggaagagaatgtattgggtactcagctgatttgaaacagtaaaatgctgtggaaggctggaggagtagctgctatctactaa

SEQ ID NO: 4937 - protein, 47 aa, Homo sapiens [sequence omitted]

SEQ ID NO: 4938 - DNA, 3644 bp, Homo sapiens
ttaataataaaatacaatttattaaaggaatcatgtttacatagatacagaacatcttggatatttcaacaccatagcaacacaaaattaatttcttcatgtataaaagatgtgctgaaagctgcatgcctcatcagtttttattttattggttatggctatagttgacatctttccatataaaaacaaactgcacagcatcacatatagagtacagacatcttaagttcattcacaaagttaatttttctaaactgcccttcaaaaatttacatctttgctcaattctaaacattcaacaaaattagcttcccaagaaacaaaaatgatacccaatttctttgcttttctagaagtaactttccatttgttcatgtattttgatatgttatattccccacccgaattaaaccctttgttaaaagaacaacctactttaggttcagtctaaaaataaagcgtactagattctggagtgtttttcaaatattttaaaatatttgccacttatggttaaaaaaaacgtgaataagaatatcatgtgagtgtagataggcaccatactatacactcctctcagaatcatttctagaatgtgtataatcccggcgttaagtgatggtgggaatgatttgcctttaaaagcctacaaattaaaaggggaaagatgctaagctagatgctggttttctgtaaagatgaatttgtgaaaaactgctttatggtctagaaatacgtaagcctggcattagctgatggcacattctaacattttatagcattaaaaaacatcgactcattccattggatgaaagccatggtgacatttttacaaaagctgtacccaggaatccactcaacgtcctctcttcaattgtcgtttttcatcaacaaagcctatatatatatatataaatgagttgctgtgctctcaccatggagcagtgttgatttgatgtaatgaagtattaaacgttctccttgctctctttgccttcaactaagtttctgttagtttttggcatgccagattctctgcttccatcttgatttcctatctcactgcatgaccatcttagagctgttactaattcaaagtctggggtttttttctcccaaaggtcagtctaaggaggcagccacctatatgacatgacgtcagagggattaggaaggacccacactcaccttccctaaggcttactgacttgtacataaggtttataatttaggtatacccaccctaagtaacatctgattgaaggcatgaacttgcttgagatccactctcagaaacaggtttagaggggaaaagaaaaagaatactgggagcttcaaggaggaagaaaagggccacagaacaaggggaagctgggcctatagcagtccagcatggtaaggggccaacagttggcttctaaaaggtaatgggttaacacagtcatcctaataccacctcctgagatgctgaattttctctcagctaagtacacatttctattttcagggacagcttacataaatcagaattatatttttaggaatctttaatcatgaattcctctctaaatttcaaaatattttatgacttctaaggaaactttttttacaataaataataaagaaagatttgggatttgcagaatcttctggcccaattaaaaacaaaagaagctgtaaatatccagaacttaatagatgtataaattataaacaaaacatgtccctgccccaaggtattgaaattacattactatagatacatcccatttatgaggtagtccgattcctcagatgtaatgggacgagcttttttcagtttctgtttcaccagtcgtagtcggcatgcaaccatgagaagcagcagagcagtgatagccaaacccagcgccaggggtagcactgcacctgtttctggggctgggtgttcccctcctcctccatcaccctttgactcaaatatataactttcctcttttctgttcttccctgaggaactactatctggcatcacaggaatgatttgactctctggtccccaaaaggcggaatgattcctcttctctgtgtttgataatgcaggtggcttgtttggggcagtggctttctgagacttttccaccaaggagtcaccccctgcatcttcactcggccctgtggttcttggcagggcaggactagctgccgtgtgggttaccatcttgcggtccaggcccagattctggcagaagtcttcatcagacccatcaggacactgctgcactccatcgcaggcgagcgtgatgtcaatgcagcagccatcgtcacagaagaagtggtagcgtgagcaagtgtgcaaacatcctcctgtggagtaggctgcgcgaagcactgtcactgacacgttgtcagagcttctctgcccggcagtgtccgtcacggtcagctggaaggtgtaggttccctcctgtaggtgggacagcttcagggttcctgattgaggcaccttcatgtccactgacgggtccccctgcagcagtgcccactcatactggacgatggcgtggtcatctgtgctctcgcggccgtctagaaccaccccgtctgtgggcagatgcagaaccacatcctgcccagccttgctaagtggaggcgcatccttttcctgccggggcgaggcgcgcgcggtggccagggcggcgccgtccggcgcgcggctgaggctgtagctgctgtagccgctgtgcagcgcgaacttgcagacgttgcggccgcgcgccgtgcagttgaagaggtagcagccgagcacggctgccgggggcgcggggcgccggggcagctccaccacggccacggagcagcgcggctcggagcagcaggccgccacgcattgccgccagccccgcacggccgccggcgcccgcaggaagctggcacccgccgccagggagtccttggtgcggatgatggcgtcaggcattgcgctgtagccgccgctgcccgggcccgggcagtcctcctgggggccgccgcccgcgcgcagctccagctccagctcctcctgaggccgctcctgctgcagttgccggcggaactcctccagcagctgctccacgcccgacagctgcgcgtgcagttcggacagcggcgccgcgggcggcaaggccgcacggccgcttggcagccacaggcagagcagtagcagcccgcgcagcgccccgtgacgcggcggtagccggcgctgcgagcccgcgctctcctgggcgacggaggccatggcgacgagagccaagggcagcgagccgaggcggggctgagcgcgggaggaaggcggggacgcgggcgagcgcgggccctgggcccctcctgcgcggccgcggctggctctaggccccggcctcacagcgcggcgcccccgaacccggctgctcccccgaggtcgcgggcgccggcgggaaccgcagtagcgggagacatagccggcccagccgggcaccgctccttgccctcgccggagactgcccagcgccctgcgcctctccgccccggcctgcggcgcgctgggtggcgacgagtcggcctcggcgttgatcagcaccaggtgtgtgcgaacagtggccgcggcggggtggagccttggtgagccccgcccccccgcgcggccc

SEQ ID NO: 4939 - protein, 195 aa, Homo sapiens
MQNHILPSLAKWRRILFLPGRGARGGQGGAVRRAAEAVAAVAAVQRELADVAAARRAVEEVAAEHGCRGRGAPGQLHHGHGAARLGAAGRHALPPAPHGRRRPQEAGTRRQGVLGADDGVRHCAVAAAARARAVLLGAAARAQLQLQLLLRPLLLQLPAELLQQLLHARQLRVQFGQRRRGRQGRTAAWQPQAEQ

SEQ ID NO: 4940 - DNA, 2325 bp, Homo sapiens
tgagacggtctcactctgtcacccaggctggagtgcagtggcacaatcttatctcactgcagcctcgacctcccaggctcaagtgatcctcccacctcagcctccctgggactacaggcgaatgtcaccacacttggctaatttttgtattttttgtagagacaggattttgccatattgcccaggccggtcttgaactcctgagctcaagcgatcctcctgccttggcctcccaaagtgctgggattacaggcgtgagccactgtgcccagctttgagcaaggatttgaattgtggcatctgactctaaagcttgtgttctcccaccatgccacaagtatgacattttccacaggtgtcacacctggaagggtgtatagaaaaggcagctgaggtccaaagatggaaggttactatcaggagccccaagacgcagtgcaatacaagcaacgaggagacagttctttcggtccactgacggactcctcctgtcctgagctctcatggcctcagggaatatcctcagccagagggcatgcagttctgagaagactacagtctgcaaagggtttccaaggtggacatttacctgtttctggggctgggtgttcccctcctcctccatcaccctttgactcaaatatataactttcctcttttctgttcttccctgaggaactactatctggcatcacaggaatgatttgactctctggtccccaaaaggcggaatgattcctcttctctgtgtttgataatgcaggtggcttgtttggggcagtggctttctgagacttttccaccaaggagtcaccccctgcatcttcactcggccctgtggttcttggcagggcaggactagctgccgtgtgggttaccatcttgcggtccaggcccagattctggcagaagtcttcatcagacccatcaggacactgctgcactccatcgcaggcgagcgtgatgtcaatgcagcagccatcgtcacagaagaagtggtagcgtgagcaagtgtgcaaacatcctcctgtggagtaggctgcgcgaagcactgtcactgacacgttgtcagagcttctctgcccggcagtgtccgtcacggtcagctggaaggtgtaggttccctcctgtaggtgggacagcttcagggttcctgattgaggcaccttcatgtccactgacgggtccccctgcagcagtgcccactcatactggacgatggcgtggtcatctgtgctctcgcggccgtctagaaccaccccgtctgtgggcagatgcagaaccacatcctgcccagccttgctaagtggaggcgcatccttttcctgccggggcgaggcgcgcgcggtggccagggcggcgccgtccggcgcgcggctgaggctgtagctgctgtagccgctgtgcagcgcgaacttgcagacgttgcggccgcgcgccgtgcagttgaagaggtagcagccgagcacggctgccgggggcgcggggcgccggggcagctccaccacggccacggagcagcgcggctcggagcagcaggccgccacgcattgccgccagccccgcacggccgccggcgcccgcaggaagctggcacccgccgccagggagtccttggtgcggatgatggcgtcaggcattgcgctgtagccgccgctgcccgggcccgggcagtcctcctgggggccgccgcccgcgcgcagctccagctccagctcctcctgaggccgctcctgctgcagttgccggcggaactcctccagcagctgctccacgcccgacagctgcgcgtgcagttcggacagcggcgccgcgggcggcaaggccgcacggccgcttggcagccacaggcagagcagtagcagcccgcgcagcgccccgtgacgcggcggtagccggcgctgcgagcccgcgctctcctgggcgacggaggccatggcgacgagagccaagggcagcgagccgaggcggggctgagcgcgggaggaaggcggggacgcgggcgagcgcgggccctgggcccctcctgcgcggccgcggctggctctaggccccggcctcacagcgcggcgcccccgaacccggctgctcccccgaggtcgcgggcgccggcgggaaccgcagtagcgggagacatagccggcccagccgggcaccgctccttgccctcgccggagactgcccagcgccctgcgcctctccgccccggcctgcggcgcgctgggtggcgacgagtcggcctcggcgttgatcagcaccaggtgtgtgcgaacagtggccgcggcggggtggagccttggtgagccccgcccccccgcgcggccc

SEQ ID NO: 4941 - protein, 195 aa, Homo sapiens; identical to SEQ ID NO: 4939

SEQ ID NO: 4942 - DNA, 1843 bp, Homo sapiens
tccttagctgcactctttttctctttctaaaatttttgaagtgacttattatatcagcaattgattacacccaagagccaagtctttcttcaatcctgtggtatgccttttccttgtttttttaatatgtatttttaattgacaaaagaggagagtatatatttatgaggcacaatgtgatgttttgatatatgtttgcattgtggaatgattacatcaagctaactgacatatctatcatctcccctacttgtaatctttttgtgatgacaacatttaaaacctactgttttagcaattttgaaacagacaatacattatcattaactatagtcaccatgctgtgcaacagatcaccagaacctgttcctccggtctcagtgacactttgtaccctttgaccagcgtctctcctttcccagtccgtcccccgcacagcctccagtaaccgccattccactctctgcttccacgagttcaactggtttcactaaactccttagcttccctcttggaacagatgcagcaaatggaccatccatctcctgtggagtaggctgcgcgaagcactgtcactgacacgttgtcagagcttctctgcccggcagtgtccgtcacggtcagctggaaggtgtaggttccctcctgtaggtgggacagcttcagggttcctgattgaggcaccttcatgtccactgacgggtccccctgcagcagtgcccactcatactggacgatggcgtggtcatctgtgctctcgcggccgtctagaaccaccccgtctgtgggcagatgcagaaccacatcctgcccagccttgctaagtggaggcgcatccttttcctgccggggcgaggcgcgcgcggtggccagggcggcgccgtccggcgcgcggctgaggctgtagctgctgtagccgctgtgcagcgcgaacttgcagacgttgcggccgcgcgccgtgcagttgaagaggtagcagccgagcacggctgccgggggcgcggggcgccggggcagctccaccacggccacggagcagcgcggctcggagcagcaggccgccacgcattgccgccagccccgcacggccgccggcgcccgcaggaagctggcacccgccgccagggagtccttggtgcggatgatggcgtcaggcattgcgctgtagccgccgctgcccgggcccgggcagtcctcctgggggccgccgcccgcgcgcagctccagctccagctcctcctgaggccgctcctgctgcagttgccggcggaactcctccagcagctgctccacgcccgacagctgcgcgtgcagttcggacagcggcgccgcgggcggcaaggccgcacggccgcttggcagccacaggcagagcagtagcagcccgcgcagcgccccgtgacgcggcggtagccggcgctgcgagcccgcgctctcctgggcgacggaggccatggcgacgagagccaagggcagcgagccgaggcggggctgagcgcgggaggaaggcggggacgcgggcgagcgcgggccctgggcccctcctgcgcggccgcggctggctctaggccccggcctcacagcgcggcgcccccgaacccggctgctcccccgaggtcgcgggcgccggcgggaaccgcagtagcgggagacatagccggcccagccgggcaccgctccttgccctcgccggagactgcccagcgccctgcgcctctccgccccggcctgcggcgcgctgggtggcgacgagtcggcctcggcgttgatcagcaccaggtgtgtgcgaacagtggccgcggcggggtggagccttggtgagccccgcccccccgcgcggccc

SEQ ID NO: 4943 - protein, 195 aa, Homo sapiens; identical to SEQ ID NO: 4939

SEQ ID NO: 4944 - DNA, 1875 bp, Homo sapiens
tttttttaatatgtatttttaattgacaaaagaggagagtatatatttatgaggcacaatgtgatgttttgatatatgtttgcattgtggaatgattacatcaagctaactgacatatctatcatctcccctacttgtaatctttttgtgatgacaacatttaaaacctactgttttagcaattttgaaacagacaatacattatcattaactatagtcaccatgctgtgcaacagatcaccagaacctgttcctccggtctcagtgacactttgtaccctttgaccagcgtctctcctttcccagtccgtcccccgcacagcctccagtaaccgccattccactctctgcttccacgagttcaactggtttcactaaactccttagcttccctcttggaacagatgcagcaaatggaccatccatctgtaaacaaagtcctctcccagaatagccaagcaattgtctttgatgaagtcgagtcaagagaagcgggagcatctcttctcatcccctggagtgcttcctccaccccaacccagtagcatcggctaagcccaaaacagaagagagcctgcttttgttattgtgtttttagcaaagactctctcattcagcaataaccaaaaataaaatggaagagcccatggagcgcagagccagaggacaaagcgccaacccgacattgccttccacaagcagtgggaagcgagggaaggactttcttctcacctcctgtggagtaggctgcgcgaagcactgtcactgacacgttgtcagagcttctctgcccggcagtgtccgtcacggtcagctggaaggtgtaggttccctcctgtaggtgggacagcttcagggttcctgattgaggcaccctgccggggcgaggcgcgcgcggtggccagggcggcgccgtccggcgcgcggctgaggctgtagctgctgtagccgctgtgcagcgcgaacttgcagacgttgcggccgcgcgccgtgcagttgaagaggtagcagccgagcacggctgccgggggcgcggggcgccggggcagctccaccacggccacggagcagcgcggctcggagcagcaggccgccacgcattgccgccagccccgcacggccgccggcgcccgcaggaagctggcacccgccgccagggagtccttggtgcggatgatggcgtcaggcattgcgctgtagccgccgctgcccgggcccgggcagtcctcctgggggccgccgcccgcgcgcagctccagctccagctcctcctgaggccgctcctgctgcagttgccggcggaactcctccagcagctgctccacgcccgacagctgcgcgtgcagttcggacagcggcgccgcgggcggcaaggccgcacggccgcttggcagccacaggcagagcagtagcagcccgcgcagcgccccgtgacgcggcggtagccggcgctgcgagcccgcgctctcctgggcgacggaggccatggcgacgagagccaagggcagcgagccgaggcggggctgagcgcgggaggaaggcggggacgcgggcgagcgcgggccctgggcccctcctgcgcggccgcggctggctctaggccccggcctcacagcgcggcgcccccgaacccggctgctcccccgaggtcgcgggcgccggcgggaaccgcagtagcgggagacatagccggcccagccgggcaccgctccttgccctcgccggagactgcccagcgccctgcgcctctccgccccggcctgcggcgcgctgggtggcgacgagtcggcctcggcgttgatcagcaccaggtgtgtgcgaacagtggccgcggcggggtggagccttggtgagccccgcccccccgcgcggccc

SEQ ID NO: 4945 - protein, 69 aa, Homo sapiens
MFALWNDYIKLTDISIISPTCNLFVMTTFKTYCFSNFETDNTLSLTIVTMLCNRSPEPVPPVSVTLCTL

SEQ ID NO: 4946 - DNA, 305 bp, Homo sapiens
gcggctatcccaggagccccgggcaggagccccgggcaggagcaccgcatgctggcctccctccctcacaggctcggtgtgccccagcagacctagctgccagcagtgacaacatgcgttaccttcatgtccactgacgggtccccctgcagcagtgcccactcatactggacgatggcgtggtcatctgtgctctcgcggccgtctagaaccaccccgtctgtgggcagatgcagaaccacatcctgcccagccttgctaagtggaggcgcatccttttctgagaaagaaaataaataattcat

SEQ ID NO: 4947 - protein, 57 aa, Homo sapiens
MSTDGSPCSSAHSYWTMAWSSVLSRPSRTTPSVGRCRTTSCPALLSGGASFSEKENK

SEQ ID NO: 4948 - DNA, 1258 bp, Homo sapiens
cgtccggcgcgcggctgaggctgtagctgctgtagccgctgtgcagcgcgaacttgcagacgttgcggccgcgcgccgtgcagttgaagaggtagcagccgagcacggctgccgggggcgcggggcgccggggcagctccaccacggccacggagcagcgcggctcggagcagcaggccgccacgcattgccgccagccccgcacggccgccggcgcccgcaggaagctggcacccgccgccagggagtccttggtgcggatgatggcgtcaggcattgcgctgtagccgccgctgcccgggcccgggcagtcctcctgggggccgccgcccgcgcgcagctccagctccagctcctcctgaggccgctcctgctgcagttgccggcggaactcctccagcagctgctccacgcccgacagctgcgcgtgcagttcggacagcggcgccgcgggcggcaaggccgcacggccgcttggcagccacaggcagagcagtagcagcccgcgcagcgccccgtgacgcggcggtagccggcgctgcgagcccgcgctctcctgggcgacggaggccatggcgacgagagccaagggcagcgagccgaggcggggctgagcgcgggaggaaggcggggacgcgggcgagcgcgggccctgggcccctcctgcgcggccgcggctggctctaggccccggcctcacagcgcggcgcccccgaacccggctgctcccccgaggtcgcgggcgccggcgggaaccgcagtagcgggagacatagccggcccagccgggcaccgctccttgccctcgccggagactgcccagcgccctgcgcctctccgccccggcctgcggcgcgctgggtggcgacgagtcggcctcggcgttgatcagcaccaggtgtgtgcgaacagtggccgcggcggggtggagccttggatgaaccgttgtccacattctgttttctgagtcaaagaggaggaagatctgtccatcgaaactgagctgccaagatccactgccgtgtccttcggctttctgctcacaagacatcctggcctgcagggtgaggggttctgcccccatcaaagagagatcagctctggccttgacagatattgagcccccatcctcttccacttgcaatttcctggtcttacttgctctgccacatcctggccttgcctctagacgtcttgcggggtgagatgaccttcctatttgtatttttacatgaaaactataaatgcctctaaccta

SEQ ID NO: 4949 - protein, 54 aa, Homo sapiens
PAQPGTAPCPRRRLPSALRLSAPACGALGGDESASALISTRCVRTVAAAGWSLG

SEQ ID NO: 4950 - DNA, 1093 bp, Homo sapiens
cacggctgccgggggcgcggggcgccggggcagctccaccacggccacggagcagcgcggctcggagcagcaggccgccacgcattgccgccagccccgcacggccgccggcgcccgcaggaagctggcacccgccgccagggagtccttggtgcggatgatggcgtcaggcattgcgctgtagccgccgctgcccgggcccgggcagtcctcctgggggccgccgcccgcgcgcagctccagctccagctcctcctgaggccgctcctgctgcagttgccggcggaactcctccagcagctgctccacgcccgacagctgcgcgtgcagttcggacagcggcgccgcgggcggcaaggccgcacggccgcttggcagccacaggcagagcagtagcagcccgcgcagcgccccgtgacgcggcggtagccggcgctgcgagcccgcgctctcctgggcgacggaggccatggcgacgagagccaagggcagcgagccgaggcggggctgagcgcgggaggaaggcggggacgcgggcgagcgcgggccctgggcccctcctgcgcggccgcggctggctctaggccccggcctcacagcgcggcgcccccgaacccggctgctcccccgaggtcgcgggcgccggcgggaaccgcagtagcgggagacatagccggcccagccgggcaccgctccttgccctcgccggagactgcccagcgccctgcgcctctccgccccggcctgcggcgcgctgggtggcgacgagtcggcctcggcgttgatcagcaccaggatgaaccgttgtccacattctgttttctgagtcaaagaggaggaagatctgtccatcgaaactgagctgccaagatccactgccgtgtccttcggctttctgctcacaagacatcctggcctgcagggtgaggggttctgcccccatcaaagagagatcagctctggccttgacagatattgagcccccatcctcttccacttgcaatttcctggtcttacttgctctgccacatcctggccttgcctctagacgtcttgcggggtgagatgaccttcctatttgtatttttacatg

SEQ ID NO: 4951 - protein, 143 aa, Homo sapiens
PALRARALLGDGGHGDESQGQRAEAGLSAGGRRGRGRARALGPSCAAAAGSRPRPHSAAPPNPAAPPRSRAPAGTAVAGDIAGPAGHRSLPSPETAQRPAPLRPGLRRAGWRRVGLGVDQHQDEPLSTFCFLSQRGGRSVHRN

SEQ ID NO: 4952 - DNA, 1227 bp, Homo sapiens
acagagactctgaggaagcagtcacctcaggcctctccatcctagagacggcagaaggacaaacatctcctgctggcacaaggaagtcataactcatgtgagtggagccatgtgggattaagaagtgataggagagcttgctgtctgtctctgctctccactgtgtgaggatacaacaggaagacagccatctggtgaggaagagagggccctcgccagataccggacctgctgacaccttgatcttggacttcccatcttccaggaaggcctgacctcagttgttccagggtaaagaatttgggcagtgcccacacccacgctgttggataacatttcttcaccataccagtgagggtgaatgtgtacacgcccagcttcctgcctgttactctccacagtatgcgaagaatatccctgacttctagccctgtgcgccttcttttgtttctgctgttgctactaatagccttggagatcatggttggtggtcactctctttgcttcaacttcactataaaatcattgtccagacctggacagccctggtgtgaagcgcaggtcttcttgaataaaaatcttttccttcagtacaacagtgacaacaacatggtcaaacctctgggcctcctggggaagaaggtatatgccaccagcacttggggagaattgacccaaacgctgggagaagtggggcgagacctcaggatgctcctttgtgacatcaaaccccagataaagaccagtgatccttccactctgcaagtcgagatgttttgtcaacgtgaagcagaacggtgcactggtgcatcctggcagttcgccaccaatggagagaaatccctcctctttgacgcaatgaacatgacctggacagtaattaatcatgaagccagtaagatcaaggagacatggaagaaagacagagggctggaaaagtatttcaggaagctctcaaagggagactgcgatcactggctcagggaattcttagggcactgggaggcaatgccagaaccgacagtgtcaccagtaaatgcttcagatatccactggtcttcttctagtctaccagatagatggatcatcctgggggcattcatcctgttagttttaatgggaattgttctcatctgtgtctggtggcaaaatggtgagtggcaggctggtctctggcccttgaggacgtcttagtctggtaaggactcaagagaggtgaatcatggg

SEQ ID NO: 4953 - protein, 263 aa, Homo sapiens; identical to SEQ ID NO: 637

SEQ ID NO: 4954 - DNA, 743 bp, Homo sapiens
gcccagcttcctgcctgttactctccacagtatgcgaagaatatccctgacttctagccctgtgcgccttcttttgtttctgctgttgctactaatagccttggagatcatggttggtggtcactctctttgcttcaacttcactataaaatcattgtccagacctggacagccctggtgtgaagcgcaggtcttcttgaataaaaatcttttccttcagtacaacagtgacaacaacatggtcaaacctctgggcctcctggggaagaagatccttccactctgcaagtcgagatgttttgtcaacgtgaagcagaacggtgcactggtgcatcctggcagttcgccaccaatggagagaaatccctcctctttgacgcaatgaacatgacctggacagtaattaatcatgaagccagtaagatcaaggagacatggaagaaagacagagggctggaaaagtatttcaggaagctctcaaagggagactgcgatcactggctcagggaattcttagggcactgggaggcaatgccagaaccgacagtgtcaccagtaaatgcttcagatatccactggtcttcttctagtctaccagatagatggatcatcctgggggcattcatcctgttagttttaatgggaattgttctcatctgtgtctggtggcaaaatggtgagtggcaggctggtctctggcccttgaggacgtcttagtctggtaaggactcaagagaggtgaa

SEQ ID NO: 4955 - protein, 140 aa, Homo sapiens
MFCQREAERCTGASWQFATNGEKSLLFDAMNMTWTVINHEASKIKETWKKDRGLEKYFRKLSKGDCDHWLREFLGHWEAMPEPTVSPVNASDIHWSSSSLPDRWIILGAFILLVLMGIVLICVWWQNGEWQAGLWPLRTS

SEQ ID NO: 4956 - DNA, 684 bp, Homo sapiens
atgcgaagaatatccctgacttctagccctgtgcgccttcttttgtttctgctgttgctactaatagccttggagatcatgtacaacagtgacaacaacatggtcaaacctctgggcctcctggggaagaaggtatatgccaccagcacttggggagaattgacccaaacgctgggagaagtggggcgagacctcaggatgctcctttgtgacatcaaaccccagataaagaccagtgatccttccactctgcaagtcgagatgttttgtcaacgtgaagcagaacggtgcactggtgcatcctggcagttcgccaccaatggagagaaatccctcctctttgacgcaatgaacatgacctggacagtaattaatcatgaagccagtaagatcaaggagacatggaagaaagacagagggctggaaaagtatttcaggaagctctcaaagggagactgcgatcactggctcagggaattcttagggcactgggaggcaatgccagaaccgacagtgtcaccagtaaatgcttcagatatccactggtcttcttctagtctaccagatagatggatcatcctgggggcattcatcctgttagttttaatgggaattgttctcatctgtgtctggtggcaaaatggtgagtggcaggctggtctctggcccttgaggacgtcttag

SEQ ID NO: 4957 - protein, 227 aa, Homo sapiens
MRRISLTSSPVRLLLFLLLLLIALEIMYNSDNNMVKPLGLLGKKVYATSTWGELTQTLGEVGRDLRMLLCDIKPQIKTSDPSTLQVEMFCQREAERCTGASWQFATNGEKSLLFDAMNMTWTVINHEASKIKETWKKDRGLEKYFRKLSKGDCDHWLREFLGHWEAMPEPTVSPVNASDIHWSSSSLPDRWIILGAFILLVLMGIVLICVWWQNGEWQAGLWPLRTS

SEQ ID NO: 4958 - DNA, 677 bp, Homo sapiens
atggtcataacagcctcctgtctaccgactcagaacggattttaccaaaactgaaaatgcaggctccatgctcagaagctctttaacaggctcgaaaggtccatgctcctttctcctgcccattctatagcataagaagacagtctctgagtgataatcttctcttcaagaagaagaaaactaggaaggagtaagcacaaagatctcttcacattctccgggactgcggtaccaaatatcagcacagcacttcttgaaaaaggatgtagattttaatctgaactttgaaccatcactgaggtggcccgccggtttctgagccttctgccctgcggggacacggtctgcaccctgcccgcggccacggaccatgaccatgaccctccacaccaaagcatctgggatggccctactgcatcagatccaagggaacgagctggagcccctgaaccgtccgcagctcaagatccccctggagcggcccctgggcgaggtgtacctggacagcagcaagcccgccgtgtacaactaccccgagggcgccgcctacgagttcaacgccgcggccgccgccaacgcgcaggtctacggtcagaccggcctcccctacggccccgggtctgaggctgcggcgttcggctccaacggcctggggggtttccccccactcaacagcg

SEQ ID NO: 4959 - protein, 101 aa, Homo sapiens
MTMTLHTKASGMALLHQIQGNELEPLNRPQLKIPLERPLGEVYLDSSKPAVYNYPEGAAYEFNAAAAANAQVYGQTGLPYGPGSEAAAFGSNGLGGFPPLN

SEQ ID NO: 4960 - DNA, 10730 bp, Homo sapiens
tgttctcacgagggggcagcttgggcttgaccgagcaggagcttcatggtcccacacgtagtatgacatgtgacctctgcacattgtttacagttcctaaactgtgatttctttttctgtgaaatagttataatagtaagtggctaccaagtagaaagtggtcatggggggtgaaggttaaacacaataacggacacacagaacttacacagggcattttatgccaagctatattgaatatctatatccctctacctgcccgtcaatgtcatgaatattgacaattcactctagaccctgctagaagaatccaaagaaattgacagtgagctggaagcaatgactgagaaattacagtacctcactagcgtgtactgtacagaaaaaatgtctcagcaagtggcagaactgggacgggagactgaggagttgcgacagatgatcaaaattcgtttgcagaacctccaagatgcagctaaggatatgaaaaaatttgaagcagagttgaaaaagttacaagctgccttggagcaagcccaggcaacactgacttctccagaagttggacgtctcagtctcaaggagcagctctctcatcggcagcatttgttgtctgagatggagtcactgaagccgaaggtgcaagcagtgcagctctgccagagtgccctccggatccccgaggatgtggttgccagcttacctctctgtcatgctgctctgcggctgcaggaagaggccagccggctgcagcacaccgccatccagcagtgtaacatcatgcaggcagctgtggtacaatatgaacaatatgagcaagaaatgaaacatctccagcaactgatagaaggagctcacagagagattgaggataaacctgttgccaccagtaacatacaggagctgcaggctcagatttctcggcatgaggagctggcgcagaaaattaagggctaccaggagcagatcgcttctttgaattccaagtgcaagatgctgacgatgaaagccaagcacgccaccatgctgctgacggtgaccgaggtcgaggggctggcggaagggacagaggacctggatggggagctcctccccacgccttcggcccacccctctgtggtcatgatgactgcaggtcgctgtcacactttgctgtcaccggtcactgaggagtctggggaggagggaaccaacagtgagatttcctctccacctgcctgtcgctccccttcacctgtggctaatacagatgcttctgttaaccaggacattgcatattaccaagccttgtctgctgagaggttgcagacagatgctgcaaaaattcaccccagcacatccgcatcccaggagttctatgaaccgggattggagccatccgctactgccaaactgggtgatttgcagcgttcttgggaaaccttaaagaatgtgatcagtgagaagcagcgcacactctatgaagctttggaacgccagcagaagtaccaggactccctccagtccatctctacgaagatggaggccattgagctgaaactcagtgagagcccagagcctggcaggagtccagaaagccagatggctgaacatcaggcattgatggatgagattctcatgctccaggatgaaatcaatgagctccagtcctctctcgcagaggagctggtatccgagtcttgtgaggccgaccctgcggagcagctggccttgcagtccacgctcactgtcttagccgagcgaatgtccaccatcaggatgaaagcctcggggaaacggcagcttttggaggagaagttgaatgatcagctggaggaacaaaggcaggaacaggccctgcagaggtatcgctgtgaagccgatgagctggacagctggctcttgagtaccaaggccactctggacactgcgctgagtccacccaaggagcccatggacatggaggcccagcttatggactgccagaatatgctggtggaaatagagcagaaggtggtggctttatcagaactgtcagtccacaatgagaacctgctgctggagggcaaagctcacaccaaggacgaggccgagcagctggctggaaagctgagaaggctcaaggggagcctgctggagctgcagagagccctgcatgataagcagctcaacatgcagggaacagcacaggagaaggaggagagcgatgttgacctaacagccacgcagagccccggcgtccaggaatggctggcccaagctcgcaccacatggacccagcagcggcagagcagtctccagcaacaaaaagagttagaacaggaattagccgagcagaagagtctccttcgctcagtagccagtcgtggagaggagattctaattcaacattcggcggcagagacctctggtgatgctggcgaaaaacctgatgtgttatcccaggagttggggatggaaggggagaaatcatccgctgaagaccagatgagaatgaaatgggaaagcctacatcaagaatttagtaccaagcagaaactactacagaatgttctggaacaggaacaagagcaagtgctttatagcaggccaaatcgactcttgtctggtgtgccactgtacaaaggggacgtgccaacccaagataaatctgcagttacatctttgctggatggactgaaccaagccttcgaggaggtttcatcccagagtggaggggcaaagaggcagagtatacacttggagcagaagttgtatgatggagtctcagccacctctacttggttggatgacgttgaagaacgtttatttgttgccacagcacttttaccagaagaaacagagacttgtctcttcaaccaagagattcttgccaaagacattaaggaaatgtctgaagaaatggataagaacaaaaacttgttttcccaagcttttccagagaatggtgataatcgagatgttattgaagatactttgggttgtcttttgggcaggttatccttgctagactcagtagtgaatcaacgatgtcatcagatgaaagaaagacttcagcaaatactaaatttccagaatgatctgaaagtgctgtttacatcactggctgacaacaaatacatcattctgcaaaaactggcaaatgtgtttgaacagcccgtagcagaacaaatagaggcaatacaacaggctgaagatggactcaaagaatttgatgcaggaatcattgaattaaagaggcgtggtgacaagctacaggtcgagcagccgtccatgcaagaactctccaagctccaggacatgtatgatgagctgatgatgatcattggctcccggaggagtggtctgaatcagaaccttacactcaagagtcagtatgagagggccctacaagatctggctgacctgctagaaactggtcaggagaagatggcaggagaccagaaaatcatcgtgtcttccaaagaggaaatccagcaactacttgacaaacataaggaatactttcagggcctggaatctcatatgatcttgactgaaacactcttcagaaagataatcagctttgcagtccaaaaggaaacccagttccatacagagctgatggctcaggcttctgctgtactgaaacgggctcacaagaggggtgtggagctggagtacattctagagacgtggtcccatctggatgaggaccagcaggagctcagcagacagctggaggtggtggaaagcagcatcccaagcgtgggtctggtggaggagaacgaggacaggcttattgaccgcataacactctaccagcatttaaaatctagccttaatgaataccagcccaaattatatcaagtattagatgatgggaaacgacttctgatatccatcagctgctcagatctagaaagccaactaaatcaacttggagagtgctggctaagtaacaccaataaaatgtctaaggaacttcacagactggaaacaatattgaaacactggaccagatatcaaagtgaatctgcagatctaattcactggttacaatctgcaaaagaccggctagaattttggactcagcaatctgtgacagtcccacaagagctggaaatggtccgtgatcatctaaatgctttcctggagttttctaaagaagtggatgcccaatcttccctgaaatcatctgttctgagtactggaaatcagctccttcgactaaaaaaggtggacacagccacgctgcgctctgagctgtcgcgcattgatagccagtggactgacctgctaaccaatatcccagccgtccaggagaagctccaccagctccagatggataaactgccttcccgccatgccatttctgaagtcatgagttggatttctctaatggaaaatgttattcagaaggatgaagataatattaaaaattccataggttacaaggcaattcatgaataccttcagaaatataagggttttaagatagacattaactgtaaacagctgacagtggattttgtgaaccagtccgtgctacaaatcagcagtcaggatgtggaaagtaagcgtagtgataagactgattttgctgagcaacttggagcaatgaataaaagttggcaaattctgcaaggtctagtaactgagaagatccagctgttggaaggcttattggaatcttggtcagaatatgaaaataatgtacaatgtctgaaaacatggtttgaaacccaggaaaagagactaaaacaacagcatcgaattggagatcaggcttctgttcaaaatgcactgaaagactgtcaggatctggaagatttgattaaagcaaaagaaaaagaagtagagaaaattgagcagaatggacttgctttgattcagaacaagaaagaagacgtctctagcattgtcatgagcacactgcgagagctcggccaaacctgggcaaatttagatcacatggttggacaattaaagatactgctgaaatcagtgcttgaccaatggagtagtcacaaagtggcctttgacaagataaacagttacctcatggaggccagatactctctttcccgattccgtctgctgactggctccttagaagctgtgcaagttcaggtggacaatcttcagaatctccaagatgatctggaaaaacaggaaaggagcttacagaaatttggctctatcaccaaccaattattaaaagagtgtcacccacccgtgacagaaactcttaccaatacactgaaagaagtcaacatgagatggaataacttgctggaagagattgctgagcagctacagtccagcaaggccctacttcagctttggcaaagatacaaggactactccaaacagtgtgcttcgacagttcagcagcaggaggatcgaaccaatgagctgttgaaggcagccacaaacaaggacattgccgatgatgaggttgccacatggattcaagattgcaacgacctcctcaaaggactgggcacagttaaagattccctcttttttctccatgagctgggagagcaactgaagcaacaagtggatgcttccgcagcatcagctattcaatcggatcaactctctttgagtcaacacttgtgtgccctggagcaagctctctgcaaacagcagacttcattacaggctggagttcttgattatgaaacctttgccaagagtttagaagctttggaggcctggatagtggaagctgaagaaatactacaagggcaggaccctagccactcatctgacctctccacaatccaggaaaggatggaagaacttaagggacagatgttaaaattcagcagcatggctccagatttagaccgtctaaatgagcttggatataggttacccttgaatgataaggaaatcaaaagaatgcagaatctgaaccgccattggtctctgatctcctctcagactacagaaagattcagcaagttgcagtcatttttgctacaacatcagactttcttggaaaaatgtgaaacatggatggaattcctagttcagacagaacaaaagttagcagtagagatttcaggaaattatcagcaccttttggaacagcagagagcacacgagttgtttcaagccgagatgttcagtcgtcagcagattttgcactcaatcattattgatgggcaacgtcttctagaacaaggtcaagttgatgacagggatgaattcaacctgaaattgacactcctcagtaatcaatggcagggagtgattcgcagggcccagcagaggcgggggatcattgacagccagattcgccagtggcagcgctatagggagatggcagaaaagcttcgtaaatggttggttgaagtgtcctacctccccatgagtggtctcggaagtgttcctataccactgcaacaagcaaggaccctctttgatgaagtgcagttcaaagaaaaagtgtttctgcggcaacaaggcagctacatcctgactgtggaggctggcaagcaactccttctctcggcggacagtggcgctgaggccgccttgcaggccgaactcgctgaaatccaagagaaatggaaatcagccagcatgcggctggaagaacagaagaaaaaactagccttcttgttgaaagactgggaaaaatgtgagaaaggaatagcagattccctggagaaactacgaactttcaaaaagaagctttcgcagtctctcccggatcaccatgaagagctccatgcagaacaaatgcgttgcaaggaattagaaaatgcagttgggagctggacagatgacttgacccagttgagcctgctgaaggacaccctctctgcctatatcagtgctgatgatatctccattcttaatgaacgcgtagagcttctgcaaaggcagtgggaagaactatgccaccagctctccttaaggcggcagcaaataggtgaaagattgaatgaatgggcagtcttcagtgaaaagaacaaggaactctgtgagtggttgactcaaatggaaagcaaagtttctcagaatggagacattctcattgaagaaatgatagagaagctcaagaaggattatcaagaggaaattgctattgctcaagagaacaaaatacagctccaacaaatgggagaacgacttgctaaagccagccatgaaagcaaagcatctgagattgaatacaagctgggaaaggtcaacgaccggtggcagcatctcctggacctcattgcagccagggtgaagaagctgaaggagaccctggtagccgtgcagcagcttgataagaacatgagcagcctgaggacctggctcgctcacatcgagtcagagctggccaagccaatagtctacgattcctgtaactcggaagaaatacagagaaagcttaatgagcagcaggagcttcagagagacatagagaagcacagtacaggtgttgcatctgtcctcaacctgtgtgaagtcctgctgcacgactgtgacgcctgtgccactgatgccgagtgtgactctatacagcaggctacgagaaacctggaccggcggtggagaaacatttgtgctatgtccatggaaaggaggctgaaaatcgaagagacgtggcgattgtggcagaaatttctggatgactattcacgttttgaagattggctgaagtcttcagaaaggacagctgcttttcccagctcttctggggtgatctatacagttgccaaggaagaactaaagaaatttgaggctttccagcgacaggtccacgagtgcctgacgcagctggaactgatcaacaagcagtaccgccgcctggccagggagaaccgcactgattcagcatgtagcctcaaacagatggttcacgaaggcaaccagagatgggacaacctgcaaaagcgtgtcacctccatcttgcgcagactcaagcattttattggccagcgtgaggagtttgagactgcgcgggacagcattctggtctggctcacagagatggatctgcagctcactaatattgaacatttttctgagtgtgatgttcaagctaaaataaagcaactcaaggccttccagcaggaaatttcactgaaccacaataagattgagcagataattgcccaaggagaacagctgatagaaaagagtgagcccttggatgcagcgatcatcgaggaggaactagatgagctccgacggtactgccaggaggtcttcgggcgtgtggaaagataccataagaaactgatccgcctgcctctcccagacgatgagcacgacctctcagacagggagctggagctggaagactctgcagctctgtcggacctgcactggcacgaccgctctgcagacagcctgctttctccacagccttcctccaatctctccctctcgctcgctcagcccctccggagcgagcggtcaggacgagacaccccggctagtgtggactccatccccctggagtgggatcacgactatgacctcagtcgggacctggagtctgcaatgtccagagctctgccctctgaggatgaagaaggtcaggatgacaaagatttctacctccggggagctgttggcttatcaggggaccacagtgccctagagtcacagatccgacaactgggcaaagccctggatgatagccgttttcagatacagcaaaccgaaaatatcattcgcagcaaaactcccacggggccggagctagacaccagctacaaaggctacatgaaactgctgggcgaatgcagtagcagtatagactccgtgaagagactggagcacaaactgaaggaggaagaggagagccttcctggctttgttaacctgcatagtaccgaaacccaaacggctggtgtgattgaccgatgggagcttctccaggcccaggcattgagcaaggagttgaggatgaagcagaacctccagaagtggcagcagtttaactcagacttgaacagcatctgggcctggctgggggacacggaggaggagttggaacagctccagcgtctggaactcagcactgacatccagaccatcgagctccagatcaaaaagctcaaggagctccagaaagctgtggaccaccgcaaagccatcatcctctccatcaatctctgcagccctgagttcacccaggctgacagcaaggagagccgggacctgcaggatcgcttgtcgcagatgaatgggcgctgggaccgagtgtgctctctgctggaggagtggcggggcctgctgcaggatgccctgatgcagtgccagggtttccatgaaatgagccatggtttgcttcttatgctggagaacattgacagaaggaaaaatgaaattgtccctattgattctaaccttgatgcagagatacttcaggaccatcacaaacagcttatgcaaataaagcatgagctgttggaatcccaactcagagtagcctctttgcaagacatgtcttgccaactactggtgaatgctgaaggaacagactgtttagaagccaaagaaaaagtccatgttattggaaatcggctcaaacttctcttgaaggaggtcagtcgtcatatcaaggaactggagaagttattagacgtgtcaagtagtcagcaggatttgtcttcctggtcttctgctgatgaactggacacctcagggtctgtgagtcccacatcaggaaggagcaccccaaacagacagaaaacgccacgaggcaagtgtagtctctcacagcctggaccctctgtcagcagtccacatagcaggtccacaaaaggtggctccgattcctccctttctgagccagggccaggtcggtccggccgcggcttcctgttcagagtcctccgagcagctcttccccttcagcttctcctgctcctcctcatcgggcttgcctgccttgtaccaatgtcagaggaagactacagctgtgccctctccaacaactttgcccggtcattccaccccatgctcagatacacgaatggccctcctccactctgaactaagcagatgccatctgcagaagtgctggtagcataaggaggatcgggtcataagcaatcccaaactaccaacaagaggaccttgatcttggcgaaagccctcggtgtggcagctttagccctcctccagatcacatgtgtgcaaattatggcttcagaggtggaagataaacagtgacgggggaacaaacagacaacaagaaggtttggaagaaatctggtttgagactctgaaccttagcactaaggagattgagtaaggacctccaaagttccccggactcatgaattctgggcccttggcccattctgtgcacagccaaggacttcagtagaccatctgggcagctttcccatggtgctgctccaaccatcagataaatgaccctcccaagcaccatgtcagtgtcgtacaatctaccaaccaaccagtgctgaagagattttagaaccttgtaacatacaatttttaagagcttatatggcagcttcctttttaccttgttttcctttggggcatgatgttttaacctttgctttagaagcacaagctgtaaatctaaaaggcacttttttttagaggtataaagaaaaactagatgtaataaataagatcatggaaggctttatgtgaaaaaagttgaatgttatagtaaaaaaaaaaagatatttatgtatgtacagtttgctaaagccaagttttgtttgtattgatttctttgcatttattatagatattataaaatagtt

SEQ ID NO: 4961 - protein, 3212 aa, Homo sapiens
MTEKLQYLTSVYCTEKMSQQVAELGRETEELRQMIKIRLQNLQDAAKDMKKFEAELKKLQAALEQAQATLTSPEVGRLSLKEQLSHRQHLLSEMESLKPKVQAVQLCQSALRIPEDVVASLPLCHAALRLQEEASRLQHTAIQQCNIMQAAVVQYEQYEQEMKHLQQLIEGAHREIEDKPVATSNIQELQAQISRHEELAQKIKGYQEQIASLNSKCKMLTMKAKHATMLLTVTEVEGLAEGTEDLDGELLPTPSAHPSVVMMTAGRCHTLLSPVTEESGEEGTNSEISSPPACRSPSPVANTDASVNQDIAYYQALSAERLQTDAAKIHPSTSASQEFYEPGLEPSATAKLGDLQRSWETLKNVISEKQRTLYEALERQQKYQDSLQSISTKMEAIELKLSESPEPGRSPESQMAEHQALMDEILMLQDEINELQSSLAEELVSESCEADPAEQLALQSTLTVLAERMSTIRMKASGKRQLLEEKLNDQLEEQRQEQALQRYRCEADELDSWLLSTKATLDTALSPPKEPMDMEAQLMDCQNMLVEIEQKVVALSELSVHNENLLLEGKAHTKDEAEQLAGKLRRLKGSLLELQRALHDKQLNMQGTAQEKEESDVDLTATQSPGVQEWLAQARTTWTQQRQSSLQQQKELEQELAEQKSLLRSVASRGEEILIQHSAAETSGDAGEKPDVLSQELGMEGEKSSAEDQMRMKWESLHQEFSTKQKLLQNVLEQEQEQVLYSRPNRLLSGVPLYKGDVPTQDKSAVTSLLDGLNQAFEEVSSQSGGAKRQSIHLEQKLYDGVSATSTWLDDVEERLFVATALLPEETETCLFNQEILAKDIKEMSEEMDKNKNLFSQAFPENGDNRDVIEDTLGCLLGRLSLLDSVVNQRCHQMKERLQQILNFQNDLKVLFTSLADNKYIILQKLANVFEQPVAEQIEAIQQAEDGLKEFDAGIIELKRRGDKLQVEQPSMQELSKLQDMYDELMMIIGSRRSGLNQNLTLKSQYERALQDLADLLETGQEKMAGDQKIIVSSKEEIQQLLDKHKEYFQGLESHMILTETLFRKIISFAVQKETQFHTELMAQASAVLKRAHKRGVELEYILETWSHLDEDQQELSRQLEVVESSIPSVGLVEENEDRLIDRITLYQHLKSSLNEYQPKLYQVLDDGKRLLISISCSDLESQLNQLGECWLSNTNKMSKELHRLETILKHWTRYQSESADLIHWLQSAKDRLEFWTQQSVTVPQELEMVRDHLNAFLEFSKEVDAQSSLKSSVLSTGNQLLRLKKVDTATLRSELSRIDSQWTDLLTNIPAVQEKLHQLQMDKLPSRHAISEVMSWISLMENVIQKDEDNIKNSIGYKAIHEYLQKYKGFKIDINCKQLTVDFVNQSVLQISSQDVESKRSDKTDFAEQLGAMNKSWQILQGLVTEKIQLLEGLLESWSEYENNVQCLKTWFETQEKRLKQQHRIGDQASVQNALKDCQDLEDLIKAKEKEVEKIEQNGLALIQNKKEDVSSIVMSTLRELGQTWANLDHMVGQLKILLKSVLDQWSSHKVAFDKINSYLMEARYSLSRFRLLTGSLEAVQVQVDNLQNLQDDLEKQERSLQKFGSITNQLLKECHPPVTETLTNTLKEVNMRWNNLLEEIAEQLQSSKALLQLWQRYKDYSKQCASTVQQQEDRTNELLKAATNKDIADDEVATWIQDCNDLLKGLGTVKDSLFFLHELGEQLKQQVDASAASAIQSDQLSLSQHLCALEQALCKQQTSLQAGVLDYETFAKSLEALEAWIVEAEEILQGQDPSHSSDLSTIQERMEELKGQMLKFSSMAPDLDRLNELGYRLPLNDKEIKRMQNLNRHWSLISSQTTERFSKLQSFLLQHQTFLEKCETWMEFLVQTEQKLAVEISGNYQHLLEQQRAHELFQAEMFSRQQILHSIIIDGQRLLEQGQVDDRDEFNLKLTLLSNQWQGVIRRAQQRRGIIDSQIRQWQRYREMAEKLRKWLVEVSYLPMSGLGSVPIPLQQARTLFDEVQFKEKVFLRQQGSYILTVEAGKQLLLSADSGAEAALQAELAEIQEKWKSASMRLEEQKKKLAFLLKDWEKCEKGIADSLEKLRTFKKKLSQSLPDHHEELHAEQMRCKELENAVGSWTDDLTQLSLLKDTLSAYISADDISILNERVELLQRQWEELCHQLSLRRQQIGERLNEWAVFSEKNKELCEWLTQMESKVSQNGDILIEEMIEKLKKDYQEEIAIAQENKIQLQQMGERLAKASHESKASEIEYKLGKVNDRWQHLLDLIAARVKKLKETLVAVQQLDKNMSSLRTWLAHIESELAKPIVYDSCNSEEIQRKLNEQQELQRDIEKHSTGVASVLNLCEVLLHDCDACATDAECDSIQQATRNLDRRWRNICAMSMERRLKIEETWRLWQKFLDDYSRFEDWLKSSERTAAFPSSSGVIYTVAKEELKKFEAFQRQVHECLTQLELINKQYRRLARENRTDSACSLKQMVHEGNQRWDNLQKRVTSILRRLKHFIGQREEFETARDSILVWLTEMDLQLTNIEHFSECDVQAKIKQLKAFQQEISLNHNKIEQIIAQGEQLIEKSEPLDAAIIEEELDELRRYCQEVFGRVERYHKKLIRLPLPDDEHDLSDRELELEDSAALSDLHWHDRSADSLLSPQPSSNLSLSLAQPLRSERSGRDTPASVDSIPLEWDHDYDLSRDLESAMSRALPSEDEEGQDDKDFYLRGAVGLSGDHSALESQIRQLGKALDDSRFQIQQTENIIRSKTPTGPELDTSYKGYMKLLGECSSSIDSVKRLEHKLKEEEESLPGFVNLHSTETQTAGVIDRWELLQAQALSKELRMKQNLQKWQQFNSDLNSIWAWLGDTEEELEQLQRLELSTDIQTIELQIKKLKELQKAVDHRKAIILSINLCSPEFTQADSKESRDLQDRLSQMNGRWDRVCSLLEEWRGLLQDALMQCQGFHEMSHGLLLMLENIDRRKNEIVPIDSNLDAEILQDHHKQLMQIKHELLESQLRVASLQDMSCQLLVNAEGTDCLEAKEKVHVIGNRLKLLLKEVSRHIKELEKLLDVSSSQQDLSSWSSADELDTSGSVSPTSGRSTPNRQKTPRGKCSLSQPGPSVSSPHSRSTKGGSDSSLSEPGPGRSGRGFLFRVLRAALPLQLLLLLLIGLACLVPMSEEDYSCALSNNFARSFHPMLRYTNGPPPL

SEQ ID NO: 4962 - DNA, 10838 bp, Homo sapiens
caaaaatcagtctgatctcgggaaacctggagaaatttattttctgtactctaatgttctttcattttggtgaccatcaaggtgctgggagaggaattagatggctgtaattcaaagttaatggaattagatgcagcagtacagaaattcttggaacagaatggccaactgggtaagccactggccaagaagataggaaaactgactgaacttcaccagcagaccattagacaagctgagaatcggctctccaagctcaatcaggcagcatcacatttagaagaatacaatgaaatgcttgaattaattttgaagtggattgaaaaagctaaagtcttggctcatggaactattgcatggaattctgcaagccagcttcgggaacaatatattttgcatcagaccctgctagaagaatccaaagaaattgacagtgagctggaagcaatgactgagaaattacagtacctcactagcgtgtactgtacagaaaaaatgtctcagcaagtggcagaactgggacgggagactgaggagttgcgacagatgatcaaaattcgtttgcagaacctccaagatgcagctaaggatatgaaaaaatttgaagcagagttgaaaaagttacaagctgccttggagcaagcccaggcaacactgacttctccagaagttggacgtctcagtctcaaggagcagctctctcatcggcagcatttgttgtctgagatggagtcactgaagccgaaggtgcaagcagtgcagctctgccagagtgccctccggatccccgaggatgtggttgccagcttacctctctgtcatgctgctctgcggctgcaggaagaggccagccggctgcagcacaccgccatccagcagtgtaacatcatgcaggcagctgtggtacaatatgaacaatatgagcaagaaatgaaacatctccagcaactgatagaaggagctcacagagagattgaggataaacctgttgccaccagtaacatacaggagctgcaggctcagatttctcggcatgaggagctggcgcagaaaattaagggctaccaggagcagatcgcttctttgaattccaagtgcaagatgctgacgatgaaagccaagcacgccaccatgctgctgacggtgaccgaggtcgaggggctggcggaagggacagaggacctggatggggagctcctccccacgccttcggcccacccctctgtggtcatgatgactgcaggtcgctgtcacactttgctgtcaccggtcactgaggagtctggggaggagggaaccaacagtgagatttcctctccacctgcctgtcgctccccttcacctgtggctaatacagatgcttctgttaaccaggacattgcatattaccaagccttgtctgctgagaggttgcagacagatgctgcaaaaattcaccccagcacatccgcatcccaggagttctatgaaccgggattggagccatccgctactgccaaactgggtgatttgcagcgttcttgggaaaccttaaagaatgtgatcagtgagaagcagcgcacactctatgaagctttggaacgccagcagaagtaccaggactccctccagtccatctctacgaagatggaggccattgagctgaaactcagtgagagcccagagcctggcaggagtccagaaagccagatggctgaacatcaggcattgatggatgagattctcatgctccaggatgaaatcaatgagctccagtcctctctcgcagaggagctggtatccgagtcttgtgaggccgaccctgcggagcagctggccttgcagtccacgctcactgtcttagccgagcgaatgtccaccatcaggatgaaagcctcggggaaacggcagcttttggaggagaagttgaatgatcagctggaggaacaaaggcaggaacaggccctgcagaggtatcgctgtgaagccgatgagctggacagctggctcttgagtaccaaggccactctggacactgcgctgagtccacccaaggagcccatggacatggaggcccagcttatggactgccagaatatgctggtggaaatagagcagaaggtggtggctttatcagaactgtcagtccacaatgagaacctgctgctggagggcaaagctcacaccaaggacgaggccgagcagctggctggaaagctgagaaggctcaaggggagcctgctggagctgcagagagccctgcatgataagcagctcaacatgcagggaacagcacaggagaaggaggagagcgatgttgacctaacagccacgcagagccccggcgtccaggaatggctggcccaagctcgcaccacatggacccagcagcggcagagcagtctccagcaacaaaaagagttagaacaggaattagccgagcagaagagtctccttcgctcagtagccagtcgtggagaggagattctaattcaacattcggcggcagagacctctggtgatgctggcgaaaaacctgatgtgttatcccaggagttggggatggaaggggagaaatcatccgctgaagaccagatgagaatgaaatgggaaagcctacatcaagaatttagtaccaagcagaaactactacagaatgttctggaacaggaacaagagcaagtgctttatagcaggccaaatcgactcttgtctggtgtgccactgtacaaaggggacgtgccaacccaagataaatctgcagttacatctttgctggatggactgaaccaagccttcgaggaggtttcatcccagagtggaggggcaaagaggcagagtatacacttggagcagaagttgtatgatggagtctcagccacctctacttggttggatgacgttgaagaacgtttatttgttgccacagcacttttaccagaagaaacagagacttgtctcttcaaccaagagattcttgccaaagacattaaggaaatgtctgaagaaatggataagaacaaaaacttgttttcccaagcttttccagagaatggtgataatcgagatgttattgaagatactttgggttgtcttttgggcaggttatccttgctagactcagtagtgaatcaacgatgtcatcagatgaaagaaagacttcagcaaatactaaatttccagaatgatctgaaagtgctgtttacatcactggctgacaacaaatacatcattctgcaaaaactggcaaatgtgtttgaacagcccgtagcagaacaaatagaggcaatacaacaggctgaagatggactcaaagaatttgatgcaggaatcattgaattaaagaggcgtggtgacaagctacaggtcgagcagccgtccatgcaagaactctccaagctccaggacatgtatgatgagctgatgatgatcattggctcccggaggagtggtctgaatcagaaccttacactcaagagtcagtatgagagggccctacaagatctggctgacctgctagaaactggtcaggagaagatggcaggagaccagaaaatcatcgtgtcttccaaagaggaaatccagcaactacttgacaaacataaggaatactttcagggcctggaatctcatatgatcttgactgaaacactcttcagaaagataatcagctttgcagtccaaaaggaaacccagttccatacagagctgatggctcaggcttctgctgtactgaaacgggctcacaagaggggtgtggagctggagtacattctagagacgtggtcccatctggatgaggaccagcaggagctcagcagacagctggaggtggtggaaagcagcatcccaagcgtgggtctggtggaggagaacgaggacaggcttattgaccgcataacactctaccagcatttaaaatctagccttaatgaataccagcccaaattatatcaagtattagatgatgggaaacgacttctgatatccatcagctgctcagatctagaaagccaactaaatcaacttggagagtgctggctaagtaacaccaataaaatgtctaaggaacttcacagactggaaacaatattgaaacactggaccagatatcaaagtgaatctgcagatctaattcactggttacaatctgcaaaagaccggctagaattttggactcagcaatctgtgacagtcccacaagagctggaaatggtccgtgatcatctaaatgctttcctggagttttctaaagaagtggatgcccaatcttccctgaaatcatctgttctgagtactggaaatcagctccttcgactaaaaaaggtggacacagccacgctgcgctctgagctgtcgcgcattgatagccagtggactgacctgctaaccaatatcccagccgtccaggagaagctccaccagctccagatggataaactgccttcccgccatgccatttctgaagtcatgagttggatttctctaatggaaaatgttattcagaaggatgaagataatattaaaaattccataggttacaaggcaattcatgaataccttcagaaatataagggttttaagatagacattaactgtaaacagctgacagtggattttgtgaaccagtccgtgctacaaatcagcagtcaggatgtggaaagtaagcgtagtgataagactgattttgctgagcaacttggagcaatgaataaaagttggcaaattctgcaaggtctagtaactgagaagatccagctgttggaaggcttattggaatcttggtcagaatatgaaaataatgtacaatgtctgaaaacatggtttgaaacccaggaaaagagactaaaacaacagcatcgaattggagatcaggcttctgttcaaaatgcactgaaagactgtcaggatctggaagatttgattaaagcaaaagaaaaagaagtagagaaaattgagcagaatggacttgctttgattcagaacaagaaagaagacgtctctagcattgtcatgagcacactgcgagagctcggccaaacctgggcaaatttagatcacatggttggacaattaaagatactgctgaaatcagtgcttgaccaatggagtagtcacaaagtggcctttgacaagataaacagttacctcatggaggccagatactctctttcccgattccgtctgctgactggctccttagaagctgtgcaagttcaggtggacaatcttcagaatctccaagatgatctggaaaaacaggaaaggagcttacagaaatttggctctatcaccaaccaattattaaaagagtgtcacccacccgtgacagaaactcttaccaatacactgaaagaagtcaacatgagatggaataacttgctggaagagattgctgagcagctacagtccagcaaggccctacttcagctttggcaaagatacaaggactactccaaacagtgtgcttcgacagttcagcagcaggaggatcgaaccaatgagctgttgaaggcagccacaaacaaggacattgccgatgatgaggttgccacatggattcaagattgcaacgacctcctcaaaggactgggcacagttaaagattccctcttttttctccatgagctgggagagcaactgaagcaacaagtggatgcttccgcagcatcagctattcaatcggatcaactctctttgagtcaacacttgtgtgccctggagcaagctctctgcaaacagcagacttcattacaggctggagttcttgattatgaaacctttgccaagagtttagaagctttggaggcctggatagtggaagctgaagaaatactacaagggcaggaccctagccactcatctgacctctccacaatccaggaaaggatggaagaacttaagggacagatgttaaaattcagcagcatggctccagatttagaccgtctaaatgagcttggatataggttacccttgaatgataaggaaatcaaaagaatgcagaatctgaaccgccattggtctctgatctcctctcagactacagaaagattcagcaagttgcagtcatttttgctacaacatcagactttcttggaaaaatgtgaaacatggatggaattcctagttcagacagaacaaaagttagcagtagagatttcaggaaattatcagcaccttttggaacagcagagagcacacgagttgtttcaagccgagatgttcagtcgtcagcagattttgcactcaatcattattgatgggcaacgtcttctagaacaaggtcaagttgatgacagggatgaattcaacctgaaattgacactcctcagtaatcaatggcagggagtgattcgcagggcccagcagaggcgggggatcattgacagccagattcgccagtggcagcgctatagggagatggcagaaaagcttcgtaaatggttggttgaagtgtcctacctccccatgagtggtctcggaagtgttcctataccactgcaacaagcaaggaccctctttgatgaagtgcagttcaaagaaaaagtgtttctgcggcaacaaggcagctacatcctgactgtggaggctggcaagcaactccttctctcggcggacagtggcgctgaggccgccttgcaggccgaactcgctgaaatccaagagaaatggaaatcagccagcatgcggctggaagaacagaagaaaaaactagccttcttgttgaaagactgggaaaaatgtgagaaaggaatagcagattccctggagaaactacgaactttcaaaaagaagctttcgcagtctctcccggatcaccatgaagagctccatgcagaacaaatgcgttgcaaggaattagaaaatgcagttgggagctggacagatgacttgacccagttgagcctgctgaaggacaccctctctgcctatatcagtgctgatgatatctccattcttaatgaacgcgtagagcttctgcaaaggcagtgggaagaactatgccaccagctctccttaaggcggcagcaaataggtgaaagattgaatgaatgggcagtcttcagtgaaaagaacaaggaactctgtgagtggttgactcaaatggaaagcaaagtttctcagaatggagacattctcattgaagaaatgatagagaagctcaagaaggattatcaagaggaaattgctattgctcaagagaacaaaatacagctccaacaaatgggagaacgacttgctaaagccagccatgaaagcaaagcatctgagattgaatacaagctgggaaaggtcaacgaccggtggcagcatctcctggacctcattgcagccagggtgaagaagctgaaggagaccctggtagccgtgcagcagcttgataagaacatgagcagcctgaggacctggctcgctcacatcgagtcagagctggccaagccaatagtctacgattcctgtaactcggaagaaatacagagaaagcttaatgagcagcaggagcttcagagagacatagagaagcacagtacaggtgttgcatctgtcctcaacctgtgtgaagtcctgctgcacgactgtgacgcctgtgccactgatgccgagtgtgactctatacagcaggctacgagaaacctggaccggcggtggagaaacatttgtgctatgtccatggaaaggaggctgaaaatcgaagagacgtggcgattgtggcagaaatttctggatgactattcacgttttgaagattggctgaagtcttcagaaaggacagctgcttttcccagctcttctggggtgatctatacagttgccaaggaagaactaaagaaatttgaggctttccagcgacaggtccacgagtgcctgacgcagctggaactgatcaacaagcagtaccgccgcctggccagggagaaccgcactgattcagcatgtagcctcaaacagatggttcacgaaggcaaccagagatgggacaacctgcaaaagcgtgtcacctccatcttgcgcagactcaagcattttattggccagcgtgaggagtttgagactgcgcgggacagcattctggtctggctcacagagatggatctgcagctcactaatattgaacatttttctgagtgtgatgttcaagctaaaataaagcaactcaaggccttccagcaggaaatttcactgaaccacaataagattgagcagataattgcccaaggagaacagctgatagaaaagagtgagcccttggatgcagcgatcatcgaggaggaactagatgagctccgacggtactgccaggaggtcttcgggcgtgtggaaagataccataagaaactgatccgcctgcctctcccagacgatgagcacgacctctcagacagggagctggagctggaagactctgcagctctgtcggacctgcactggcacgaccgctctgcagacagcctgctttctccacagccttcctccaatctctccctctcgctcgctcagcccctccggagcgagcggtcaggacgagacaccccggctagtgtggactccatccccctggagtgggatcacgactatgacctcagtcgggacctggagtctgcaatgtccagagctctgccctctgaggatgaagaaggtcaggatgacaaagatttctacctccggggagctgttggcttatcaggggaccacagtgccctagagtcacagatccgacaactgggcaaagccctggatgatagccgttttcagatacagcaaaccgaaaatatcattcgcagcaaaactcccacggggccggagctagacaccagctacaaaggctacatgaaactgctgggcgaatgcagtagcagtatagactccgtgaagagactggagcacaaactgaaggaggaagaggagagccttcctggctttgttaacctgcatagtaccgaaacccaaacggctggtgtgattgaccgatgggagcttctccaggcccaggcattgagcaaggagttgaggatgaagcagaacctccagaagtggcagcagtttaactcagacttgaacagcatctgggcctggctgggggacacggaggaggagttggaacagctccagcgtctggaactcagcactgacatccagaccatcgagctccagatcaaaaagctcaaggagctccagaaagctgtggaccaccgcaaagccatcatcctctccatcaatctctgcagccctgagttcacccaggctgacagcaaggagagccgggacctgcaggatcgcttgtcgcagatgaatgggcgctgggaccgagtgtgctctctgctggaggagtggcggggcctgctgcaggatgccctgatgcagtgccagggtttccatgaaatgagccatggtttgcttcttatgctggagaacattgacagaaggaaaaatgaaattgtccctattgattctaaccttgatgcagagatacttcaggaccatcacaaacagcttatgcaaataaagcatgagctgttggaatcccaactcagagtagcctctttgcaagacatgtcttgccaactactggtgaatgctgaaggaacagactgtttagaagccaaagaaaaagtccatgttattggaaatcggctcaaacttctcttgaaggaggtcagtcgtcatatcaaggaactggagaagttattagacgtgtcaagtagtcagcaggatttgtcttcctggtcttctgctgatgaactggacacctcagggtctgtgagtcccacatcaggaaggagcaccccaaacagacagaaaacgccacgaggcaagtgtagtctctcacagcctggaccctctgtcagcagtccacatagcaggtccacaaaaggtggctccgattcctccctttctgagccagggccaggtcggtccggccgcggcttcctgttcagagtcctccgagcagctcttccccttcagcttctcctgctcctcctcatcgggcttgcctgccttgtaccaatgtcagaggaagactacagctgtgccctctccaacaactttgcccggtcattccaccccatgctcagatacacgaatggccctcctccactctgaactaagcagatgccatctgcagaagtgctggtagcataaggaggatcgggtcataagcaatcccaaactaccaacaagaggaccttgatcttggcgaaagccctcggtgtggcagctttagccctcctccagatcacatgtgtgcaaattatggcttcagaggtggaagataaacagtgacgggggaacaaacagacaacaagaaggtttggaagaaatctggtttgagactctgaaccttagcactaaggagattgagtaaggacctccaaagttccccggactcatgaattctgggcccttggcccattctgtgcacagccaaggacttcagtagaccatctgggcagctttcccatggtgctgctccaaccatcagataaatgaccctcccaagcaccatgtcagtgtcgtacaatctaccaaccaaccagtgctgaagagattttagaaccttgtaacatacaatttttaagagcttatatggcagcttcctttttaccttgttttcctttggggcatgatgttttaacctttgctttagaagcacaagctgtaaatctaaaaggcacttttttttagaggtataaagaaaaactagatgtaataaataagatcatggaaggctttatgtgaaaaaagttgaatgttatagtaaaaaaaaaaagatatttatgtatgtacagtttgctaaagccaagttttgtttgtattgatttctttgcatttattatagatattataaaatagtt

SEQ ID NO: 4963 - protein, 3321 aa, Homo sapiens; identical to SEQ ID NO: 639

SEQ ID NO: 4964 - DNA, 1838 bp, Homo sapiens
atagtagaattattcattataatatttggctttgacaaaaatcagtctgatctcgggaaacctggagaaatttattttctgtactctaatgttctttcattttggtgaccatcaaggtgctgggagaggaattagatggctgtaattcaaagttaatggaattagatgcagcagtacagaaattcttggaacagaatggccaactgggtaagccactggccaagaagataggaaaactgactgaacttcaccagcagaccattagacaagctgagaatcggctctccaagctcaatcaggcagcatcacatttagaagaatacaatgaaatgcttgaattaattttgaagtggattgaaaaagctaaagtcttggctcatggaactattgcatggaattctgcaagccagcttcgggaacaatatattttgcatcagaccctgctagaagaatccaaagaaattgacagtgagctggaagcaatgactgagaaattacagtacctcactagcgtgtactgtacagaaaaaatgtctcagcaagtggcagaactgggacgggagactgaggagttgcgacagatgatcaaaattcgtttgcagaacctccaagatgcagctaaggatatgaaaaaatttgaagcagagttgaaaaagttacaagctgccttggagcaagcccaggcaacactgacttctccagaagttggacgtctcagtctcaaggagcagctctctcatcggcagcatttgttgtctgagatggagtcactgaagccgaaggtgcaagcagtgcagctctgccagagtgccctccggatccccgaggatgtggttgccagcttacctctctgtcatgctgctctgcggctgcaggaagaggccagccggctgcagcacaccgccatccagcagtgtaacatcatgcaggcagctgtggtacaatatgaacaatatgagcaagaaatgaaacatctccagcaactgatagaaggagctcacagagagattgaggataaacctgttgccaccagtaacatacaggagctgcaggctcagatacacgaatggccctcctccactctgaactaagcagatgccatctgcagaagtgctggtagcataaggaggatcgggtcataagcaatcccaaactaccaacaagaggaccttgatcttggcgaaagccctcggtgtggcagctttagccctcctccagatcacatgtgtgcaaattatggcttcagaggtggaagataaacagtgacgggggaacaaacagacaacaagaaggtttggaagaaatctggtttgagactctgaaccttagcactaaggagattgagtaaggacctccaaagttccccggactcatgaattctgggcccttggcccattctgtgcacagccaaggacttcagtagaccatctgggcagctttcccatggtgctgctccaaccatcagataaatgaccctcccaagcaccatgtcagtgtcgtacaatctaccaaccaaccagtgctgaagagattttagaaccttgtaacatacaatttttaagagcttatatggcagcttcctttttaccttgttttcctttggggcatgatgttttaacctttgctttagaagcacaagctgtaaatctaaaaggcacttttttttagaggtataaagaaaaactagatgtaataaataagatcatggaaggctttatgtgaaaaaagttgaatgttatagtaaaaaaaaaaagatatttatgtatgtacagtttgctaaagccaagttttgtttgtattgatttctttgcatttattatagatattataaaatagtt

SEQ ID NO: 4965 - protein, 311 aa, Homo sapiens
MELDAAVQKFLEQNGQLGKPLAKKIGKLTELHQQTIRQAENRLSKLNQAASHLEEYNEMLELILKWIEKAKVLAHGTIAWNSASQLREQYILHQTLLEESKEIDSELEAMTEKLQYLTSVYCTEKMSQQVAELGRETEELRQMIKIRLQNLQDAAKDMKKFEAELKKLQAALEQAQATLTSPEVGRLSLKEQLSHRQHLLSEMESLKPKVQAVQLCQSALRIPEDVVASLPLCHAALRLQEEASRLQHTAIQQCNIMQAAVVQYEQYEQEMKHLQQLIEGAHREIEDKPVATSNIQELQAQIHEWPSSTLN

SEQ ID NO: 4966 - DNA, 27481 bp, Homo sapiens
agtgtgggcgagccagccagggtgagcgcgggcgccgggccgcggccgccggccgcagcgggctgagattgttgtcctctgtcaccagggcggctgggctcccgcagtcctgcagaccgcgcccgatcccggcgacagggcgggcggacagccgcgcatccccggggtcccgccgagcctgggcgcagagagccgggaggaagcgttcgctcgcttcgccttgctgctgggaaactgaacgaggccgagagagaaggttcttgagttcatgtaagaggacagtcttaaaacggaagaagaaaaagaagcagttcagtctttgggagagctgcctccttgttgagtgctgcaaaggcctggaattcatttatgacagaatagatctagaaaagtccaagcatgttttctagagtggtgtagccctgtgctgcctccagtgaagagtctcttggtgttggcttcgtgcttccggagggaccatggcaacctccagaggggcctcccggtgtcctcgggatatcgccaatgtgatgcagaggctgcaagatgagcaagagatagtacaaaaacgaactttcacaaaatggatcaactctcatctggccaagcggaaacctccaatggtggtggacgatctttttgaagacatgaaagatggtgttaaactgcttgcccttctggaggtcctgtctgggcagaaactgccttgtgaacaaggacgccggatgaagcgaatccatgctgtggctaacattggcacggcactcaagttcctcgaaggaagaaagtccatgcacagaggatcaccgattaaattagtcaacattaactccaccgatatagctgatggccgaccctcaatagttcttggattgatgtggaccattattctatatttccagattgaagagttgaccagcaacctgccccagctccagtctttgtccagcagcgcatcctccgtggacagcatagttagctctgagactcccagcccaccaagtaaacggaaggtgaccaccaagatccaaggaaatgctaagaaggctttattaaagtgggttcagtacacagctggcaagcagactggaatagaagtaaaagattttgggaagagttggagaagcggggttgcctttcattcagttattcatgccattcgaccggaattggtggacttggagacagtgaaaggcagatccaaccgagaaaatttggaggatgctttcactatcgccgaaacagaactggggatcccaagactgctagatcctgaagacgttgatgtggataaaccagatgagaaatctattatgacctatgtagcccagtttctgaaacattatcctgacatccacaatgcaagcactgatgggcaagaggatgatgaaatacttccaggtttcccatcttttgcaaattctgtacaaaattttaagagagaagacagagtaatttttaaggaaatgaaagtttggatagaacaatttgagagagatttgacaagagcacagatggtggaatcaaatttacaggataaatatcagtcatttaagcacttcagagttcaatatgaaatgaagaggaaacagattgaacatttaatacaaccattacacagagacggtaaattgtcacttgaccaagcattggtaaaacaatcttgggatagagtgacctccaggctctttgactggcatatacagcttgataaatctcttcctgcacctctgggcaccataggtgcctggctgtacagagcggaggtggccctgagagaggaaataaccgttcaacaggtccacgaggaaacagcaaacacgatacaacggaaacttgagcaacataaggatctgcttcaaaacacggatgcccacaaaagagcattccatgaaatctaccggaccaggtctgttaacgggattccagtgccacctgatcaattagaggacatggccgagaggtttcattttgtttcctccacatcagagctacacctaatgaaaatggaatttttagaattaaagtaccgtctgctctcactgctggttcttgcagagtcaaagctgaagtcttggatcattaagtacgggaggagagagtcagtggagcagcttctacaaaactacgtgtcttttatagaaaatagcaagttctttgaacaatatgaggtgacataccagatcttgaaacagacagctgagatgtatgtcaaagcagatggttcagtggaagaagctgagaatgtgatgaaattcatgaatgaaaccaccgctcagtggaggaatctctcagtagaagtgaggagtgtgaggagcatgctggaagaagtgatctctaactgggatcgctatggcaatacagtggctagtctgcaagcctggctagaggatgctgaaaaaatgctcaatcaatcagaaaatgccaaaaaggatttttttcgaaatttacctcattggattcagcagcatactgccatgaacgatgctggcaattttctaattgaaacctgtgatgagatggtttcccgtgacctgaagcagcaattactgttgctaaatgggcggtggagggagttgtttatggaagtcaagcaatatgctcaagctgatgagatggacagaatgaagaaggaatacacagactgtgttgttaccctgtctgcttttgcaacggaagcccataagaaactttctgaacccttagaagtctcttttatgaatgtcaagctattaattcaagacttggaggatattgagcagagggtgcctgtgatggatgcccaatacaagataattacaaagacagcacacctcattaccaaagaaagcccccaagaagaaggaaaagaaatgtttgcgaccatgtcaaagctcaaagagcagctaaccaaggtcaaagaatgttactccccactcctttatgagtctcagcagctgttgattccgttggaggaattagaaaagcagatgacgtccttttatgactcacttgggaaaatcaatgaaattatcacagttcttgagcgtgaggcacaatcgagtgccctttttaaacaaaaacatcaggaactgttagcttgtcaagaaaactgtaagaaaaccttgacacttattgagaaaggcagtcaaagtgttcaaaagtttgtgaccttgagcaacgtgttaaagcattttgatcagacgaggctacaaagacagattgcagatattcatgttgcttttcagagtatggtaaagaaaactggagattggaagaagcatgtggaaaccaacagtcgcttgatgaagaagtttgaggagtctcgagcagagttggagaaggtactgcggattgctcaggagggcctggaggaaaagggggatccagaggagctcctgcggagacacactgagtttttcagtcagctggatcagagggtgctcaatgctttcctgaaagcttgtgatgaactcaccgacatccttccagagcaggagcagcaggggctgcaggaagctgttcgaaagctccacaaacaatggaaggatcttcaaggagaagccccttatcatttgcttcatctgaagattgatgtggagaagaataggttcttagcctctgtagaagaatgcagaactgagctggatcgagagaccaagctgatgccccaggaaggcagtgaaaagataattaaagagcacagggttttcttcagtgacaaaggtcctcatcatctctgtgagaaaaggttacagctcatcgaggaactctgtgtgaaactcccagtgcgggacccagtaagggacacacctggaacctgtcacgtgactctcaaagagctcagagctgccattgacagcacctacaggaagctcatggaagacccagacaagtggaaggactacactagcagattctctgagttctcatcttggatatctacaaatgagacacaattaaaggggatcaagggtgaggccatcgatactgccaaccacggagaggttaaacgtgccgttgaagagatcagaaatggtgttaccaaaaggggtgagaccctcagctggctgaaatccaggctgaaagttttgacagaagtttcttctgagaatgaagcccaaaagcagggagatgagctggcaaaattatccagctctttcaaggctcttgtgacgctgctgtcagaggttgaaaagatgctaagcaattttggggactgtgtccagtacaaagaaatagtcaaaaattctctcgaagaattaatttctggctctaaagaagtccaggaacaagctgagaagatcttggatactgaaaatctgtttgaagcacagcagttacttcttcatcaccagcaaaagacaaagcggatctcagcaaagaagagagatgtgcagcagcagatcgcgcaggcgcagcagggagaaggggggctgcctgaccgaggccacgaggagctgcggaagctggagagcacactggatggcctggagcgcagccgggagaggcaggaacgccgcatccaggtcacattaagaaaatgggagcgatttgaaacaaacaaagaaacagtagtaagatacctttttcaaacaggttccagtcatgaacgcttcttgagttttagcagtttggaaagtttatcttcagaactggaacaaacaaaggagttttctaaacggacagaaagtattgcagtccaggctgagaaccttgtaaaggaagcttcagagataccgcttgggccccaaaataagcagctgcttcaacagcaggccaagtcaatcaaagaacaagtcaaaaaattagaagacacgcttgaagaagatattaaaaccatggaaatggtgaaaaccaagtgggatcattttggcagtaattttgagactctgtccgtctggataactgagaaagaaaaagaactcaatgccttggaaacttcgtcatctgccatggacatgcaaatcagccaaattaaggtcacaattcaggaaatagaaagtaagctcagcagcattgtaggattagaagaagaagcccagtcttttgctcagtttgttaccactggagaatctgctcgaattaaagccaagttgacacaaataagaagatacggggaagagcttcgagagcatgcacagtgtctggaaggaacaatcctgggacatttatctcagcagcaaaagtttgaagagaaccttagaaagatccagcaatctgtgtctgaatttgaagataaacttgctgttccaattaaaatatgttcttcagctacagaaacatacaaagttcttcaagaacatatggatctctgccaggccctggagtcactgagcagcgcgatcactgccttctcagccagtgccaggaaggttgtgaacagagattcctgtgttcaggaggctgcggctctacagcagcaatacgaggacatcctaaggagggcgaaggagagacagacggcgctggagaatctgctggcccactggcagaggctagagaaagaactatcatcctttttgacctggttagagcggggtgaagctaaagccagttccccagaaatggacatttctgcagacagagtcaaagtggaaggtgaacttcagttaatacaggcactgcaaaatgaagttgtatcccaggcctcattctatagcaaacttttgcaattgaaggaatcattgttctcagtagcctccaaagatgatgtgaaaatgatgaaactacatttggagcagttggatgagagatggagagatttaccacagatcattaacaaaaggattaattttcttcagtctgtggttgctgaacaccagcaatttgatgagctgctgctttccttttctgtctggattaaactgtttctcagtgaattacaaactacctctgagattagcataatggaccatcaagtagcccttactcggcataaggaccacgcagcagaagtagagagcaaaaagggcgaattgcagagtctgcagggtcacttagcaaagttgggttctctgggccgtgctgaggacctccacctcctgcagggaaaggctgaggactgcttccagctgtttgaggaggccagccaggttgtggagaggcggcagcttgccctgtcccatttggcagaattcctccagagccatgcctctctgtccggcattctccgccagctgaggcaaacagtggaagcaaccaacagtatgaataagaacgagtctgatttgatagaaaaggacctcaatgatgctcttcaaaatgctaaagcattagaatctgctgccgtcagtctggatggcattctttccaaagcccaataccatctgaaaatcgggagctctgagcaaaggacttcctgcagagccacggctgatcagctctgtggagaggtagagaggatccagaaccttctgggaaccaagcagagtgaggcagatgctctggcagtgttgaaaaaagcattccaagaccagaaagaggagcttctgaaaagcattgaggacattgaagaaaggactgacaaagagcgattgaaagaacctacccgccaagctcttcagcagaggttaagagtgtttaatcagctagaagatgaattgaattctcacgagcatgaactatgttggttgaaagacaaagccaagcaaattgcccagaaagatgtagcttttgcacctgaagttgacagggagataaaccgcttagaggtcacctgggatgataccaaaagactaattcatgaaaatcagggtcagtgctgtggacttattgacttaatgagagaatatcagaacctgaaatcagctgtatctaaagtcttagaaaatgccagcagtgtgattgtaaccagaactaccataaaagatcaggaggatcttaaatgggctttttccaagcatgaaactgccaagaacaaaatgaattacaaacagaaagacttggataactttaccagcaaaggaaaacacttgttatctgagctgaagaaaattcacagtagtgatttcagcttggtgaaaacagacatggagagcaccgtggacaaatggctggatgtatcagagaaacttgaagaaaacatggataggctgagagtaagcctgtccatttgggatgatgtactgtcaactagagatgagattgagggatggtcaaacaactgcgttccacagatggcagaaaacatcagcaacctggataaccacctcagagctgaagaactgcttaaagaatttgagtctgaagttaaaaacaaagcattgagattggaagaactgcattccaaagttaatgatctgaaagaattaactaaaaatctagaaacaccgccagaccttcagtttatagaagcagacttaatgcagaaactggagcatgccaaagaaataactgaagtagcaaaaggaaccctgaaggatttcacggctcaaagtacacaagtggagaagtttattaatgacataacaacatggttcacaaaagtggaagaatcgttgatgaactgtgcccaaaatgagacttgtgaagcattgaaaaaagtcaaggatatacaaaaagaacttcaaagtcaacaaagcaacatcagctctacccaagaaaatctcaatagcttgtgccgcaagtaccactcagctgagttggagagcctgggccgtgcaatgactggtctgataaagaaacatgaagccgtgagccagttgtgctccaaaacccaggccagcctgcaggaatctctggaaaaacacttcagtgagtctatgcaggaattccaagaatggtttttgggagcaaaggcagcagcaaaagaatcatcagatcgcaccggtgacagcaaagttctagaagcaaagctccatgatcttcagaacattttggactcagtcagtgatgggcagagcaaacttgatgcagtgactcaagaaggacaaactttgtatgcacatttgtctaaacaaattgtcagtagcattcaagaacaaatcacaaaggccaatgaagagtttcaagcatttctgaaacaatgccttaaagataagcaggctcttcaagactgtgcttcagaacttggaagctttgaagatcagcacagaaaactgaacttatggatccatgaaatggaagaaaggttcaatacggaaaacttgggagagagtaaacagcacattcctgagaagaaaaatgaagttcataaagttgaaatgtttttgggagaactgctggctgcaagagagtctcttgataagctttcccagagagggcagcttctgagtgaagaaggccacggtgctgggcaggagggccgcctgtgttcccagctcctcacaagccaccagaacctacttagaatgaccaaagagaaactccggagctgccaggtggcccttcaggagcacgaagccctggaggaagcactgcaaagcatgtggttctgggtgaaggccattcaggacagactggcctgtgcagagagcactcttgggagcaaagacaccctggagaaacggctgtcacaaatacaggatattctcctgatgaaaggtgaaggggaagttaagttgaatatggccattggcaagggggaacaggccttgagaagtagcaacaaagaaggtcagagggtgattcagactcagttagagacccttaaagaagtgtgggctgacatcatgagctcctccgtccacgctcaaagcactttagagtctgtgattagccaatggaatgactatgtagagaggaaaaaccagttggagcagtggatggaatcagtggatcaaaaaatagaacatcccttacaaccacagccaggtctgaaagagaagttcgtcctgcttgaccacctccagtccatcctgtctgaggcagaagatcacacgagagcccttcaccgtctaattgcgaagtccagggagctctacgaaaagacagaggatgagtctttcaaggacacagctcaagaggagctgaaaacacagtttaatgatataatgactgttgccaaggaaaaaatgaggaaagtggaagagattgtgaaagatcatctaatgtatttagatgcggtccacgagttcacagattggctccattcagcaaaggaagaacttcaccggtggtcagatatgtctggagattcatcagccacccagaaaaagttatcaaaaattaaggagctgatagattccagagagattggtgcaagccgtctcagcagagtggagtcgctggctcccgaagtgaaacagaacacaactgccagtgggtgtgagctcatgcacacggagatgcaggccctgcgtgccgactggaagcagtgggaagacagtgtattccaaacgcagagctgtttggagaacctggtcagccagatggccctttcggagcaggaattctcaggccaagtggctcaactggagcaggccctggaacagttcagtgcccttctgaaaacctgggctcagcagttaaccctcctggaaggcaagaacacggatgaggagatagtggaatgctggcacaaaggacaagagatactggatgctttgcaaaaagcagagcctagaacagaggatctcaagtctcagctgaatgaactttgtcgattttccagagacctgagtacctacagtggaaaagtttctggcttgattaaagagtataattgtctttgtttgcaagcatccaagggctgccagaataaagaacagattttacagcaaagatttcgaaaggccttcagggatttccagcagtggttggttaatgcaaaaatcactaccgccaagtgttttgatatacctcaaaatataagtgaagtttcaactagtcttcagaaaatacaggagtttttgtcagaaagtgaaaatggacagcacaagctaaacatgatgctgtctaaaggggaacttctgagtaccctgctgaccaaagagaaagcgaaagggatccaggccaaagttacagctgcaaaagaagattggaaaaattttcattcaaatctccaccaaaaagaatctgctctagagaatctaaagatccaaatgaaggactttgaagtaagtgctgagcctatccaggactggctgagtaaaactgagaagatggtccatgaaagcagcaatcgcctctatgatctgccagcaaagaggagggagcagcagaagctccagtctgtccttgaggaaatacactgctacgagcctcagctcaacaggctgaaagagaaagctcagcagctgtgggaaggacaagctgccagcaagagctttaggcacagagtgtcgcagctgtcttctcagtatctagcgctaagcaatttaacaaaggagaaagtgtcaagactggatagaatcgttgcagaacacaatcagttctctcttgggattaaagaattacaagactggatgacggatgcgattcacatgctggattcatactgccacccgacatccgacaaaagtgtgctggacagcaggacgctcaagctcgaggctctattatcagtcaaacaggaaaaagagattcagatgaaaatgatagtgaccaggggagaatctgtccttcagaatacttctccagaaggcattcccactattcagcagcagctgcagagtgtgaaggatatgtgggcatcccttttgtctgcagggattcgttgtaaaagccaactcgaaggagctctctccaagtggacaagttatcaggatggcgttcgacagttctccggttggatggatagtatggaagccaacctgaatgaatcagaaaggcagcatgcggagctgcgggataaaacaacgatgctcggaaaagccaagttattaaatgaagaagtgctgagttacagcagcttgctggagaccatcgaagtcaaaggggctggcatgacagaacactatgtcacccagctagaactccaggatctacaggaacgatacagagccatccaagagagggccaaggaagccgtaaccaagtctgaaaaacttgtccgcctgcaccaagagtatcagagagacctaaaggcatttgaagtttggttggggcaagaacaagaaaagctcgaccagtattcagttcttgaaggtgatgcccacactcatgagacaacattgcgtgatcttcaggagctacaggtacactgtgcagaggggcaggccctgttgaactcagtgctgcacaccagagaggatgtgatcccatcaggtatcccacaggcagaggaccgggctttagagtctctccggcaagactggcaggcttaccagcacaggctgtccgagactcgaactcagttcaataacgtggtgaacaaattgaggctaatggagcaaaagtttcagcaagtagatgaatggctcaaaacagcagaggagaaaaagtggcacgaagaagtgactgcatacagagatgaagttgaggaagtgggagctagagctcaggagatactggacgagagccacgtgaacagcagaatgggttgccaggccacccagctgacttccagataccaggccctgcttctccaagtgctggaacaaataaaattcctggaggaggagattcagagtttggaggaatcagaatcatccctcagttcctattctgattggtatggctctactcataaaaacttcaagaatgtggctaccaagattgacaaagtagatacagtaatgatggggaagaaattgaagacgttggaggttttgctcaaagacatggagaaaggtcacagtttgctgaaatcagcccgggagaaaggagagagggctgttaaatacttggaggaaggcgaggcagagaggttaagaaaggagattcatgatcacatggagcagttgaaggaactgaccagcactgtccggaaagaacacatgacgctggaaaaaggtcttcatttagcaaaggaattctcagataaatgcaaagcactgacacagtggatagcagaataccaggaaattctacatgttcctgaagaacccaaaatggaattatatgagaaaaaagctcagttatctaaatacaagtcacttcaacaaacggtgctgtcccatgaaccatcagtaaagtcagtgagagagaagggtgaagctcttttggaactggtgcaggacgtcactttaaaggacaaaatagatcaacttcaaagtgattaccaggacctgtgcagcataggaaaggcaatgatggaagaaattgctggttttgaagaccgtttgaacaatcttcaaatgaaaggtgatactttgattggccaatgtgcagaccacctgcaagcgaaacttaaacaaaacgtgcatgctcatctgcagggcacaaaggacagctactcagcgatctgcagcacagctcagaggatgtaccagagtttggaacacgaacttcagaagcacgtcagccgacaagacaccctgcagcagtgccaggcctggctttctgcagtccagccggatttagagccaagtcctcaaccacctcttagtagggcagaagccattaagcaggtcaaacacttcagagctttgcaagagcaggcaaggacctacctagatctcctttgctccatgtgtgacctgtcaaatgcttcggtgaaaaccacagcaaaagacattcaacaaacagagcaaacgattgaacaaaagcttgtccaggcccagaacttaactcagggctgggaagagatcaagcacctgaagtctgagctctggatttacctgcaagatgctgatcagcaactgcagaacatgaagaggaggcactctgagctggagctgaacattgcacagaacatggtttcacaagttaaggattttgttaagaaactacagagcaaacaggcatccgtgaacaccataatagaaaaggtgaataagttaacaaagaaggaggaatcgcctgaacacaaggaaataaatcatttaaatgatcagtggctcgatttgtgccgtcagtctaacaacctgtgcttgcaaagggaagaggatcttcagagaacaagagattaccatgactgtatgaatgttgttgaagtgttcctagaaaaatttactacagaatgggataacttggccagatctgatgcagagagtacagctgtccacctggaagctttgaaaaagttagcattggcattgcaggagagaaagtatgctattgaagatctgaaagatcaaaagcagaaaatgatagagcatctgaatttagatgacaaggagttagtcaaagaacagacgagtcatttagagcaacgttggtttcagcttgaggacctcattaaaaggaaaatccaagtgtcagtcaccaacttggaggagttaaatgtggtgcagtccagatttcaggagctaatggagtgggcagaagagcaacaacccaacatcgccgaggcccttaagcagagccctcctccagatatggctcagaaccttctcatggatcacctggccatctgcagtgaactggaggccaagcagatgctcctgaaatcgcttataaaggacgcagacagggtcatggcagatcttggtctcaatgagcgacaggtcatccagaaggctctctctgatgcacaaagccacgtgaattgtctcagtgacttagtgggccagcgaagaaagtacttaaacaaagccttgtccgagaaaacccagtttctcatggcagtgttccaggccaccagccaaattcagcaacatgagcgaaagataatgttccgtgaacacatctgtctgttaccagatgatgtgagcaaacaagtcaaaacatgtaagagtgcacaagccagcctcaagacttaccaaaatgaagtcactggactttgggcccagggtcgcgaactaatgaaggaagtcacagagcaggaaaagagtgaagtgctggggaagcttcaggaattgcagagtgtctatgacagtgttttacaaaagtgcagtcaccggttacaagaactagagaagaatttggtttctaggaagcattttaaggaagattttgataaagcttgccactggctaaaacaagcagatattgttacatttcctgaaatcaacctaatgaatgagagttctgagcttcatacacaactggctaaataccaaaacattcttgaacaatctccagaatatgaaaatcttctacttacgctgcagagaactgggcagaccatattaccatcgctgaatgaagtcgatcattcctacctcagtgaaaagctaaatgctttgcctcgacaatttaatgtaattgttgccttggctaaagacaagttctataaagtccaggaagcaattcttgctcggaaggaatatgcttccttgattgagttgacaacccagtctctgagtgaacttgaagcccaattcttgaggatgagcaaagttcccaccgacctggccgttgaggaggctctttctctgcaagatggttgcagagccattctggacgaggtggcgggccttggggaggcggtggatgaactgaaccagaaaaaagaaggttttcgcagcacaggtcagccttggcagccagacaagatgctgcaccttgtcaccttatatcacaggctgaagcgacaaacagaacagagggttagcttattagaagacaccaccagtgcttaccaagaacacgagaagatgtgccaacagctggagagacaactgaagtctgtaaaagaggagcagtccaaagtgaatgaggaaacgctgcctgcagaggagaagctcaaaatgtatcactccctggcaggaagtctccaggactcagggattgtactgaaacgagtaaccatacatcttgaagatcttgccccacaccttgaccccttggcttatgagaaagccaggcatcagatccagtcctggcaaggggagttaaaactgttgacttctgccattggtgagacggtgacagaatgtgagagccgaatggtgcagagtatagacttccagactgagatgagtcgctccctggactggctgaggagagtgaaggcagagctcagtgggccggtgtacctagacctcaacctgcaggacatccaagaggaaatcagaaaaatccaaattcatcaggaagaggtccagtccagcttgagaatcatgaatgcgctgagtcacaaggaaaaggagaagttcacaaaggccaaggagctgatttctgcggatttagaacacagcctcgctgagctctcagagctggatggagacatccaggaagccttacgcaccagacaggctaccttgactgaaatatatagccagtgtcaaaggtattatcaggtatttcaagcagccaatgactggcttgaggatgcccaagaattgttacagctggcaggcaatggcctagacgtggagagcgcagaggaaaatctcaaaagccacatggaatttttcagtacagaggatcagttccatagtaacctggaggagctccacagcctggtagccaccctggacccactcatcaagccaaccggcaaagaagacctagaacagaaagtggcttctctggaactcaggagccagaggatgagccgggactctggtgcccaagtggatctcttgcagagatgcacagctcaatggcacgattaccagaaagcaagggaagaggttattgaattgatgaatgatacagaaaagaaattgtctgagttttctttgttgaagacttcgtctagtcatgaagcggaagaaaaattgtcagaacacaaggctttagtgtcagtggttaactctttccatgagaaaattgtggcccttgaggaaaaagcttcacaactggagaaaaccggaaatgatgccagcaaagccaccctgagcaggtcaatgaccaccgtctggcagcgctggacacgccttcgagctgtggcccaggaccaggagaagatcctggaagatgcagtggatgagtggacgggctttaacaacaaggttaaaaaggccactgaaatgattgatcagctgcaagataagttacctggaagttcagcagagaaagcatcgaaagcagagctcttaactcttcttgaataccacgacacgttcgttctggagctggagcagcagcagtcggccttgggcatgctgcggcagcaaaccctgagcatgctccaggatggagccgccccaacccctggggaagagcctccgctcatgcaggaaatcaccgccatgcaagatcggtgcctgaacatgcaggagaaagtgaagactaatggaaagttggtgaagcaagagctgaaggaccgagaaatggtggagactcagatcaattctgtgaaatgttgggttcaggaaacgaaagaatatttagggaatccaacaatagaaatagatgctcaacttgaagaacttcagattctcctaacagaagccacaaatcaccgacagaacattgaaaaaatggcagaagaacagaaggagaagtacttaggtctttataccatattaccttctgaactctcccttcagttggctgaagtggcgttagatctaaagatccgagatcagatccaagacaaaataaaagaagttgagcagagcaaggccacgagccaggaactcagccggcaaattcagaagttagctaaagacctcacaactattctaactaagctgaaagcgaagacagataatgtagttcaagctaaaactgaccaaaaggtgctgggagaggaattagatggctgtaattcaaagttaatggaattagatgcagcagtacagaaattcttggaacagaatggccaactgggtaagccactggccaagaagataggaaaactgactgaacttcaccagcagaccattagacaagctgagaatcggctctccaagctcaatcaggcagcatcacatttagaagaatacaatgaaatgcttgaattaattttgaagtggattgaaaaagctaaagtcttggctcatggaactattgcatggaattctgcaagccagcttcgggaacaatatattttgcatcagaccctgctagaagaatccaaagaaattgacagtgagctggaagcaatgactgagaaattacagtacctcactagcgtgtactgtacagaaaaaatgtctcagcaagtggcagaactgggacgggagactgaggagttgcgacagatgatcaaaattcgtttgcagaacctccaagatgcagctaaggatatgaaaaaatttgaagcagagttgaaaaagttacaagctgccttggagcaagcccaggcaacactgacttctccagaagttggacgtctcagtctcaaggagcagctctctcatcggcagcatttgttgtctgagatggagtcactgaagccgaaggtgcaagcagtgcagctctgccagagtgccctccggatccccgaggatgtggttgccagcttacctctctgtcatgctgctctgcggctgcaggaagaggccagccggctgcagcacaccgccatccagcagtgtaacatcatgcaggcagctgtggtacaatatgaacaatatgagcaagaaatgaaacatctccagcaactgatagaaggagctcacagagagattgaggataaacctgttgccaccagtaacatacaggagctgcaggctcagatttctcggcatgaggagctggcgcagaaaattaagggctaccaggagcagatcgcttctttgaattccaagtgcaagatgctgacgatgaaagccaagcacgccaccatgctgctgacggtgaccgaggtcgaggggctggcggaagggacagaggacctggatggggagctcctccccacgccttcggcccacccctctgtggtcatgatgactgcaggtcgctgtcacactttgctgtcaccggtcactgaggagtctggggaggagggaaccaacagtgagatttcctctccacctgcctgtcgctccccttcacctgtggctaatacagatgcttctgttaaccaggacattgcatattaccaagccttgtctgctgagaggttgcagacagatgctgcaaaaattcaccccagcacatccgcatcccaggagttctatgaaccgggattggagccatccgctactgccaaactgggtgatttgcagcgttcttgggaaaccttaaagaatgtgatcagtgagaagcagcgcacactctatgaagctttggaacgccagcagaagtaccaggactccctccagtccatctctacgaagatggaggccattgagctgaaactcagtgagagcccagagcctggcaggagtccagaaagccagatggctgaacatcaggcattgatggatgagattctcatgctccaggatgaaatcaatgagctccagtcctctctcgcagaggagctggtatccgagtcttgtgaggccgaccctgcggagcagctggccttgcagtccacgctcactgtcttagccgagcgaatgtccaccatcaggatgaaagcctcggggaaacggcagcttttggaggagaagttgaatgatcagctggaggaacaaaggcaggaacaggccctgcagaggtatcgctgtgaagccgatgagctggacagctggctcttgagtaccaaggccactctggacactgcgctgagtccacccaaggagcccatggacatggaggcccagcttatggactgccagaatatgctggtggaaatagagcagaaggtggtggctttatcagaactgtcagtccacaatgagaacctgctgctggagggcaaagctcacaccaaggacgaggccgagcagctggctggaaagctgagaaggctcaaggggagcctgctggagctgcagagagccctgcatgataagcagctcaacatgcagggaacagcacaggagaaggaggagagcgatgttgacctaacagccacgcagagccccggcgtccaggaatggctggcccaagctcgcaccacatggacccagcagcggcagagcagtctccagcaacaaaaagagttagaacaggaattagccgagcagaagagtctccttcgctcagtagccagtcgtggagaggagattctaattcaacattcggcggcagagacctctggtgatgctggcgaaaaacctgatgtgttatcccaggagttggggatggaaggggagaaatcatccgctgaagaccagatgagaatgaaatgggaaagcctacatcaagaatttagtaccaagcagaaactactacagaatgttctggaacaggaacaagagcaagtgctttatagcaggccaaatcgactcttgtctggtgtgccactgtacaaaggggacgtgccaacccaagataaatctgcagttacatctttgctggatggactgaaccaagccttcgaggaggtttcatcccagagtggaggggcaaagaggcagagtatacacttggagcagaagttgtatgatggagtctcagccacctctacttggttggatgacgttgaagaacgtttatttgttgccacagcacttttaccagaagaaacagagacttgtctcttcaaccaagagattcttgccaaagacattaaggaaatgtctgaagaaatggataagaacaaaaacttgttttcccaagcttttccagagaatggtgataatcgagatgttattgaagatactttgggttgtcttttgggcaggttatccttgctagactcagtagtgaatcaacgatgtcatcagatgaaagaaagacttcagcaaatactaaatttccagaatgatctgaaagtgctgtttacatcactggctgacaacaaatacatcattctgcaaaaactggcaaatgtgtttgaacagcccgtagcagaacaaatagaggcaatacaacaggctgaagatggactcaaagaatttgatgcaggaatcattgaattaaagaggcgtggtgacaagctacaggtcgagcagccgtccatgcaagaactctccaagctccaggacatgtatgatgagctgatgatgatcattggctcccggaggagtggtctgaatcagaaccttacactcaagagtcagtatgagagggccctacaagatctggctgacctgctagaaactggtcaggagaagatggcaggagaccagaaaatcatcgtgtcttccaaagaggaaatccagcaactacttgacaaacataaggaatactttcagggcctggaatctcatatgatcttgactgaaacactcttcagaaagataatcagctttgcagtccaaaaggaaacccagttccatacagagctgatggctcaggcttctgctgtactgaaacgggctcacaagaggggtgtggagctggagtacattctagagacgtggtcccatctggatgaggaccagcaggagctcagcagacagctggaggtggtggaaagcagcatcccaagcgtgggtctggtggaggagaacgaggacaggcttattgaccgcataacactctaccagcatttaaaatctagccttaatgaataccagcccaaattatatcaagtattagatgatgggaaacgacttctgatatccatcagctgctcagatctagaaagccaactaaatcaacttggagagtgctggctaagtaacaccaataaaatgtctaaggaacttcacagactggaaacaatattgaaacactggaccagatatcaaagtgaatctgcagatctaattcactggttacaatctgcaaaagaccggctagaattttggactcagcaatctgtgacagtcccacaagagctggaaatggtccgtgatcatctaaatgctttcctggagttttctaaagaagtggatgcccaatcttccctgaaatcatctgttctgagtactggaaatcagctccttcgactaaaaaaggtggacacagccacgctgcgctctgagctgtcgcgcattgatagccagtggactgacctgctaaccaatatcccagccgtccaggagaagctccaccagctccagatggataaactgccttcccgccatgccatttctgaagtcatgagttggatttctctaatggaaaatgttattcagaaggatgaagataatattaaaaattccataggttacaaggcaattcatgaataccttcagaaatataagggttttaagatagacattaactgtaaacagctgacagtggattttgtgaaccagtccgtgctacaaatcagcagtcaggatgtggaaagtaagcgtagtgataagactgattttgctgagcaacttggagcaatgaataaaagttggcaaattctgcaaggtctagtaactgagaagatccagctgttggaaggcttattggaatcttggtcagaatatgaaaataatgtacaatgtctgaaaacatggtttgaaacccaggaaaagagactaaaacaacagcatcgaattggagatcaggcttctgttcaaaatgcactgaaagactgtcaggatctggaagatttgattaaagcaaaagaaaaagaagtagagaaaattgagcagaatggacttgctttgattcagaacaagaaagaagacgtctctagcattgtcatgagcacactgcgagagctcggccaaacctgggcaaatttagatcacatggttggacaattaaagatactgctgaaatcagtgcttgaccaatggagtagtcacaaagtggcctttgacaagataaacagttacctcatggaggccagatactctctttcccgattccgtctgctgactggctccttagaagctgtgcaagttcaggtggacaatcttcagaatctccaagatgatctggaaaaacaggaaaggagcttacagaaatttggctctatcaccaaccaattattaaaagagtgtcacccacccgtgacagaaactcttaccaatacactgaaagaagtcaacatgagatggaataacttgctggaagagattgctgagcagctacagtccagcaaggccctacttcagctttggcaaagatacaaggactactccaaacagtgtgcttcgacagttcagcagcaggaggatcgaaccaatgagctgttgaaggcagccacaaacaaggacattgccgatgatgaggttgccacatggattcaagattgcaacgacctcctcaaaggactgggcacagttaaagattccctcttttttctccatgagctgggagagcaactgaagcaacaagtggatgcttccgcagcatcagctattcaatcggatcaactctctttgagtcaacacttgtgtgccctggagcaagctctctgcaaacagcagacttcattacaggctggagttcttgattatgaaacctttgccaagagtttagaagctttggaggcctggatagtggaagctgaagaaatactacaagggcaggaccctagccactcatctgacctctccacaatccaggaaaggatggaagaacttaagggacagatgttaaaattcagcagcatggctccagatttagaccgtctaaatgagcttggatataggttacccttgaatgataaggaaatcaaaagaatgcagaatctgaaccgccattggtctctgatctcctctcagactacagaaagattcagcaagttgcagtcatttttgctacaacatcagactttcttggaaaaatgtgaaacatggatggaattcctagttcagacagaacaaaagttagcagtagagatttcaggaaattatcagcaccttttggaacagcagagagcacacgagttgtttcaagccgagatgttcagtcgtcagcagattttgcactcaatcattattgatgggcaacgtcttctagaacaaggtcaagttgatgacagggatgaattcaacctgaaattgacactcctcagtaatcaatggcagggagtgattcgcagggcccagcagaggcgggggatcattgacagccagattcgccagtggcagcgctatagggagatggcagaaaagcttcgtaaatggttggttgaagtgtcctacctccccatgagtggtctcggaagtgttcctataccactgcaacaagcaaggaccctctttgatgaagtgcagttcaaagaaaaagtgtttctgcggcaacaaggcagctacatcctgactgtggaggctggcaagcaactccttctctcggcggacagtggcgctgaggccgccttgcaggccgaactcgctgaaatccaagagaaatggaaatcagccagcatgcggctggaagaacagaagaaaaaactagccttcttgttgaaagactgggaaaaatgtgagaaaggaatagcagattccctggagaaactacgaactttcaaaaagaagctttcgcagtctctcccggatcaccatgaagagctccatgcagaacaaatgcgttgcaaggaattagaaaatgcagttgggagctggacagatgacttgacccagttgagcctgctgaaggacaccctctctgcctatatcagtgctgatgatatctccattcttaatgaacgcgtagagcttctgcaaaggcagtgggaagaactatgccaccagctctccttaaggcggcagcaaataggtgaaagattgaatgaatgggcagtcttcagtgaaaagaacaaggaactctgtgagtggttgactcaaatggaaagcaaagtttctcagaatggagacattctcattgaagaaatgatagagaagctcaagaaggattatcaagaggaaattgctattgctcaagagaacaaaatacagctccaacaaatgggagaacgacttgctaaagccagccatgaaagcaaagcatctgagattgaatacaagctgggaaaggtcaacgaccggtggcagcatctcctggacctcattgcagccagggtgaagaagctgaaggagaccctggtagccgtgcagcagcttgataagaacatgagcagcctgaggacctggctcgctcacatcgagtcagagctggccaagccaatagtctacgattcctgtaactcggaagaaatacagagaaagcttaatgagcagcaggagcttcagagagacatagagaagcacagtacaggtgttgcatctgtcctcaacctgtgtgaagtcctgctgcacgactgtgacgcctgtgccactgatgccgagtgtgactctatacagcaggctacgagaaacctggaccggcggtggagaaacatttgtgctatgtccatggaaaggaggctgaaaatcgaagagacgtggcgattgtggcagaaatttctggatgactattcacgttttgaagattggctgaagtcttcagaaaggacagctgcttttcccagctcttctggggtgatctatacagttgccaaggaagaactaaagaaatttgaggctttccagcgacaggtccacgagtgcctgacgcagctggaactgatcaacaagcagtaccgccgcctggccagggagaaccgcactgattcagcatgtagcctcaaacagatggttcacgaaggcaaccagagatgggacaacctgcaaaagcgtgtcacctccatcttgcgcagactcaagcattttattggccagcgtgaggagtttgagactgcgcgggacagcattctggtctggctcacagagatggatctgcagctcactaatattgaacatttttctgagtgtgatgttcaagctaaaataaagcaactcaaggccttccagcaggaaatttcactgaaccacaataagattgagcagataattgcccaaggagaacagctgatagaaaagagtgagcccttggatgcagcgatcatcgaggaggaactagatgagctccgacggtactgccaggaggtcttcgggcgtgtggaaagataccataagaaactgatccgcctgcctctcccagacgatgagcacgacctctcagacagggagctggagctggaagactctgcagctctgtcggacctgcactggcacgaccgctctgcagacagcctgctttctccacagccttcctccaatctctccctctcgctcgctcagcccctccggagcgagcggtcaggacgagacaccccggctagtgtggactccatccccctggagtgggatcacgactatgacctcagtcgggacctggagtctgcaatgtccagagctctgccctctgaggatgaagaaggtcaggatgacaaagatttctacctccggggagctgttggcttatcagatgtaatgatccccgaaagccctgaggcctatgtaaaactcacagaaaatgcaatcaaaaatacctccggggaccacagtgccctagagtcacagatccgacaactgggcaaagccctggatgatagccgttttcagatacagcaaaccgaaaatatcattcgcagcaaaactcccacggggccggagctagacaccagctacaaaggctacatgaaactgctgggcgaatgcagtagcagtatagactccgtgaagagactggagcacaaactgaaggaggaagaggagagccttcctggctttgttaacctgcatagtaccgaaacccaaacggctggtgtgattgaccgatgggagcttctccaggcccaggcattgagcaaggagttgaggatgaagcagaacctccagaagtggcagcagtttaactcagacttgaacagcatctgggcctggctgggggacacggaggaggagttggaacagctccagcgtctggaactcagcactgacatccagaccatcgagctccagatcaaaaagctcaaggagctccagaaagctgtggaccaccgcaaagccatcatcctctccatcaatctctgcagccctgagttcacccaggctgacagcaaggagagccgggacctgcaggatcgcttgtcgcagatgaatgggcgctgggaccgagtgtgctctctgctggaggagtggcggggcctgctgcaggatgccctgatgcagtgccagggtttccatgaaatgagccatggtttgcttcttatgctggagaacattgacagaaggaaaaatgaaattgtccctattgattctaaccttgatgcagagatacttcaggaccatcacaaacagcttatgcaaataaagcatgagctgttggaatcccaactcagagtagcctctttgcaagacatgtcttgccaactactggtgaatgctgaaggaacagactgtttagaagccaaagaaaaagtccatgttattggaaatcggctcaaacttctcttgaaggaggtcagtcgtcatatcaaggaactggagaagttattagacgtgtcaagtagtcagcaggatttgtcttcctggtcttctgctgatgaactggacacctcagggtctgtgagtcccacatcaggaaggagcaccccaaacagacagaaaacgccacgaggcaagtgtagtctctcacagcctggaccctctgtcagcagtccacatagcaggtccacaaaaggtggctccgattcctccctttctgagccagggccaggtcggtccggccgcggcttcctgttcagagtcctccgagcagctcttccccttcagcttctcctgctcctcctcatcgggcttgcctgccttgtaccaatgtcagaggaagactacagctgtgccctctccaacaactttgcccggtcattccaccccatgctcagatacacgaatggccctcctccactctgaactaagcagatgccatctgcagaagtgctggtagcataaggaggatcgggtcataagcaatcccaaactaccaacaagaggaccttgatcttggcgaaagccctcggtgtggcagctttagccctcctccagatcacatgtgtgcaaattatggcttcagaggtggaagataaacagtgacgggggaacaaacagacaacaagaaggtttggaagaaatctggtttgagactctgaaccttagcactaaggagattgagtaaggacctccaaagttccccggactcatgaattctgggcccttggcccattctgtgcacagccaaggacttcagtagaccatctgggcagctttcccatggtgctgctccaaccatcagataaatgaccctcccaagcaccatgtcagtgtcgtacaatctaccaaccaaccagtgctgaagagattttagaaccttgtaacatacaatttttaagagcttatatggcagcttcctttttaccttgttttcctttggggcatgatgttttaacctttgctttagaagcacaagctgtaaatctaaaaggcacttttttttagaggtataaagaaaaactagatgtaataaataagatcatggaaggctttatgtgaaaaaagttgaatgttatagtaaaaaaaaaaagatatttatgtatgtacagtttgctaaagccaagttttgtttgtattgatttctttgcatttattatagatattataaaatagtt

SEQ ID NO: 4967 - protein, 8749 aa, Homo sapiens; identical to SEQ ID NO: 641

SEQ ID NO: 4968 - DNA, 27748 bp, Homo sapiens
cccgggcagtggaaaccgtgggcaaaagttagctggcaggacagcgcagctcctccaggcagcggaggcagcgcgtcccggctctcagggacatttccttcccacctcgacccccgggaggtggtcccggtataaaggctcgctgagcgggtgggtcacagcacagctttgcagctgcggagaaacgcccaaggccgtgcatctccaggagggcggctgggctcccgcagtcctgcagaccgcgcccgatcccggcgacagggcgggcggacagccgcgcatccccggggtcccgccgagcctgggcgcagagagccgggaggaagcgttcgctcgcttcgccttgctgctgggaaactgaacgaggccgagagagaaggttcttgagttcatgtaagaggacagtcttaaaacggaagaagaaaaagaagcagttcagtctttgggagagctgcctccttgttgagtgctgcaaaggcctggaattcatttatgacagaatagatctagaaaagtccaagcatgttttctagagtggtgtagccctgtgctgcctccagtgaagagtctcttggtgttggcttcgtgcttccggagggaccatggcaacctccagaggggcctcccggtgtcctcgggatatcgccaatgtgatgcagaggctgcaagatgagcaagagatagtacaaaaacgaactttcacaaaatggatcaactctcatctggccaagcggaaacctccaatggtggtggacgatctttttgaagacatgaaagatggtgttaaactgcttgcccttctggaggtcctgtctgggcagaaactgccttgtgaacaaggacgccggatgaagcgaatccatgctgtggctaacattggcacggcactcaagttcctcgaaggaagaaagattaaattagtcaacattaactccaccgatatagctgatggccgaccctcaatagttcttggattgatgtggaccattattctatatttccagattgaagagttgaccagcaacctgccccagctccagtctttgtccagcagcgcatcctccgtggacagcatagttagctctgagactcccagcccaccaagtaaacggaaggtgaccaccaagatccaaggaaatgctaagaaggctttattaaagtgggttcagtacacagctggcaagcagactggaatagaagtaaaagattttgggaagagttggagaagcggggttgcctttcattcagttattcatgccattcgaccggaattggtggacttggagacagtgaaaggcagatccaaccgagaaaatttggaggatgctttcactatcgccgaaacagaactggggatcccaagactgctagatcctgaagacgttgatgtggataaaccagatgagaaatctattatgacctatgtagcccagtttctgaaacattatcctgacatccacaatgcaagcactgatgggcaagaggatgatgaaatacttccaggtttcccatcttttgcaaattctgtacaaaattttaagagagaagacagagtaatttttaaggaaatgaaagtttggatagaacaatttgagagagatttgacaagagcacagatggtggaatcaaatttacaggataaatatcagtcatttaagcacttcagagttcaatatgaaatgaagaggaaacagattgaacatttaatacaaccattacacagagacggtaaattgtcacttgaccaagcattggtaaaacaatcttgggatagagtgacctccaggctctttgactggcatatacagcttgataaatctcttcctgcacctctgggcaccataggtgcctggctgtacagagcggaggtggccctgagagaggaaataaccgttcaacaggtccacgaggaaacagcaaacacgatacaacggaaacttgagcaacataaggatctgcttcaaaacacggatgcccacaaaagagcattccatgaaatctaccggaccaggtctgttaacgggattccagtgccacctgatcaattagaggacatggccgagaggtttcattttgtttcctccacatcagagctacacctaatgaaaatggaatttttagaattaaagtaccgtctgctctcactgctggttcttgcagagtcaaagctgaagtcttggatcattaagtacgggaggagagagtcagtggagcagcttctacaaaactacgtgtcttttatagaaaatagcaagttctttgaacaatatgaggtgacataccagatcttgaaacagacagctgagatgtatgtcaaagcagatggttcagtggaagaagctgagaatgtgatgaaattcatgaatgaaaccaccgctcagtggaggaatctctcagtagaagtgaggagtgtgaggagcatgctggaagaagtgatctctaactgggatcgctatggcaatacagtggctagtctgcaagcctggctagaggatgctgaaaaaatgctcaatcaatcagaaaatgccaaaaaggatttttttcgaaatttacctcattggattcagcagcatactgccatgaacgatgctggcaattttctaattgaaacctgtgatgagatggtttcccgtgacctgaagcagcaattactgttgctaaatgggcggtggagggagttgtttatggaagtcaagcaatatgctcaagctgatgagatggacagaatgaagaaggaatacacagactgtgttgttaccctgtctgcttttgcaacggaagcccataagaaactttctgaacccttagaagtctcttttatgaatgtcaagctattaattcaagacttggaggatattgagcagagggtgcctgtgatggatgcccaatacaagataattacaaagacagcacacctcattaccaaagaaagcccccaagaagaaggaaaagaaatgtttgcgaccatgtcaaagctcaaagagcagctaaccaaggtcaaagaatgttactccccactcctttatgagtctcagcagctgttgattccgttggaggaattagaaaagcagatgacgtccttttatgactcacttgggaaaatcaatgaaattatcacagttcttgagcgtgaggcacaatcgagtgccctttttaaacaaaaacatcaggaactgttagcttgtcaagaaaactgtaagaaaaccttgacacttattgagaaaggcagtcaaagtgttcaaaagtttgtgaccttgagcaacgtgttaaagcattttgatcagacgaggctacaaagacagattgcagatattcatgttgcttttcagagtatggtaaagaaaactggagattggaagaagcatgtggaaaccaacagtcgcttgatgaagaagtttgaggagtctcgagcagagttggagaaggtactgcggattgctcaggagggcctggaggaaaagggggatccagaggagctcctgcggagacacactgagtttttcagtcagctggatcagagggtgctcaatgctttcctgaaagcttgtgatgaactcaccgacatccttccagagcaggagcagcaggggctgcaggaagctgttcgaaagctccacaaacaatggaaggatcttcaaggagaagccccttatcatttgcttcatctgaagattgatgtggagaagaataggttcttagcctctgtagaagaatgcagaactgagctggatcgagagaccaagctgatgccccaggaaggcagtgaaaagataattaaagagcacagggttttcttcagtgacaaaggtcctcatcatctctgtgagaaaaggttacagctcatcgaggaactctgtgtgaaactcccagtgcgggacccagtaagggacacacctggaacctgtcacgtgactctcaaagagctcagagctgccattgacagcacctacaggaagctcatggaagacccagacaagtggaaggactacactagcagattctctgagttctcatcttggatatctacaaatgagacacaattaaaggggatcaagggtgaggccatcgatactgccaaccacggagaggttaaacgtgccgttgaagagatcagaaatggtgttaccaaaaggggtgagaccctcagctggctgaaatccaggctgaaagttttgacagaagtttcttctgagaatgaagcccaaaagcagggagatgagctggcaaaattatccagctctttcaaggctcttgtgacgctgctgtcagaggttgaaaagatgctaagcaattttggggactgtgtccagtacaaagaaatagtcaaaaattctctcgaagaattaatttctggctctaaagaagtccaggaacaagctgagaagatcttggatactgaaaatctgtttgaagcacagcagttacttcttcatcaccagcaaaagacaaagcggatctcagcaaagaagagagatgtgcagcagcagatcgcgcaggcgcagcagggagaaggggggctgcctgaccgaggccacgaggagctgcggaagctggagagcacactggatggcctggagcgcagccgggagaggcaggaacgccgcatccaggtcacattaagaaaatgggagcgatttgaaacaaacaaagaaacagtagtaagatacctttttcaaacaggttccagtcatgaacgcttcttgagttttagcagtttggaaagtttatcttcagaactggaacaaacaaaggagttttctaaacggacagaaagtattgcagtccaggctgagaaccttgtaaaggaagcttcagagataccgcttgggccccaaaataagcagctgcttcaacagcaggccaagtcaatcaaagaacaagtcaaaaaattagaagacacgcttgaagaagatattaaaaccatggaaatggtgaaaaccaagtgggatcattttggcagtaattttgagactctgtccgtctggataactgagaaagaaaaagaactcaatgccttggaaacttcgtcatctgccatggacatgcaaatcagccaaattaaggtcacaattcaggaaatagaaagtaagctcagcagcattgtaggattagaagaagaagcccagtcttttgctcagtttgttaccactggagaatctgctcgaattaaagccaagttgacacaaataagaagatacggggaagagcttcgagagcatgcacagtgtctggaaggaacaatcctgggacatttatctcagcagcaaaagtttgaagagaaccttagaaagatccagcaatctgtgtctgaatttgaagataaacttgctgttccaattaaaatatgttcttcagctacagaaacatacaaagttcttcaagaacatatggatctctgccaggccctggagtcactgagcagcgcgatcactgccttctcagccagtgccaggaaggttgtgaacagagattcctgtgttcaggaggctgcggctctacagcagcaatacgaggacatcctaaggagggcgaaggagagacagacggcgctggagaatctgctggcccactggcagaggctagagaaagaactatcatcctttttgacctggttagagcggggtgaagctaaagccagttccccagaaatggacatttctgcagacagagtcaaagtggaaggtgaacttcagttaatacaggcactgcaaaatgaagttgtatcccaggcctcattctatagcaaacttttgcaattgaaggaatcattgttctcagtagcctccaaagatgatgtgaaaatgatgaaactacatttggagcagttggatgagagatggagagatttaccacagatcattaacaaaaggattaattttcttcagtctgtggttgctgaacaccagcaatttgatgagctgctgctttccttttctgtctggattaaactgtttctcagtgaattacaaactacctctgagattagcataatggaccatcaagtagcccttactcggcataaggaccacgcagcagaagtagagagcaaaaagggcgaattgcagagtctgcagggtcacttagcaaagttgggttctctgggccgtgctgaggacctccacctcctgcagggaaaggctgaggactgcttccagctgtttgaggaggccagccaggttgtggagaggcggcagcttgccctgtcccatttggcagaattcctccagagccatgcctctctgtccggcattctccgccagctgaggcaaacagtggaagcaaccaacagtatgaataagaacgagtctgatttgatagaaaaggacctcaatgatgctcttcaaaatgctaaagcattagaatctgctgccgtcagtctggatggcattctttccaaagcccaataccatctgaaaatcgggagctctgagcaaaggacttcctgcagagccacggctgatcagctctgtggagaggtagagaggatccagaaccttctgggaaccaagcagagtgaggcagatgctctggcagtgttgaaaaaagcattccaagaccagaaagaggagcttctgaaaagcattgaggacattgaagaaaggactgacaaagagcgattgaaagaacctacccgccaagctcttcagcagaggttaagagtgtttaatcagctagaagatgaattgaattctcacgagcatgaactatgttggttgaaagacaaagccaagcaaattgcccagaaagatgtagcttttgcacctgaagttgacagggagataaaccgcttagaggtcacctgggatgataccaaaagactaattcatgaaaatcagggtcagtgctgtggacttattgacttaatgagagaatatcagaacctgaaatcagctgtatctaaagtcttagaaaatgccagcagtgtgattgtaaccagaactaccataaaagatcaggaggatcttaaatgggctttttccaagcatgaaactgccaagaacaaaatgaattacaaacagaaagacttggataactttaccagcaaaggaaaacacttgttatctgagctgaagaaaattcacagtagtgatttcagcttggtgaaaacagacatggagagcaccgtggacaaatggctggatgtatcagagaaacttgaagaaaacatggataggctgagagtaagcctgtccatttgggatgatgtactgtcaactagagatgagattgagggatggtcaaacaactgcgttccacagatggcagaaaacatcagcaacctggataaccacctcagagctgaagaactgcttaaagaatttgagtctgaagttaaaaacaaagcattgagattggaagaactgcattccaaagttaatgatctgaaagaattaactaaaaatctagaaacaccgccagaccttcagtttatagaagcagacttaatgcagaaactggagcatgccaaagaaataactgaagtagcaaaaggaaccctgaaggatttcacggctcaaagtacacaagtggagaagtttattaatgacataacaacatggttcacaaaagtggaagaatcgttgatgaactgtgcccaaaatgagacttgtgaagcattgaaaaaagtcaaggatatacaaaaagaacttcaaagtcaacaaagcaacatcagctctacccaagaaaatctcaatagcttgtgccgcaagtaccactcagctgagttggagagcctgggccgtgcaatgactggtctgataaagaaacatgaagccgtgagccagttgtgctccaaaacccaggccagcctgcaggaatctctggaaaaacacttcagtgagtctatgcaggaattccaagaatggtttttgggagcaaaggcagcagcaaaagaatcatcagatcgcaccggtgacagcaaagttctagaagcaaagctccatgatcttcagaacattttggactcagtcagtgatgggcagagcaaacttgatgcagtgactcaagaaggacaaactttgtatgcacatttgtctaaacaaattgtcagtagcattcaagaacaaatcacaaaggccaatgaagagtttcaagcatttctgaaacaatgccttaaagataagcaggctcttcaagactgtgcttcagaacttggaagctttgaagatcagcacagaaaactgaacttatggatccatgaaatggaagaaaggttcaatacggaaaacttgggagagagtaaacagcacattcctgagaagaaaaatgaagttcataaagttgaaatgtttttgggagaactgctggctgcaagagagtctcttgataagctttcccagagagggcagcttctgagtgaagaaggccacggtgctgggcaggagggccgcctgtgttcccagctcctcacaagccaccagaacctacttagaatgaccaaagagaaactccggagctgccaggtggcccttcaggagcacgaagccctggaggaagcactgcaaagcatgtggttctgggtgaaggccattcaggacagactggcctgtgcagagagcactcttgggagcaaagacaccctggagaaacggctgtcacaaatacaggatattctcctgatgaaaggtgaaggggaagttaagttgaatatggccattggcaagggggaacaggccttgagaagtagcaacaaagaaggtcagagggtgattcagactcagttagagacccttaaagaagtgtgggctgacatcatgagctcctccgtccacgctcaaagcactttagagtctgtgattagccaatggaatgactatgtagagaggaaaaaccagttggagcagtggatggaatcagtggatcaaaaaatagaacatcccttacaaccacagccaggtctgaaagagaagttcgtcctgcttgaccacctccagtccatcctgtctgaggcagaagatcacacgagagcccttcaccgtctaattgcgaagtccagggagctctacgaaaagacagaggatgagtctttcaaggacacagctcaagaggagctgaaaacacagtttaatgatataatgactgttgccaaggaaaaaatgaggaaagtggaagagattgtgaaagatcatctaatgtatttagatgcggtccacgagttcacagattggctccattcagcaaaggaagaacttcaccggtggtcagatatgtctggagattcatcagccacccagaaaaagttatcaaaaattaaggagctgatagattccagagagattggtgcaagccgtctcagcagagtggagtcgctggctcccgaagtgaaacagaacacaactgccagtgggtgtgagctcatgcacacggagatgcaggccctgcgtgccgactggaagcagtgggaagacagtgtattccaaacgcagagctgtttggagaacctggtcagccagatggccctttcggagcaggaattctcaggccaagtggctcaactggagcaggccctggaacagttcagtgcccttctgaaaacctgggctcagcagttaaccctcctggaaggcaagaacacggatgaggagatagtggaatgctggcacaaaggacaagagatactggatgctttgcaaaaagcagagcctagaacagaggatctcaagtctcagctgaatgaactttgtcgattttccagagacctgagtacctacagtggaaaagtttctggcttgattaaagagtataattgtctttgtttgcaagcatccaagggctgccagaataaagaacagattttacagcaaagatttcgaaaggccttcagggatttccagcagtggttggttaatgcaaaaatcactaccgccaagtgttttgatatacctcaaaatataagtgaagtttcaactagtcttcagaaaatacaggagtttttgtcagaaagtgaaaatggacagcacaagctaaacatgatgctgtctaaaggggaacttctgagtaccctgctgaccaaagagaaagcgaaagggatccaggccaaagttacagctgcaaaagaagattggaaaaattttcattcaaatctccaccaaaaagaatctgctctagagaatctaaagatccaaatgaaggactttgaagtaagtgctgagcctatccaggactggctgagtaaaactgagaagatggtccatgaaagcagcaatcgcctctatgatctgccagcaaagaggagggagcagcagaagctccagtctgtccttgaggaaatacactgctacgagcctcagctcaacaggctgaaagagaaagctcagcagctgtgggaaggacaagctgccagcaagagctttaggcacagagtgtcgcagctgtcttctcagtatctagcgctaagcaatttaacaaaggagaaagtgtcaagactggatagaatcgttgcagaacacaatcagttctctcttgggattaaagaattacaagactggatgacggatgcgattcacatgctggattcatactgccacccgacatccgacaaaagtgtgctggacagcaggacgctcaagctcgaggctctattatcagtcaaacaggaaaaagagattcagatgaaaatgatagtgaccaggggagaatctgtccttcagaatacttctccagaaggcattcccactattcagcagcagctgcagagtgtgaaggatatgtgggcatcccttttgtctgcagggattcgttgtaaaagccaactcgaaggagctctctccaagtggacaagttatcaggatggcgttcgacagttctccggttggatggatagtatggaagccaacctgaatgaatcagaaaggcagcatgcggagctgcgggataaaacaacgatgctcggaaaagccaagttattaaatgaagaagtgctgagttacagcagcttgctggagaccatcgaagtcaaaggggctggcatgacagaacactatgtcacccagctagaactccaggatctacaggaacgatacagagccatccaagagagggccaaggaagccgtaaccaagtctgaaaaacttgtccgcctgcaccaagagtatcagagagacctaaaggcatttgaagtttggttggggcaagaacaagaaaagctcgaccagtattcagttcttgaaggtgatgcccacactcatgagacaacattgcgtgatcttcaggagctacaggtacactgtgcagaggggcaggccctgttgaactcagtgctgcacaccagagaggatgtgatcccatcaggtatcccacaggcagaggaccgggctttagagtctctccggcaagactggcaggcttaccagcacaggctgtccgagactcgaactcagttcaataacgtggtgaacaaattgaggctaatggagcaaaagtttcagcaagtagatgaatggctcaaaacagcagaggagaaagttagtcccaggaccagacgtcagtctaacagggcaaccaaggagatacaattacatcagatgaagaagtggcacgaagaagtgactgcatacagagatgaagttgaggaagtgggagctagagctcaggagatactggacgagagccacgtgaacagcagaatgggttgccaggccacccagctgacttccagataccaggccctgcttctccaagtgctggaacaaataaaattcctggaggaggagattcagagtttggaggaatcagaatcatccctcagttcctattctgattggtatggctctactcataaaaacttcaagaatgtggctaccaagattgacaaagtagatacagtaatgatggggaagaaattgaagacgttggaggttttgctcaaagacatggagaaaggtcacagtttgctgaaatcagcccgggagaaaggagagagggctgttaaatacttggaggaaggcgaggcagagaggttaagaaaggagattcatgatcacatggagcagttgaaggaactgaccagcactgtccggaaagaacacatgacgctggaaaaaggtcttcatttagcaaaggaattctcagataaatgcaaagcactgacacagtggatagcagaataccaggaaattctacatgttcctgaagaacccaaaatggaattatatgagaaaaaagctcagttatctaaatacaagtcacttcaacaaacggtgctgtcccatgaaccatcagtaaagtcagtgagagagaagggtgaagctcttttggaactggtgcaggacgtcactttaaaggacaaaatagatcaacttcaaagtgattaccaggacctgtgcagcataggaaaggagcatgtcttcagtctggaggcgaaagtcaaagaccatgaagactacaacagtgagctccaagaggtcgaaaagtggctgctgcagatgtctggcagactggtggcacctgacctcctggagacaagcagcctggagacaatcacccagcaattggcccaccacaaggcaatgatggaagaaattgctggttttgaagaccgtttgaacaatcttcaaatgaaaggtgatactttgattggccaatgtgcagaccacctgcaagcgaaacttaaacaaaacgtgcatgctcatctgcagggcacaaaggacagctactcagcgatctgcagcacagctcagaggatgtaccagagtttggaacacgaacttcagaagcacgtcagccgacaagacaccctgcagcagtgccaggcctggctttctgcagtccagccggatttagagccaagtcctcaaccacctcttagtagggcagaagccattaagcaggtcaaacacttcagagctttgcaagagcaggcaaggacctacctagatctcctttgctccatgtgtgacctgtcaaatgcttcggtgaaaaccacagcaaaagacattcaacaaacagagcaaacgattgaacaaaagcttgtccaggcccagaacttaactcagggctgggaagagatcaagcacctgaagtctgagctctggatttacctgcaagatgctgatcagcaactgcagaacatgaagaggaggcactctgagctggagctgaacattgcacagaacatggtttcacaagttaaggattttgttaagaaactacagagcaaacaggcatccgtgaacaccataatagaaaaggtgaataagttaacaaagaaggaggaatcgcctgaacacaaggaaataaatcatttaaatgatcagtggctcgatttgtgccgtcagtctaacaacctgtgcttgcaaagggaagaggatcttcagagaacaagagattaccatgactgtatgaatgttgttgaagtgttcctagaaaaatttactacagaatgggataacttggccagatctgatgcagagagtacagctgtccacctggaagctttgaaaaagttagcattggcattgcaggagagaaagtatgctattgaagatctgaaagatcaaaagcagaaaatgatagagcatctgaatttagatgacaaggagttagtcaaagaacagacgagtcatttagagcaacgttggtttcagcttgaggacctcattaaaaggaaaatccaagtgtcagtcaccaacttggaggagttaaatgtggtgcagtccagatttcaggagctaatggagtgggcagaagagcaacaacccaacatcgccgaggcccttaagcagagccctcctccagatatggctcagaaccttctcatggatcacctggccatctgcagtgaactggaggccaagcagatgctcctgaaatcgcttataaaggacgcagacagggtcatggcagatcttggtctcaatgagcgacaggtcatccagaaggctctctctgatgcacaaagccacgtgaattgtctcagtgacttagtgggccagcgaagaaagtacttaaacaaagccttgtccgagaaaacccagtttctcatggcagtgttccaggccaccagccaaattcagcaacatgagcgaaagataatgttccgtgaacacatctgtctgttaccagatgatgtgagcaaacaagtcaaaacatgtaagagtgcacaagccagcctcaagacttaccaaaatgaagtcactggactttgggcccagggtcgcgaactaatgaaggaagtcacagagcaggaaaagagtgaagtgctggggaagcttcaggaattgcagagtgtctatgacagtgttttacaaaagtgcagtcaccggttacaagaactagagaagaatttggtttctaggaagcattttaaggaagattttgataaagcttgccactggctaaaacaagcagatattgttacatttcctgaaatcaacctaatgaatgagagttctgagcttcatacacaactggctaaataccaaaacattcttgaacaatctccagaatatgaaaatcttctacttacgctgcagagaactgggcagaccatattaccatcgctgaatgaagtcgatcattcctacctcagtgaaaagctaaatgctttgcctcgacaatttaatgtaattgttgccttggctaaagacaagttctataaagtccaggaagcaattcttgctcggaaggaatatgcttccttgattgagttgacaacccagtctctgagtgaacttgaagcccaattcttgaggatgagcaaagttcccaccgacctggccgttgaggaggctctttctctgcaagatggttgcagagccattctggacgaggtggcgggccttggggaggcggtggatgaactgaaccagaaaaaagaaggttttcgcagcacaggtcagccttggcagccagacaagatgctgcaccttgtcaccttatatcacaggctgaagcgacaaacagaacagagggttagcttattagaagacaccaccagtgcttaccaagaacacgagaagatgtgccaacagctggagagacaactgaagtctgtaaaagaggagcagtccaaagtgaatgaggaaacgctgcctgcagaggagaagctcaaaatgtatcactccctggcaggaagtctccaggactcagggattgtactgaaacgagtaaccatacatcttgaagatcttgccccacaccttgaccccttggcttatgagaaagccaggcatcagatccagtcctggcaaggggagttaaaactgttgacttctgccattggtgagacggtgacagaatgtgagagccgaatggtgcagagtatagacttccagactgagatgagtcgctccctggactggctgaggagagtgaaggcagagctcagtgggccggtgtacctagacctcaacctgcaggacatccaagaggaaatcagaaaaatccaaattcatcaggaagaggtccagtccagcttgagaatcatgaatgcgctgagtcacaaggaaaaggagaagttcacaaaggccaaggagctgatttctgcggatttagaacacagcctcgctgagctctcagagctggatggagacatccaggaagccttacgcaccagacaggctaccttgactgaaatatatagccagtgtcaaaggtattatcaggtatttcaagcagccaatgactggcttgaggatgcccaagaattgttacagctggcaggcaatggcctagacgtggagagcgcagaggaaaatctcaaaagccacatggaatttttcagtacagaggatcagttccatagtaacctggaggagctccacagcctggtagccaccctggacccactcatcaagccaaccggcaaagaagacctagaacagaaagtggcttctctggaactcaggagccagaggatgagccgggactctggtgcccaagtggatctcttgcagagatgcacagctcaatggcacgattaccagaaagcaagggaagaggttattgaattgatgaatgatacagaaaagaaattgtctgagttttctttgttgaagacttcgtctagtcatgaagcggaagaaaaattgtcagaacacaaggctttagtgtcagtggttaactctttccatgagaaaattgtggcccttgaggaaaaagcttcacaactggagaaaaccggaaatgatgccagcaaagccaccctgagcaggtcaatgaccaccgtctggcagcgctggacacgccttcgagctgtggcccaggaccaggagaagatcctggaagatgcagtggatgagtggacgggctttaacaacaaggttaaaaaggccactgaaatgattgatcagctgcaagataagttacctggaagttcagcagagaaagcatcgaaagcagagctcttaactcttcttgaataccacgacacgttcgttctggagctggagcagcagcagtcggccttgggcatgctgcggcagcaaaccctgagcatgctccaggatggagccgccccaacccctggggaagagcctccgctcatgcaggaaatcaccgccatgcaagatcggtgcctgaacatgcaggagaaagtgaagactaatggaaagttggtgaagcaagagctgaaggaccgagaaatggtggagactcagatcaattctgtgaaatgttgggttcaggaaacgaaagaatatttagggaatccaacaatagaaatagatgctcaacttgaagaacttcagattctcctaacagaagccacaaatcaccgacagaacattgaaaaaatggcagaagaacagaaggagaagtacttaggtctttataccatattaccttctgaactctcccttcagttggctgaagtggcgttagatctaaagatccgagatcagatccaagacaaaataaaagaagttgagcagagcaaggccacgagccaggaactcagccggcaaattcagaagttagctaaagacctcacaactattctaactaagctgaaagcgaagacagataatgtagttcaagctaaaactgaccaaaaggtgctgggagaggaattagatggctgtaattcaaagttaatggaattagatgcagcagtacagaaattcttggaacagaatggccaactgggtaagccactggccaagaagataggaaaactgactgaacttcaccagcagaccattagacaagctgagaatcggctctccaagctcaatcaggcagcatcacatttagaagaatacaatgaaatgcttgaattaattttgaagtggattgaaaaagctaaagtcttggctcatggaactattgcatggaattctgcaagccagcttcgggaacaatatattttgcatcagaccctgctagaagaatccaaagaaattgacagtgagctggaagcaatgactgagaaattacagtacctcactagcgtgtactgtacagaaaaaatgtctcagcaagtggcagaactgggacgggagactgaggagttgcgacagatgatcaaaattcgtttgcagaacctccaagatgcagctaaggatatgaaaaaatttgaagcagagttgaaaaagttacaagctgccttggagcaagcccaggcaacactgacttctccagaagttggacgtctcagtctcaaggagcagctctctcatcggcagcatttgttgtctgagatggagtcactgaagccgaaggtgcaagcagtgcagctctgccagagtgccctccggatccccgaggatgtggttgccagcttacctctctgtcatgctgctctgcggctgcaggaagaggccagccggctgcagcacaccgccatccagcagtgtaacatcatgcaggcagctgtggtacaatatgaacaatatgagcaagaaatgaaacatctccagcaactgatagaaggagctcacagagagattgaggataaacctgttgccaccagtaacatacaggagctgcaggctcagatttctcggcatgaggagctggcgcagaaaattaagggctaccaggagcagatcgcttctttgaattccaagtgcaagatgctgacgatgaaagccaagcacgccaccatgctgctgacggtgaccgaggtcgaggggctggcggaagggacagaggacctggatggggagctcctccccacgccttcggcccacccctctgtggtcatgatgactgcaggtcgctgtcacactttgctgtcaccggtcactgaggagtctggggaggagggaaccaacagtgagatttcctctccacctgcctgtcgctccccttcacctgtggctaatacagatgcttctgttaaccaggacattgcatattaccaagccttgtctgctgagaggttgcagacagatgctgcaaaaattcaccccagcacatccgcatcccaggagttctatgaaccgggattggagccatccgctactgccaaactgggtgatttgcagcgttcttgggaaaccttaaagaatgtgatcagtgagaagcagcgcacactctatgaagctttggaacgccagcagaagtaccaggactccctccagtccatctctacgaagatggaggccattgagctgaaactcagtgagagcccagagcctggcaggagtccagaaagccagatggctgaacatcaggcattgatggatgagattctcatgctccaggatgaaatcaatgagctccagtcctctctcgcagaggagctggtatccgagtcttgtgaggccgaccctgcggagcagctggccttgcagtccacgctcactgtcttagccgagcgaatgtccaccatcaggatgaaagcctcggggaaacggcagcttttggaggagaagttgaatgatcagctggaggaacaaaggcaggaacaggccctgcagaggtatcgctgtgaagccgatgagctggacagctggctcttgagtaccaaggccactctggacactgcgctgagtccacccaaggagcccatggacatggaggcccagcttatggactgccagaatatgctggtggaaatagagcagaaggtggtggctttatcagaactgtcagtccacaatgagaacctgctgctggagggcaaagctcacaccaaggacgaggccgagcagctggctggaaagctgagaaggctcaaggggagcctgctggagctgcagagagccctgcatgataagcagctcaacatgcagggaacagcacaggagaaggaggagagcgatgttgacctaacagccacgcagagccccggcgtccaggaatggctggcccaagctcgcaccacatggacccagcagcggcagagcagtctccagcaacaaaaagagttagaacaggaattagccgagcagaagagtctccttcgctcagtagccagtcgtggagaggagattctaattcaacattcggcggcagagacctctggtgatgctggcgaaaaacctgatgtgttatcccaggagttggggatggaaggggagaaatcatccgctgaagaccagatgagaatgaaatgggaaagcctacatcaagaatttagtaccaagcagaaactactacagaatgttctggaacaggaacaagagcaagtgctttatagcaggccaaatcgactcttgtctggtgtgccactgtacaaaggggacgtgccaacccaagataaatctgcagttacatctttgctggatggactgaaccaagccttcgaggaggtttcatcccagagtggaggggcaaagaggcagagtatacacttggagcagaagttgtatgatggagtctcagccacctctacttggttggatgacgttgaagaacgtttatttgttgccacagcacttttaccagaagaaacagagacttgtctcttcaaccaagagattcttgccaaagacattaaggaaatgtctgaagaaatggataagaacaaaaacttgttttcccaagcttttccagagaatggtgataatcgagatgttattgaagatactttgggttgtcttttgggcaggttatccttgctagactcagtagtgaatcaacgatgtcatcagatgaaagaaagacttcagcaaatactaaatttccagaatgatctgaaagtgctgtttacatcactggctgacaacaaatacatcattctgcaaaaactggcaaatgtgtttgaacagcccgtagcagaacaaatagaggcaatacaacaggctgaagatggactcaaagaatttgatgcaggaatcattgaattaaagaggcgtggtgacaagctacaggtcgagcagccgtccatgcaagaactctccaagctccaggacatgtatgatgagctgatgatgatcattggctcccggaggagtggtctgaatcagaaccttacactcaagagtcagtatgagagggccctacaagatctggctgacctgctagaaactggtcaggagaagatggcaggagaccagaaaatcatcgtgtcttccaaagaggaaatccagcaactacttgacaaacataaggaatactttcagggcctggaatctcatatgatcttgactgaaacactcttcagaaagataatcagctttgcagtccaaaaggaaacccagttccatacagagctgatggctcaggcttctgctgtactgaaacgggctcacaagaggggtgtggagctggagtacattctagagacgtggtcccatctggatgaggaccagcaggagctcagcagacagctggaggtggtggaaagcagcatcccaagcgtgggtctggtggaggagaacgaggacaggcttattgaccgcataacactctaccagcatttaaaatctagccttaatgaataccagcccaaattatatcaagtattagatgatgggaaacgacttctgatatccatcagctgctcagatctagaaagccaactaaatcaacttggagagtgctggctaagtaacaccaataaaatgtctaaggaacttcacagactggaaacaatattgaaacactggaccagatatcaaagtgaatctgcagatctaattcactggttacaatctgcaaaagaccggctagaattttggactcagcaatctgtgacagtcccacaagagctggaaatggtccgtgatcatctaaatgctttcctggagttttctaaagaagtggatgcccaatcttccctgaaatcatctgttctgagtactggaaatcagctccttcgactaaaaaaggtggacacagccacgctgcgctctgagctgtcgcgcattgatagccagtggactgacctgctaaccaatatcccagccgtccaggagaagctccaccagctccagatggataaactgccttcccgccatgccatttctgaagtcatgagttggatttctctaatggaaaatgttattcagaaggatgaagataatattaaaaattccataggttacaaggcaattcatgaataccttcagaaatataagggttttaagatagacattaactgtaaacagctgacagtggattttgtgaaccagtccgtgctacaaatcagcagtcaggatgtggaaagtaagcgtagtgataagactgattttgctgagcaacttggagcaatgaataaaagttggcaaattctgcaaggtctagtaactgagaagatccagctgttggaaggcttattggaatcttggtcagaatatgaaaataatgtacaatgtctgaaaacatggtttgaaacccaggaaaagagactaaaacaacagcatcgaattggagatcaggcttctgttcaaaatgcactgaaagactgtcaggatctggaagatttgattaaagcaaaagaaaaagaagtagagaaaattgagcagaatggacttgctttgattcagaacaagaaagaagacgtctctagcattgtcatgagcacactgcgagagctcggccaaacctgggcaaatttagatcacatggttggacaattaaagatactgctgaaatcagtgcttgaccaatggagtagtcacaaagtggcctttgacaagataaacagttacctcatggaggccagatactctctttcccgattccgtctgctgactggctccttagaagctgtgcaagttcaggtggacaatcttcagaatctccaagatgatctggaaaaacaggaaaggagcttacagaaatttggctctatcaccaaccaattattaaaagagtgtcacccacccgtgacagaaactcttaccaatacactgaaagaagtcaacatgagatggaataacttgctggaagagattgctgagcagctacagtccagcaaggccctacttcagctttggcaaagatacaaggactactccaaacagtgtgcttcgacagttcagcagcaggaggatcgaaccaatgagctgttgaaggcagccacaaacaaggacattgccgatgatgaggttgccacatggattcaagattgcaacgacctcctcaaaggactgggcacagttaaagattccctcttttttctccatgagctgggagagcaactgaagcaacaagtggatgcttccgcagcatcagctattcaatcggatcaactctctttgagtcaacacttgtgtgccctggagcaagctctctgcaaacagcagacttcattacaggctggagttcttgattatgaaacctttgccaagagtttagaagctttggaggcctggatagtggaagctgaagaaatactacaagggcaggaccctagccactcatctgacctctccacaatccaggaaaggatggaagaacttaagggacagatgttaaaattcagcagcatggctccagatttagaccgtctaaatgagcttggatataggttacccttgaatgataaggaaatcaaaagaatgcagaatctgaaccgccattggtctctgatctcctctcagactacagaaagattcagcaagttgcagtcatttttgctacaacatcagactttcttggaaaaatgtgaaacatggatggaattcctagttcagacagaacaaaagttagcagtagagatttcaggaaattatcagcaccttttggaacagcagagagcacacgagttgtttcaagccgagatgttcagtcgtcagcagattttgcactcaatcattattgatgggcaacgtcttctagaacaaggtcaagttgatgacagggatgaattcaacctgaaattgacactcctcagtaatcaatggcagggagtgattcgcagggcccagcagaggcgggggatcattgacagccagattcgccagtggcagcgctatagggagatggcagaaaagcttcgtaaatggttggttgaagtgtcctacctccccatgagtggtctcggaagtgttcctataccactgcaacaagcaaggaccctctttgatgaagtgcagttcaaagaaaaagtgtttctgcggcaacaaggcagctacatcctgactgtggaggctggcaagcaactccttctctcggcggacagtggcgctgaggccgccttgcaggccgaactcgctgaaatccaagagaaatggaaatcagccagcatgcggctggaagaacagaagaaaaaactagccttcttgttgaaagactgggaaaaatgtgagaaaggaatagcagattccctggagaaactacgaactttcaaaaagaagctttcgcagtctctcccggatcaccatgaagagctccatgcagaacaaatgcgttgcaaggaattagaaaatgcagttgggagctggacagatgacttgacccagttgagcctgctgaaggacaccctctctgcctatatcagtgctgatgatatctccattcttaatgaacgcgtagagcttctgcaaaggcagtgggaagaactatgccaccagctctccttaaggcggcagcaaataggtgaaagattgaatgaatgggcagtcttcagtgaaaagaacaaggaactctgtgagtggttgactcaaatggaaagcaaagtttctcagaatggagacattctcattgaagaaatgatagagaagctcaagaaggattatcaagaggaaattgctattgctcaagagaacaaaatacagctccaacaaatgggagaacgacttgctaaagccagccatgaaagcaaagcatctgagattgaatacaagctgggaaaggtcaacgaccggtggcagcatctcctggacctcattgcagccagggtgaagaagctgaaggagaccctggtagccgtgcagcagcttgataagaacatgagcagcctgaggacctggctcgctcacatcgagtcagagctggccaagccaatagtctacgattcctgtaactcggaagaaatacagagaaagcttaatgagcagcaggagcttcagagagacatagagaagcacagtacaggtgttgcatctgtcctcaacctgtgtgaagtcctgctgcacgactgtgacgcctgtgccactgatgccgagtgtgactctatacagcaggctacgagaaacctggaccggcggtggagaaacatttgtgctatgtccatggaaaggaggctgaaaatcgaagagacgtggcgattgtggcagaaatttctggatgactattcacgttttgaagattggctgaagtcttcagaaaggacagctgcttttcccagctcttctggggtgatctatacagttgccaaggaagaactaaagaaatttgaggctttccagcgacaggtccacgagtgcctgacgcagctggaactgatcaacaagcagtaccgccgcctggccagggagaaccgcactgattcagcatgtagcctcaaacagatggttcacgaaggcaaccagagatgggacaacctgcaaaagcgtgtcacctccatcttgcgcagactcaagcattttattggccagcgtgaggagtttgagactgcgcgggacagcattctggtctggctcacagagatggatctgcagctcactaatattgaacatttttctgagtgtgatgttcaagctaaaataaagcaactcaaggccttccagcaggaaatttcactgaaccacaataagattgagcagataattgcccaaggagaacagctgatagaaaagagtgagcccttggatgcagcgatcatcgaggaggaactagatgagctccgacggtactgccaggaggtcttcgggcgtgtggaaagataccataagaaactgatccgcctgcctctcccagacgatgagcacgacctctcagacagggagctggagctggaagactctgcagctctgtcggacctgcactggcacgaccgctctgcagacagcctgctttctccacagccttcctccaatctctccctctcgctcgctcagcccctccggagcgagcggtcaggacgagacaccccggctagtgtggactccatccccctggagtgggatcacgactatgacctcagtcgggacctggagtctgcaatgtccagagctctgccctctgaggatgaagaaggtcaggatgacaaagatttctacctccggggagctgttggcttatcaggggaccacagtgccctagagtcacagatccgacaactgggcaaagccctggatgatagccgttttcagatacagcaaaccgaaaatatcattcgcagcaaaactcccacggggccggagctagacaccagctacaaaggctacatgaaactgctgggcgaatgcagtagcagtatagactccgtgaagagactggagcacaaactgaaggaggaagaggagagccttcctggctttgttaacctgcatagtaccgaaacccaaacggctggtgtgattgaccgatgggagcttctccaggcccaggcattgagcaaggagttgaggatgaagcagaacctccagaagtggcagcagtttaactcagacttgaacagcatctgggcctggctgggggacacggaggaggagttggaacagctccagcgtctggaactcagcactgacatccagaccatcgagctccagatcaaaaagctcaaggagctccagaaagctgtggaccaccgcaaagccatcatcctctccatcaatctctgcagccctgagttcacccaggctgacagcaaggagagccgggacctgcaggatcgcttgtcgcagatgaatgggcgctgggaccgagtgtgctctctgctggaggagtggcggggcctgctgcaggatgccctgatgcagtgccagggtttccatgaaatgagccatggtttgcttcttatgctggagaacattgacagaaggaaaaatgaaattgtccctattgattctaaccttgatgcagagatacttcaggaccatcacaaacagcttatgcaaataaagcatgagctgttggaatcccaactcagagtagcctctttgcaagacatgtcttgccaactactggtgaatgctgaaggaacagactgtttagaagccaaagaaaaagtccatgttattggaaatcggctcaaacttctcttgaaggaggtcagtcgtcatatcaaggaactggagaagttattagacgtgtcaagtagtcagcaggatttgtcttcctggtcttctgctgatgaactggacacctcagggtctgtgagtcccacatcaggaaggagcaccccaaacagacagaaaacgccacgaggcaagtgtagtctctcacagcctggaccctctgtcagcagtccacatagcaggtccacaaaaggtggctccgattcctccctttctgagccagggccaggtcggtccggccgcggcttcctgttcagagtcctccgagcagctcttccccttcagcttctcctgctcctcctcatcgggcttgcctgccttgtaccaatgtcagaggaagactacagctgtgccctctccaacaactttgcccggtcattccaccccatgctcagatacacgaatggccctcctccactctgaactaagcagatgccatctgcagaagtgctggtagcataaggaggatcgggtcataagcaatcccaaactaccaacaagaggaccttgatcttggcgaaagccctcggtgtggcagctttagccctcctccagatcacatgtgtgcaaattatggcttcagaggtggaagataaacagtgacgggggaacaaacagacaacaagaaggtttggaagaaatctggtttgagactctgaaccttagcactaaggagattgagtaaggacctccaaagttccccggactcatgaattctgggcccttggcccattctgtgcacagccaaggacttcagtagaccatctgggcagctttcccatggtgctgctccaaccatcagataaatgaccctcccaagcaccatgtcagtgtcgtacaatctaccaaccaaccagtgctgaagagattttagaaccttgtaacatacaatttttaagagcttatatggcagcttcctttttaccttgttttcctttggggcatgatgttttaacctttgctttagaagcacaagctgtaaatctaaaaggcacttttttttagaggtataaagaaaaactagatgtaataaataagatcatggaaggctttatgtgaaaaaagttgaatgttatagtaaaaaaaaaaagatatttatgtatgtacagtttgctaaagccaagttttgtttgtattgatttctttgcatttattatagatattataaaatagtt

SEQ ID NO: 4969 - protein, 8797 aa, Homo sapiens; identical to SEQ ID NO: 645

SEQ ID NO: 4970 - DNA, 10656 bp, Homo sapiens
tgttctcacgagggggcagcttgggcttgaccgagcaggagcttcatggtcccacacgtagtatgacatgtgacctctgcacattgtttacagttcctaaactgtgatttctttttctgtgaaatagttataatagtaagtggctaccaagtagaaagtggtcatggggggtgaaggttaaacacaataacggacacacagaacttacacagggcattttatgccaagctatattgaatatctatatccctctacctgcccgtcaatgtcatgaatattgacaattcactctagaccctgctagaagaatccaaagaaattgacagtgagctggaagcaatgactgagaaattacagtacctcactagcgtgtactgtacagaaaaaatgtctcagcaagtggcagaactgggacgggagactgaggagttgcgacagatgatcaaaattcgtttgcagaacctccaagatgcagctaaggatatgaaaaaatttgaagcagagttgaaaaagttacaagctgccttggagcaagcccaggcaacactgacttctccagaagttggacgtctcagtctcaaggagcagctctctcatcggcagcatttgttgtctgagatggagtcactgaagccgaaggtgcaagcagtgcagctctgccagagtgccctccggatccccgaggatgtggttgccagcttacctctctgtcatgctgctctgcggctgcaggaagaggccagccggctgcagcacaccgccatccagcagtgtaacatcatgcaggcagctgtggtacaatatgaacaatatgagcaagaaatgaaacatctccagcaactgatagaaggagctcacagagagattgaggataaacctgttgccaccagtaacatacaggagctgcaggctcagatttctcggcatgaggagctggcgcagaaaattaagggctaccaggagcagatcgcttctttgaattccaagtgcaagatgctgacgatgaaagccaagcacgccaccatgctgctgacggtgaccgaggtcgaggggctggcggaagggacagaggacctggatggggagctcctccccacgccttcggcccacccctctgtggtcatgatgactgcaggtcgctgtcacactttgctgtcaccggtcactgaggagtctggggaggagggaaccaacagtgagatttcctctccacctgcctgtcgctccccttcacctgtggctaatacagatgcttctgttaaccaggacattgcatattaccaagccttgtctgctgagaggttgcagacagatgctgcaaaaattcaccccagcacatccgcatcccaggagttctatgaaccgggattggagccatccgctactgccaaactgggtgatttgcagcgttcttgggaaaccttaaagaatgtgatcagtgagaagcagcgcacactctatgaagctttggaacgccagcagaagtaccaggactccctccagtccatctctacgaagatggaggccattgagctgaaactcagtgagagcccagagcctggcaggagtccagaaagccagatggctgaacatcaggcattgatggatgagattctcatgctccaggatgaaatcaatgagctccagtcctctctcgcagaggagctggtatccgagtcttgtgaggccgaccctgcggagcagctggccttgcagtccacgctcactgtcttagccgagcgaatgtccaccatcaggatgaaagcctcggggaaacggcagcttttggaggagaagttgaatgatcagctggaggaacaaaggcaggaacaggccctgcagaggtatcgctgtgaagccgatgagctggacagctggctcttgagtaccaaggccactctggacactgcgctgagtccacccaaggagcccatggacatggaggcccagcttatggactgccagaatatgctggtggaaatagagcagaaggtggtggctttatcagaactgtcagtccacaatgagaacctgctgctggagggcaaagctcacaccaaggacgaggccgagcagctggctggaaagctgagaaggctcaaggggagcctgctggagctgcagagagccctgcatgataagcagctcaacatgcagggaacagcacaggagaaggaggagagcgatgttgacctaacagccacgcagagccccggcgtccaggaatggctggcccaagctcgcaccacatggacccagcagcggcagagcagtctccagcaacaaaaagagttagaacaggaattagccgagcagaagagtctccttcgctcagtagccagtcgtggagaggagattctaattcaacattcggcggcagagacctctggtgatgctggcgaaaaacctgatgtgttatcccaggagttggggatggaaggggagaaatcatccgctgaagaccagatgagaatgaaatgggaaagcctacatcaagaatttagtaccaagcagaaactactacagaatgttctggaacaggaacaagagcaagtgctttatagcaggccaaatcgactcttgtctggtgtgccactgtacaaaggggacgtgccaacccaagataaatctgcagttacatctttgctggatggactgaaccaagccttcgaggaggtttcatcccagagtggaggggcaaagaggcagagtatacacttggagcagaagttgtatgatggagtctcagccacctctacttggttggatgacgttgaagaacgtttatttgttgccacagcacttttaccagaagaaacagagacttgtctcttcaaccaagagattcttgccaaagacattaaggaaatgtctgaagaaatggataagaacaaaaacttgttttcccaagcttttccagagaatggtgataatcgagatgttattgaagatactttgggttgtcttttgggcaggttatccttgctagactcagtagtgaatcaacgatgtcatcagatgaaagaaagacttcagcaaatactaaatttccagaatgatctgaaagtgctgtttacatcactggctgacaacaaatacatcattctgcaaaaactggcaaatgtgtttgaacagcccgtagcagaacaaatagaggcaatacaacaggctgaagatggactcaaagaatttgatgcaggaatcattgaattaaagaggcgtggtgacaagctacaggtcgagcagccgtccatgcaagaactctccaagctccaggacatgtatgatgagctgatgatgatcattggctcccggaggagtggtctgaatcagaaccttacactcaagagtcagtatgagagggccctacaagatctggctgacctgctagaaactggtcaggagaagatggcaggagaccagaaaatcatcgtgtcttccaaagaggaaatccagcaactacttgacaaacataaggaatactttcagggcctggaatctcatatgatcttgactgaaacactcttcagaaagataatcagctttgcagtccaaaaggaaacccagttccatacagagctgatggctcaggcttctgctgtactgaaacgggctcacaagaggggtgtggagctggagtacattctagagacgtggtcccatctggatgaggaccagcaggagctcagcagacagctggaggtggtggaaagcagcatcccaagcgtgggtctggtggaggagaacgaggacaggcttattgaccgcataacactctaccagcatttaaaatctagccttaatgaataccagcccaaattatatcaagtattagatgatgggaaacgacttctgatatccatcagctgctcagatctagaaagccaactaaatcaacttggagagtgctggctaagtaacaccaataaaatgtctaaggaacttcacagactggaaacaatattgaaacactggaccagatatcaaagtgaatctgcagatctaattcactggttacaatctgcaaaagaccggctagaattttggactcagcaatctgtgacagtcccacaagagctggaaatggtccgtgatcatctaaatgctttcctggagttttctaaagaagtggatgcccaatcttccctgaaatcatctgttctgagtactggaaatcagctccttcgactaaaaaaggtggacacagccacgctgcgctctgagctgtcgcgcattgatagccagtggactgacctgctaaccaatatcccagccgtccaggagaagctccaccagctccagatggataaactgccttcccgccatgccatttctgaagtcatgagttggatttctctaatggaaaatgttattcagaaggatgaagataatattaaaaattccataggttacaaggcaattcatgaataccttcagaaatataagggttttaagatagacattaactgtaaacagctgacagtggattttgtgaaccagtccgtgctacaaatcagcagtcaggatgtggaaagtaagcgtagtgataagactgattttgctgagcaacttggagcaatgaataaaagttggcaaattctgcaaggtctagtaactgagaagatccagctgttggaaggcttattggaatcttggtcagaatatgaaaataatgtacaatgtctgaaaacatggtttgaaacccaggaaaagagactaaaacaacagcatcgaattggagatcaggcttctgttcaaaatgcactgaaagactgtcaggatctggaagatttgattaaagcaaaagaaaaagaagtagagaaaattgagcagaatggacttgctttgattcagaacaagaaagaagacgtctctagcattgtcatgagcacactgcgagagctcggccaaacctgggcaaatttagatcacatggttggacaattaaagatactgctgaaatcagtgcttgaccaatggagtagtcacaaagtggcctttgacaagataaacagttacctcatggaggccagatactctctttcccgattccgtctgctgactggctccttagaagctgtgcaagttcaggtggacaatcttcagaatctccaagatgatctggaaaaacaggaaaggagcttacagaaatttggctctatcaccaaccaattattaaaagagtgtcacccacccgtgacagaaactcttaccaatacactgaaagaagtcaacatgagatggaataacttgctggaagagattgctgagcagctacagtccagcaaggccctacttcagctttggcaaagatacaaggactactccaaacagtgtgcttcgacagttcagcagcaggaggatcgaaccaatgagctgttgaaggcagccacaaacaaggacattgccgatgatgaggttgccacatggattcaagattgcaacgacctcctcaaaggactgggcacagttaaagattccctcttttttctccatgagctgggagagcaactgaagcaacaagtggatgcttccgcagcatcagctattcaatcggatcaactctctttgagtcaacacttgtgtgccctggagcaagctctctgcaaacagcagacttcattacaggctggagttcttgattatgaaacctttgccaagagtttagaagctttggaggcctggatagtggaagctgaagaaatactacaagggcaggaccctagccactcatctgacctctccacaatccaggaaaggatggaagaacttaagggacagatgttaaaattcagcagcatggctccagatttagaccgtctaaatgagcttggatataggttacccttgaatgataaggaaatcaaaagaatgcagaatctgaaccgccattggtctctgatctcctctcagactacagaaagattcagcaagttgcagtcatttttgctacaacatcagactttcttggaaaaatgtgaaacatggatggaattcctagttcagacagaacaaaagttagcagtagagatttcaggaaattatcagcaccttttggaacagcagagagcacacgagttgtttcaagccgagatgttcagtcgtcagcagattttgcactcaatcattattgatgggcaacgtcttctagaacaaggtcaagttgatgacagggatgaattcaacctgaaattgacactcctcagtaatcaatggcagggagtgattcgcagggcccagcagaggcgggggatcattgacagccagattcgccagtggcagcgctatagggagatggcagaaaagcttcgtaaatggttggttgaagtgtcctacctccccatgagtggtctcggaagtgttcctataccactgcaacaagcaaggaccctctttgatgaagtgcagttcaaagaaaaagtgtttctgcggcaacaaggcagctacatcctgactgtggaggctggcaagcaactccttctctcggcggacagtggcgctgaggccgccttgcaggccgaactcgctgaaatccaagagaaatggaaatcagccagcatgcggctggaagaacagaagaaaaaactagccttcttgttgaaagactgggaaaaatgtgagaaaggaatagcagattccctggagaaactacgaactttcaaaaagaagctttcgcagtctctcccggatcaccatgaagagctccatgcagaacaaatgcgttgcaaggaattagaaaatgcagttgggagctggacagatgacttgacccagttgagcctgctgaaggacaccctctctgcctatatcagtgctgatgatatctccattcttaatgaacgcgtagagcttctgcaaaggcagtgggaagaactatgccaccagctctccttaaggcggcagcaaataggtgaaagattgaatgaatgggcagtcttcagtgaaaagaacaaggaactctgtgagtggttgactcaaatggaaagcaaagtttctcagaatggagacattctcattgaagaaatgatagagaagctcaagaaggattatcaagaggaaattgctattgctcaagagaacaaaatacagctccaacaaatgggagaacgacttgctaaagccagccatgaaagcaaagcatctgagattgaatacaagctgggaaaggtcaacgaccggtggcagcatctcctggacctcattgcagccagggtgaagaagctgaaggagaccctggtagccgtgcagcagcttgataagaacatgagcagcctgaggacctggctcgctcacatcgagtcagagctggccaagccaatagtctacgattcctgtaactcggaagaaatacagagaaagcttaatgagcagcaggagcttcagagagacatagagaagcacagtacaggtgttgcatctgtcctcaacctgtgtgaagtcctgctgcacgactgtgacgcctgtgccactgatgccgagtgtgactctatacagcaggctacgagaaacctggaccggcggtggagaaacatttgtgctatgtccatggaaaggaggctgaaaatcgaagagacgtggcgattgtggcagaaatttctggatgactattcacgttttgaagattggctgaagtcttcagaaaggacagctgcttttcccagctcttctggggtgatctatacagttgccaaggaagaactaaagaaatttgaggctttccagcgacaggtccacgagtgcctgacgcagctggaactgatcaacaagcagtaccgccgcctggccagggagaaccgcactgattcagcatgtagcctcaaacagatggttcacgaaggcaaccagagatgggacaacctgcaaaagcgtgtcacctccatcttgcgcagactcaagcattttattggccagcgtgaggagtttgagactgcgcgggacagcattctggtctggctcacagagatggatctgcagctcactaatattgaacatttttctgagtgtgatgttcaagctaaaataaagcaactcaaggccttccagcaggaaatttcactgaaccacaataagattgagcagataattgcccaaggagaacagctgatagaaaagagtgagcccttggatgcagcgatcatcgaggaggaactagatgagctccgacggtactgccaggaggtcttcgggcgtgtggaaagataccataagaaactgatccgcctgcctctcccagacgatgagcacgacctctcagacagggagctggagctggaagactctgcagctctgtcggacctgcactggcacgaccgctctgcagacagcctgctttctccacagccttcctccaatctctccctctcgctcgctcagcccctccggagcgagcggtcaggacgagacaccccggctagtgtggactccatccccctggagtgggatcacgactatgacctcagtcgggacctggagtctgcaatgtccagagctctgccctctgaggatgaagaaggtcaggatgacaaagatttctacctccggggagctgttggcttatcaggggaccacagtgccctagagtcacagatccgacaactgggcaaagccctggatgatagccgttttcagatacagcaaaccgaaaatatcattcgcagcaaaactcccacggggccggagctagacaccagctacaaaggctacatgaaactgctgggcgaatgcagtagcagtatagactccgtgaagagactggagcacaaactgaaggaggaagaggagagccttcctggctttgttaacctgcatagtaccgaaacccaaacggctggtgtgattgaccgatgggagcttctccaggcccaggcattgagcaaggagttgaggatgaagcagaacctccagaagtggcagcagtttaactcagacttgaacagcatctgggcctggctgggggacacggaggaggagttggaacagctccagcgtctggaactcagcactgacatccagaccatcgagctccagatcaaaaagctcaaggagctccagaaagctgtggaccaccgcaaagccatcatcctctccatcaatctctgcagccctgagttcacccaggctgacagcaaggagagccgggacctgcaggatcgcttgtcgcagatgaatgggcgctgggaccgagtgtgctctctgctggaggagtggcggggcctgctgcaggatgccctgatgcagtgccagggtttccatgaaatgagccatggtttgcttcttatgctggagaacattgacagaaggaaaaatgaaattgtccctattgattctaaccttgatgcagagatacttcaggaccatcacaaacagcttatgcaaataaagcatgagctgttggaatcccaactcagagtagcctctttgcaagacatgtcttgccaactactggtgaatgctgaaggaacagactgtttagaagccaaagaaaaagtccatgttattggaaatcggctcaaacttctcttgaaggaggtcagtcgtcatatcaaggaactggagaagttattagacgtgtcaagtagtcagcaggatttgtcttcctggtcttctgctgatgaactggacacctcagggtctgtgagtcccacatcaggaaggagcaccccaaacagacagaaaacgccacgaggcaagtgtagtctctcacagcctggaccctctgtcagcagtccacatagcaggtccacaaaaggtggctccgattcctccctttctgagccagggccaggtcggtccggccgcggcttcctgttcagagtcctccgagcagctcttccccttcagcttctcctgctcctcctcatcgggcttgcctgccttgtaccaatgtcagaggaagactacagctgtgccctctccaacaactttgcccggtcattccaccccatgctcagatacacgaatggccctcctccactctgaactaagcagatgccatctgcagaagtgctggtagcataaggaggatcgggtcataagcaatcccaaactaccaacaagaggaccttgatcttggcgaaagccctcggtgtggcagctttagccctcctccagatcacatgtgtgcaaattatggcttcagaggtggaagataaacagtgacgggggaacaaacagacaacaagaaggtttggaagaaatctggtttgagactctgaaccttagcactaaggagattgagtaaggacctccaaagttccccggactcatgaattctgggcccttggcccattctgtgcacagccaaggacttcagtagaccatctgggcagctttcccatggtgctgctccaaccatcagataaatgaccctcccaagcaccatgtcagtgtcgtacaatctaccaaccaaccagtgctgaagagattttagaaccttgtaacatacaatttttaagagcttatatggcagcttcctttttaccttgttttcctttggggcatgatgttttaacctttgctttagaagcacaagctgtaaatctaaaaggcacttttttttagaggtataaagaaaaactagatgtaataaataagatcatggaaggctttatgtgaaaaaagttgaatgttatagtaaaaaaaaaaagatatttatgt

SEQ ID NO: 4971 - protein, 3212 aa, Homo sapiens; identical to SEQ ID NO: 4961

SEQ ID NO: 4972 - DNA, 10764 bp, Homo sapiens
caaaaatcagtctgatctcgggaaacctggagaaatttattttctgtactctaatgttctttcattttggtgaccatcaaggtgctgggagaggaattagatggctgtaattcaaagttaatggaattagatgcagcagtacagaaattcttggaacagaatggccaactgggtaagccactggccaagaagataggaaaactgactgaacttcaccagcagaccattagacaagctgagaatcggctctccaagctcaatcaggcagcatcacatttagaagaatacaatgaaatgcttgaattaattttgaagtggattgaaaaagctaaagtcttggctcatggaactattgcatggaattctgcaagccagcttcgggaacaatatattttgcatcagaccctgctagaagaatccaaagaaattgacagtgagctggaagcaatgactgagaaattacagtacctcactagcgtgtactgtacagaaaaaatgtctcagcaagtggcagaactgggacgggagactgaggagttgcgacagatgatcaaaattcgtttgcagaacctccaagatgcagctaaggatatgaaaaaatttgaagcagagttgaaaaagttacaagctgccttggagcaagcccaggcaacactgacttctccagaagttggacgtctcagtctcaaggagcagctctctcatcggcagcatttgttgtctgagatggagtcactgaagccgaaggtgcaagcagtgcagctctgccagagtgccctccggatccccgaggatgtggttgccagcttacctctctgtcatgctgctctgcggctgcaggaagaggccagccggctgcagcacaccgccatccagcagtgtaacatcatgcaggcagctgtggtacaatatgaacaatatgagcaagaaatgaaacatctccagcaactgatagaaggagctcacagagagattgaggataaacctgttgccaccagtaacatacaggagctgcaggctcagatttctcggcatgaggagctggcgcagaaaattaagggctaccaggagcagatcgcttctttgaattccaagtgcaagatgctgacgatgaaagccaagcacgccaccatgctgctgacggtgaccgaggtcgaggggctggcggaagggacagaggacctggatggggagctcctccccacgccttcggcccacccctctgtggtcatgatgactgcaggtcgctgtcacactttgctgtcaccggtcactgaggagtctggggaggagggaaccaacagtgagatttcctctccacctgcctgtcgctccccttcacctgtggctaatacagatgcttctgttaaccaggacattgcatattaccaagccttgtctgctgagaggttgcagacagatgctgcaaaaattcaccccagcacatccgcatcccaggagttctatgaaccgggattggagccatccgctactgccaaactgggtgatttgcagcgttcttgggaaaccttaaagaatgtgatcagtgagaagcagcgcacactctatgaagctttggaacgccagcagaagtaccaggactccctccagtccatctctacgaagatggaggccattgagctgaaactcagtgagagcccagagcctggcaggagtccagaaagccagatggctgaacatcaggcattgatggatgagattctcatgctccaggatgaaatcaatgagctccagtcctctctcgcagaggagctggtatccgagtcttgtgaggccgaccctgcggagcagctggccttgcagtccacgctcactgtcttagccgagcgaatgtccaccatcaggatgaaagcctcggggaaacggcagcttttggaggagaagttgaatgatcagctggaggaacaaaggcaggaacaggccctgcagaggtatcgctgtgaagccgatgagctggacagctggctcttgagtaccaaggccactctggacactgcgctgagtccacccaaggagcccatggacatggaggcccagcttatggactgccagaatatgctggtggaaatagagcagaaggtggtggctttatcagaactgtcagtccacaatgagaacctgctgctggagggcaaagctcacaccaaggacgaggccgagcagctggctggaaagctgagaaggctcaaggggagcctgctggagctgcagagagccctgcatgataagcagctcaacatgcagggaacagcacaggagaaggaggagagcgatgttgacctaacagccacgcagagccccggcgtccaggaatggctggcccaagctcgcaccacatggacccagcagcggcagagcagtctccagcaacaaaaagagttagaacaggaattagccgagcagaagagtctccttcgctcagtagccagtcgtggagaggagattctaattcaacattcggcggcagagacctctggtgatgctggcgaaaaacctgatgtgttatcccaggagttggggatggaaggggagaaatcatccgctgaagaccagatgagaatgaaatgggaaagcctacatcaagaatttagtaccaagcagaaactactacagaatgttctggaacaggaacaagagcaagtgctttatagcaggccaaatcgactcttgtctggtgtgccactgtacaaaggggacgtgccaacccaagataaatctgcagttacatctttgctggatggactgaaccaagccttcgaggaggtttcatcccagagtggaggggcaaagaggcagagtatacacttggagcagaagttgtatgatggagtctcagccacctctacttggttggatgacgttgaagaacgtttatttgttgccacagcacttttaccagaagaaacagagacttgtctcttcaaccaagagattcttgccaaagacattaaggaaatgtctgaagaaatggataagaacaaaaacttgttttcccaagcttttccagagaatggtgataatcgagatgttattgaagatactttgggttgtcttttgggcaggttatccttgctagactcagtagtgaatcaacgatgtcatcagatgaaagaaagacttcagcaaatactaaatttccagaatgatctgaaagtgctgtttacatcactggctgacaacaaatacatcattctgcaaaaactggcaaatgtgtttgaacagcccgtagcagaacaaatagaggcaatacaacaggctgaagatggactcaaagaatttgatgcaggaatcattgaattaaagaggcgtggtgacaagctacaggtcgagcagccgtccatgcaagaactctccaagctccaggacatgtatgatgagctgatgatgatcattggctcccggaggagtggtctgaatcagaaccttacactcaagagtcagtatgagagggccctacaagatctggctgacctgctagaaactggtcaggagaagatggcaggagaccagaaaatcatcgtgtcttccaaagaggaaatccagcaactacttgacaaacataaggaatactttcagggcctggaatctcatatgatcttgactgaaacactcttcagaaagataatcagctttgcagtccaaaaggaaacccagttccatacagagctgatggctcaggcttctgctgtactgaaacgggctcacaagaggggtgtggagctggagtacattctagagacgtggtcccatctggatgaggaccagcaggagctcagcagacagctggaggtggtggaaagcagcatcccaagcgtgggtctggtggaggagaacgaggacaggcttattgaccgcataacactctaccagcatttaaaatctagccttaatgaataccagcccaaattatatcaagtattagatgatgggaaacgacttctgatatccatcagctgctcagatctagaaagccaactaaatcaacttggagagtgctggctaagtaacaccaataaaatgtctaaggaacttcacagactggaaacaatattgaaacactggaccagatatcaaagtgaatctgcagatctaattcactggttacaatctgcaaaagaccggctagaattttggactcagcaatctgtgacagtcccacaagagctggaaatggtccgtgatcatctaaatgctttcctggagttttctaaagaagtggatgcccaatcttccctgaaatcatctgttctgagtactggaaatcagctccttcgactaaaaaaggtggacacagccacgctgcgctctgagctgtcgcgcattgatagccagtggactgacctgctaaccaatatcccagccgtccaggagaagctccaccagctccagatggataaactgccttcccgccatgccatttctgaagtcatgagttggatttctctaatggaaaatgttattcagaaggatgaagataatattaaaaattccataggttacaaggcaattcatgaataccttcagaaatataagggttttaagatagacattaactgtaaacagctgacagtggattttgtgaaccagtccgtgctacaaatcagcagtcaggatgtggaaagtaagcgtagtgataagactgattttgctgagcaacttggagcaatgaataaaagttggcaaattctgcaaggtctagtaactgagaagatccagctgttggaaggcttattggaatcttggtcagaatatgaaaataatgtacaatgtctgaaaacatggtttgaaacccaggaaaagagactaaaacaacagcatcgaattggagatcaggcttctgttcaaaatgcactgaaagactgtcaggatctggaagatttgattaaagcaaaagaaaaagaagtagagaaaattgagcagaatggacttgctttgattcagaacaagaaagaagacgtctctagcattgtcatgagcacactgcgagagctcggccaaacctgggcaaatttagatcacatggttggacaattaaagatactgctgaaatcagtgcttgaccaatggagtagtcacaaagtggcctttgacaagataaacagttacctcatggaggccagatactctctttcccgattccgtctgctgactggctccttagaagctgtgcaagttcaggtggacaatcttcagaatctccaagatgatctggaaaaacaggaaaggagcttacagaaatttggctctatcaccaaccaattattaaaagagtgtcacccacccgtgacagaaactcttaccaatacactgaaagaagtcaacatgagatggaataacttgctggaagagattgctgagcagctacagtccagcaaggccctacttcagctttggcaaagatacaaggactactccaaacagtgtgcttcgacagttcagcagcaggaggatcgaaccaatgagctgttgaaggcagccacaaacaaggacattgccgatgatgaggttgccacatggattcaagattgcaacgacctcctcaaaggactgggcacagttaaagattccctcttttttctccatgagctgggagagcaactgaagcaacaagtggatgcttccgcagcatcagctattcaatcggatcaactctctttgagtcaacacttgtgtgccctggagcaagctctctgcaaacagcagacttcattacaggctggagttcttgattatgaaacctttgccaagagtttagaagctttggaggcctggatagtggaagctgaagaaatactacaagggcaggaccctagccactcatctgacctctccacaatccaggaaaggatggaagaacttaagggacagatgttaaaattcagcagcatggctccagatttagaccgtctaaatgagcttggatataggttacccttgaatgataaggaaatcaaaagaatgcagaatctgaaccgccattggtctctgatctcctctcagactacagaaagattcagcaagttgcagtcatttttgctacaacatcagactttcttggaaaaatgtgaaacatggatggaattcctagttcagacagaacaaaagttagcagtagagatttcaggaaattatcagcaccttttggaacagcagagagcacacgagttgtttcaagccgagatgttcagtcgtcagcagattttgcactcaatcattattgatgggcaacgtcttctagaacaaggtcaagttgatgacagggatgaattcaacctgaaattgacactcctcagtaatcaatggcagggagtgattcgcagggcccagcagaggcgggggatcattgacagccagattcgccagtggcagcgctatagggagatggcagaaaagcttcgtaaatggttggttgaagtgtcctacctccccatgagtggtctcggaagtgttcctataccactgcaacaagcaaggaccctctttgatgaagtgcagttcaaagaaaaagtgtttctgcggcaacaaggcagctacatcctgactgtggaggctggcaagcaactccttctctcggcggacagtggcgctgaggccgccttgcaggccgaactcgctgaaatccaagagaaatggaaatcagccagcatgcggctggaagaacagaagaaaaaactagccttcttgttgaaagactgggaaaaatgtgagaaaggaatagcagattccctggagaaactacgaactttcaaaaagaagctttcgcagtctctcccggatcaccatgaagagctccatgcagaacaaatgcgttgcaaggaattagaaaatgcagttgggagctggacagatgacttgacccagttgagcctgctgaaggacaccctctctgcctatatcagtgctgatgatatctccattcttaatgaacgcgtagagcttctgcaaaggcagtgggaagaactatgccaccagctctccttaaggcggcagcaaataggtgaaagattgaatgaatgggcagtcttcagtgaaaagaacaaggaactctgtgagtggttgactcaaatggaaagcaaagtttctcagaatggagacattctcattgaagaaatgatagagaagctcaagaaggattatcaagaggaaattgctattgctcaagagaacaaaatacagctccaacaaatgggagaacgacttgctaaagccagccatgaaagcaaagcatctgagattgaatacaagctgggaaaggtcaacgaccggtggcagcatctcctggacctcattgcagccagggtgaagaagctgaaggagaccctggtagccgtgcagcagcttgataagaacatgagcagcctgaggacctggctcgctcacatcgagtcagagctggccaagccaatagtctacgattcctgtaactcggaagaaatacagagaaagcttaatgagcagcaggagcttcagagagacatagagaagcacagtacaggtgttgcatctgtcctcaacctgtgtgaagtcctgctgcacgactgtgacgcctgtgccactgatgccgagtgtgactctatacagcaggctacgagaaacctggaccggcggtggagaaacatttgtgctatgtccatggaaaggaggctgaaaatcgaagagacgtggcgattgtggcagaaatttctggatgactattcacgttttgaagattggctgaagtcttcagaaaggacagctgcttttcccagctcttctggggtgatctatacagttgccaaggaagaactaaagaaatttgaggctttccagcgacaggtccacgagtgcctgacgcagctggaactgatcaacaagcagtaccgccgcctggccagggagaaccgcactgattcagcatgtagcctcaaacagatggttcacgaaggcaaccagagatgggacaacctgcaaaagcgtgtcacctccatcttgcgcagactcaagcattttattggccagcgtgaggagtttgagactgcgcgggacagcattctggtctggctcacagagatggatctgcagctcactaatattgaacatttttctgagtgtgatgttcaagctaaaataaagcaactcaaggccttccagcaggaaatttcactgaaccacaataagattgagcagataattgcccaaggagaacagctgatagaaaagagtgagcccttggatgcagcgatcatcgaggaggaactagatgagctccgacggtactgccaggaggtcttcgggcgtgtggaaagataccataagaaactgatccgcctgcctctcccagacgatgagcacgacctctcagacagggagctggagctggaagactctgcagctctgtcggacctgcactggcacgaccgctctgcagacagcctgctttctccacagccttcctccaatctctccctctcgctcgctcagcccctccggagcgagcggtcaggacgagacaccccggctagtgtggactccatccccctggagtgggatcacgactatgacctcagtcgggacctggagtctgcaatgtccagagctctgccctctgaggatgaagaaggtcaggatgacaaagatttctacctccggggagctgttggcttatcaggggaccacagtgccctagagtcacagatccgacaactgggcaaagccctggatgatagccgttttcagatacagcaaaccgaaaatatcattcgcagcaaaactcccacggggccggagctagacaccagctacaaaggctacatgaaactgctgggcgaatgcagtagcagtatagactccgtgaagagactggagcacaaactgaaggaggaagaggagagccttcctggctttgttaacctgcatagtaccgaaacccaaacggctggtgtgattgaccgatgggagcttctccaggcccaggcattgagcaaggagttgaggatgaagcagaacctccagaagtggcagcagtttaactcagacttgaacagcatctgggcctggctgggggacacggaggaggagttggaacagctccagcgtctggaactcagcactgacatccagaccatcgagctccagatcaaaaagctcaaggagctccagaaagctgtggaccaccgcaaagccatcatcctctccatcaatctctgcagccctgagttcacccaggctgacagcaaggagagccgggacctgcaggatcgcttgtcgcagatgaatgggcgctgggaccgagtgtgctctctgctggaggagtggcggggcctgctgcaggatgccctgatgcagtgccagggtttccatgaaatgagccatggtttgcttcttatgctggagaacattgacagaaggaaaaatgaaattgtccctattgattctaaccttgatgcagagatacttcaggaccatcacaaacagcttatgcaaataaagcatgagctgttggaatcccaactcagagtagcctctttgcaagacatgtcttgccaactactggtgaatgctgaaggaacagactgtttagaagccaaagaaaaagtccatgttattggaaatcggctcaaacttctcttgaaggaggtcagtcgtcatatcaaggaactggagaagttattagacgtgtcaagtagtcagcaggatttgtcttcctggtcttctgctgatgaactggacacctcagggtctgtgagtcccacatcaggaaggagcaccccaaacagacagaaaacgccacgaggcaagtgtagtctctcacagcctggaccctctgtcagcagtccacatagcaggtccacaaaaggtggctccgattcctccctttctgagccagggccaggtcggtccggccgcggcttcctgttcagagtcctccgagcagctcttccccttcagcttctcctgctcctcctcatcgggcttgcctgccttgtaccaatgtcagaggaagactacagctgtgccctctccaacaactttgcccggtcattccaccccatgctcagatacacgaatggccctcctccactctgaactaagcagatgccatctgcagaagtgctggtagcataaggaggatcgggtcataagcaatcccaaactaccaacaagaggaccttgatcttggcgaaagccctcggtgtggcagctttagccctcctccagatcacatgtgtgcaaattatggcttcagaggtggaagataaacagtgacgggggaacaaacagacaacaagaaggtttggaagaaatctggtttgagactctgaaccttagcactaaggagattgagtaaggacctccaaagttccccggactcatgaattctgggcccttggcccattctgtgcacagccaaggacttcagtagaccatctgggcagctttcccatggtgctgctccaaccatcagataaatgaccctcccaagcaccatgtcagtgtcgtacaatctaccaaccaaccagtgctgaagagattttagaaccttgtaacatacaatttttaagagcttatatggcagcttcctttttaccttgttttcctttggggcatgatgttttaacctttgctttagaagcacaagctgtaaatctaaaaggcacttttttttagaggtataaagaaaaactagatgtaataaataagatcatggaaggctttatgtgaaaaaagttgaatgttatagtaaaaaaaaaaagatatttatgt

SEQ ID NO: 4973 - protein, 3321 aa, Homo sapiens; identical to SEQ ID NO: 639

SEQ ID NO: 4974 - DNA, 27674 bp, Homo sapiens
cccgggcagtggaaaccgtgggcaaaagttagctggcaggacagcgcagctcctccaggcagcggaggcagcgcgtcccggctctcagggacatttccttcccacctcgacccccgggaggtggtcccggtataaaggctcgctgagcgggtgggtcacagcacagctttgcagctgcggagaaacgcccaaggccgtgcatctccaggagggcggctgggctcccgcagtcctgcagaccgcgcccgatcccggcgacagggcgggcggacagccgcgcatccccggggtcccgccgagcctgggcgcagagagccgggaggaagcgttcgctcgcttcgccttgctgctgggaaactgaacgaggccgagagagaaggttcttgagttcatgtaagaggacagtcttaaaacggaagaagaaaaagaagcagttcagtctttgggagagctgcctccttgttgagtgctgcaaaggcctggaattcatttatgacagaatagatctagaaaagtccaagcatgttttctagagtggtgtagccctgtgctgcctccagtgaagagtctcttggtgttggcttcgtgcttccggagggaccatggcaacctccagaggggcctcccggtgtcctcgggatatcgccaatgtgatgcagaggctgcaagatgagcaagagatagtacaaaaacgaactttcacaaaatggatcaactctcatctggccaagcggaaacctccaatggtggtggacgatctttttgaagacatgaaagatggtgttaaactgcttgcccttctggaggtcctgtctgggcagaaactgccttgtgaacaaggacgccggatgaagcgaatccatgctgtggctaacattggcacggcactcaagttcctcgaaggaagaaagattaaattagtcaacattaactccaccgatatagctgatggccgaccctcaatagttcttggattgatgtggaccattattctatatttccagattgaagagttgaccagcaacctgccccagctccagtctttgtccagcagcgcatcctccgtggacagcatagttagctctgagactcccagcccaccaagtaaacggaaggtgaccaccaagatccaaggaaatgctaagaaggctttattaaagtgggttcagtacacagctggcaagcagactggaatagaagtaaaagattttgggaagagttggagaagcggggttgcctttcattcagttattcatgccattcgaccggaattggtggacttggagacagtgaaaggcagatccaaccgagaaaatttggaggatgctttcactatcgccgaaacagaactggggatcccaagactgctagatcctgaagacgttgatgtggataaaccagatgagaaatctattatgacctatgtagcccagtttctgaaacattatcctgacatccacaatgcaagcactgatgggcaagaggatgatgaaatacttccaggtttcccatcttttgcaaattctgtacaaaattttaagagagaagacagagtaatttttaaggaaatgaaagtttggatagaacaatttgagagagatttgacaagagcacagatggtggaatcaaatttacaggataaatatcagtcatttaagcacttcagagttcaatatgaaatgaagaggaaacagattgaacatttaatacaaccattacacagagacggtaaattgtcacttgaccaagcattggtaaaacaatcttgggatagagtgacctccaggctctttgactggcatatacagcttgataaatctcttcctgcacctctgggcaccataggtgcctggctgtacagagcggaggtggccctgagagaggaaataaccgttcaacaggtccacgaggaaacagcaaacacgatacaacggaaacttgagcaacataaggatctgcttcaaaacacggatgcccacaaaagagcattccatgaaatctaccggaccaggtctgttaacgggattccagtgccacctgatcaattagaggacatggccgagaggtttcattttgtttcctccacatcagagctacacctaatgaaaatggaatttttagaattaaagtaccgtctgctctcactgctggttcttgcagagtcaaagctgaagtcttggatcattaagtacgggaggagagagtcagtggagcagcttctacaaaactacgtgtcttttatagaaaatagcaagttctttgaacaatatgaggtgacataccagatcttgaaacagacagctgagatgtatgtcaaagcagatggttcagtggaagaagctgagaatgtgatgaaattcatgaatgaaaccaccgctcagtggaggaatctctcagtagaagtgaggagtgtgaggagcatgctggaagaagtgatctctaactgggatcgctatggcaatacagtggctagtctgcaagcctggctagaggatgctgaaaaaatgctcaatcaatcagaaaatgccaaaaaggatttttttcgaaatttacctcattggattcagcagcatactgccatgaacgatgctggcaattttctaattgaaacctgtgatgagatggtttcccgtgacctgaagcagcaattactgttgctaaatgggcggtggagggagttgtttatggaagtcaagcaatatgctcaagctgatgagatggacagaatgaagaaggaatacacagactgtgttgttaccctgtctgcttttgcaacggaagcccataagaaactttctgaacccttagaagtctcttttatgaatgtcaagctattaattcaagacttggaggatattgagcagagggtgcctgtgatggatgcccaatacaagataattacaaagacagcacacctcattaccaaagaaagcccccaagaagaaggaaaagaaatgtttgcgaccatgtcaaagctcaaagagcagctaaccaaggtcaaagaatgttactccccactcctttatgagtctcagcagctgttgattccgttggaggaattagaaaagcagatgacgtccttttatgactcacttgggaaaatcaatgaaattatcacagttcttgagcgtgaggcacaatcgagtgccctttttaaacaaaaacatcaggaactgttagcttgtcaagaaaactgtaagaaaaccttgacacttattgagaaaggcagtcaaagtgttcaaaagtttgtgaccttgagcaacgtgttaaagcattttgatcagacgaggctacaaagacagattgcagatattcatgttgcttttcagagtatggtaaagaaaactggagattggaagaagcatgtggaaaccaacagtcgcttgatgaagaagtttgaggagtctcgagcagagttggagaaggtactgcggattgctcaggagggcctggaggaaaagggggatccagaggagctcctgcggagacacactgagtttttcagtcagctggatcagagggtgctcaatgctttcctgaaagcttgtgatgaactcaccgacatccttccagagcaggagcagcaggggctgcaggaagctgttcgaaagctccacaaacaatggaaggatcttcaaggagaagccccttatcatttgcttcatctgaagattgatgtggagaagaataggttcttagcctctgtagaagaatgcagaactgagctggatcgagagaccaagctgatgccccaggaaggcagtgaaaagataattaaagagcacagggttttcttcagtgacaaaggtcctcatcatctctgtgagaaaaggttacagctcatcgaggaactctgtgtgaaactcccagtgcgggacccagtaagggacacacctggaacctgtcacgtgactctcaaagagctcagagctgccattgacagcacctacaggaagctcatggaagacccagacaagtggaaggactacactagcagattctctgagttctcatcttggatatctacaaatgagacacaattaaaggggatcaagggtgaggccatcgatactgccaaccacggagaggttaaacgtgccgttgaagagatcagaaatggtgttaccaaaaggggtgagaccctcagctggctgaaatccaggctgaaagttttgacagaagtttcttctgagaatgaagcccaaaagcagggagatgagctggcaaaattatccagctctttcaaggctcttgtgacgctgctgtcagaggttgaaaagatgctaagcaattttggggactgtgtccagtacaaagaaatagtcaaaaattctctcgaagaattaatttctggctctaaagaagtccaggaacaagctgagaagatcttggatactgaaaatctgtttgaagcacagcagttacttcttcatcaccagcaaaagacaaagcggatctcagcaaagaagagagatgtgcagcagcagatcgcgcaggcgcagcagggagaaggggggctgcctgaccgaggccacgaggagctgcggaagctggagagcacactggatggcctggagcgcagccgggagaggcaggaacgccgcatccaggtcacattaagaaaatgggagcgatttgaaacaaacaaagaaacagtagtaagatacctttttcaaacaggttccagtcatgaacgcttcttgagttttagcagtttggaaagtttatcttcagaactggaacaaacaaaggagttttctaaacggacagaaagtattgcagtccaggctgagaaccttgtaaaggaagcttcagagataccgcttgggccccaaaataagcagctgcttcaacagcaggccaagtcaatcaaagaacaagtcaaaaaattagaagacacgcttgaagaagatattaaaaccatggaaatggtgaaaaccaagtgggatcattttggcagtaattttgagactctgtccgtctggataactgagaaagaaaaagaactcaatgccttggaaacttcgtcatctgccatggacatgcaaatcagccaaattaaggtcacaattcaggaaatagaaagtaagctcagcagcattgtaggattagaagaagaagcccagtcttttgctcagtttgttaccactggagaatctgctcgaattaaagccaagttgacacaaataagaagatacggggaagagcttcgagagcatgcacagtgtctggaaggaacaatcctgggacatttatctcagcagcaaaagtttgaagagaaccttagaaagatccagcaatctgtgtctgaatttgaagataaacttgctgttccaattaaaatatgttcttcagctacagaaacatacaaagttcttcaagaacatatggatctctgccaggccctggagtcactgagcagcgcgatcactgccttctcagccagtgccaggaaggttgtgaacagagattcctgtgttcaggaggctgcggctctacagcagcaatacgaggacatcctaaggagggcgaaggagagacagacggcgctggagaatctgctggcccactggcagaggctagagaaagaactatcatcctttttgacctggttagagcggggtgaagctaaagccagttccccagaaatggacatttctgcagacagagtcaaagtggaaggtgaacttcagttaatacaggcactgcaaaatgaagttgtatcccaggcctcattctatagcaaacttttgcaattgaaggaatcattgttctcagtagcctccaaagatgatgtgaaaatgatgaaactacatttggagcagttggatgagagatggagagatttaccacagatcattaacaaaaggattaattttcttcagtctgtggttgctgaacaccagcaatttgatgagctgctgctttccttttctgtctggattaaactgtttctcagtgaattacaaactacctctgagattagcataatggaccatcaagtagcccttactcggcataaggaccacgcagcagaagtagagagcaaaaagggcgaattgcagagtctgcagggtcacttagcaaagttgggttctctgggccgtgctgaggacctccacctcctgcagggaaaggctgaggactgcttccagctgtttgaggaggccagccaggttgtggagaggcggcagcttgccctgtcccatttggcagaattcctccagagccatgcctctctgtccggcattctccgccagctgaggcaaacagtggaagcaaccaacagtatgaataagaacgagtctgatttgatagaaaaggacctcaatgatgctcttcaaaatgctaaagcattagaatctgctgccgtcagtctggatggcattctttccaaagcccaataccatctgaaaatcgggagctctgagcaaaggacttcctgcagagccacggctgatcagctctgtggagaggtagagaggatccagaaccttctgggaaccaagcagagtgaggcagatgctctggcagtgttgaaaaaagcattccaagaccagaaagaggagcttctgaaaagcattgaggacattgaagaaaggactgacaaagagcgattgaaagaacctacccgccaagctcttcagcagaggttaagagtgtttaatcagctagaagatgaattgaattctcacgagcatgaactatgttggttgaaagacaaagccaagcaaattgcccagaaagatgtagcttttgcacctgaagttgacagggagataaaccgcttagaggtcacctgggatgataccaaaagactaattcatgaaaatcagggtcagtgctgtggacttattgacttaatgagagaatatcagaacctgaaatcagctgtatctaaagtcttagaaaatgccagcagtgtgattgtaaccagaactaccataaaagatcaggaggatcttaaatgggctttttccaagcatgaaactgccaagaacaaaatgaattacaaacagaaagacttggataactttaccagcaaaggaaaacacttgttatctgagctgaagaaaattcacagtagtgatttcagcttggtgaaaacagacatggagagcaccgtggacaaatggctggatgtatcagagaaacttgaagaaaacatggataggctgagagtaagcctgtccatttgggatgatgtactgtcaactagagatgagattgagggatggtcaaacaactgcgttccacagatggcagaaaacatcagcaacctggataaccacctcagagctgaagaactgcttaaagaatttgagtctgaagttaaaaacaaagcattgagattggaagaactgcattccaaagttaatgatctgaaagaattaactaaaaatctagaaacaccgccagaccttcagtttatagaagcagacttaatgcagaaactggagcatgccaaagaaataactgaagtagcaaaaggaaccctgaaggatttcacggctcaaagtacacaagtggagaagtttattaatgacataacaacatggttcacaaaagtggaagaatcgttgatgaactgtgcccaaaatgagacttgtgaagcattgaaaaaagtcaaggatatacaaaaagaacttcaaagtcaacaaagcaacatcagctctacccaagaaaatctcaatagcttgtgccgcaagtaccactcagctgagttggagagcctgggccgtgcaatgactggtctgataaagaaacatgaagccgtgagccagttgtgctccaaaacccaggccagcctgcaggaatctctggaaaaacacttcagtgagtctatgcaggaattccaagaatggtttttgggagcaaaggcagcagcaaaagaatcatcagatcgcaccggtgacagcaaagttctagaagcaaagctccatgatcttcagaacattttggactcagtcagtgatgggcagagcaaacttgatgcagtgactcaagaaggacaaactttgtatgcacatttgtctaaacaaattgtcagtagcattcaagaacaaatcacaaaggccaatgaagagtttcaagcatttctgaaacaatgccttaaagataagcaggctcttcaagactgtgcttcagaacttggaagctttgaagatcagcacagaaaactgaacttatggatccatgaaatggaagaaaggttcaatacggaaaacttgggagagagtaaacagcacattcctgagaagaaaaatgaagttcataaagttgaaatgtttttgggagaactgctggctgcaagagagtctcttgataagctttcccagagagggcagcttctgagtgaagaaggccacggtgctgggcaggagggccgcctgtgttcccagctcctcacaagccaccagaacctacttagaatgaccaaagagaaactccggagctgccaggtggcccttcaggagcacgaagccctggaggaagcactgcaaagcatgtggttctgggtgaaggccattcaggacagactggcctgtgcagagagcactcttgggagcaaagacaccctggagaaacggctgtcacaaatacaggatattctcctgatgaaaggtgaaggggaagttaagttgaatatggccattggcaagggggaacaggccttgagaagtagcaacaaagaaggtcagagggtgattcagactcagttagagacccttaaagaagtgtgggctgacatcatgagctcctccgtccacgctcaaagcactttagagtctgtgattagccaatggaatgactatgtagagaggaaaaaccagttggagcagtggatggaatcagtggatcaaaaaatagaacatcccttacaaccacagccaggtctgaaagagaagttcgtcctgcttgaccacctccagtccatcctgtctgaggcagaagatcacacgagagcccttcaccgtctaattgcgaagtccagggagctctacgaaaagacagaggatgagtctttcaaggacacagctcaagaggagctgaaaacacagtttaatgatataatgactgttgccaaggaaaaaatgaggaaagtggaagagattgtgaaagatcatctaatgtatttagatgcggtccacgagttcacagattggctccattcagcaaaggaagaacttcaccggtggtcagatatgtctggagattcatcagccacccagaaaaagttatcaaaaattaaggagctgatagattccagagagattggtgcaagccgtctcagcagagtggagtcgctggctcccgaagtgaaacagaacacaactgccagtgggtgtgagctcatgcacacggagatgcaggccctgcgtgccgactggaagcagtgggaagacagtgtattccaaacgcagagctgtttggagaacctggtcagccagatggccctttcggagcaggaattctcaggccaagtggctcaactggagcaggccctggaacagttcagtgcccttctgaaaacctgggctcagcagttaaccctcctggaaggcaagaacacggatgaggagatagtggaatgctggcacaaaggacaagagatactggatgctttgcaaaaagcagagcctagaacagaggatctcaagtctcagctgaatgaactttgtcgattttccagagacctgagtacctacagtggaaaagtttctggcttgattaaagagtataattgtctttgtttgcaagcatccaagggctgccagaataaagaacagattttacagcaaagatttcgaaaggccttcagggatttccagcagtggttggttaatgcaaaaatcactaccgccaagtgttttgatatacctcaaaatataagtgaagtttcaactagtcttcagaaaatacaggagtttttgtcagaaagtgaaaatggacagcacaagctaaacatgatgctgtctaaaggggaacttctgagtaccctgctgaccaaagagaaagcgaaagggatccaggccaaagttacagctgcaaaagaagattggaaaaattttcattcaaatctccaccaaaaagaatctgctctagagaatctaaagatccaaatgaaggactttgaagtaagtgctgagcctatccaggactggctgagtaaaactgagaagatggtccatgaaagcagcaatcgcctctatgatctgccagcaaagaggagggagcagcagaagctccagtctgtccttgaggaaatacactgctacgagcctcagctcaacaggctgaaagagaaagctcagcagctgtgggaaggacaagctgccagcaagagctttaggcacagagtgtcgcagctgtcttctcagtatctagcgctaagcaatttaacaaaggagaaagtgtcaagactggatagaatcgttgcagaacacaatcagttctctcttgggattaaagaattacaagactggatgacggatgcgattcacatgctggattcatactgccacccgacatccgacaaaagtgtgctggacagcaggacgctcaagctcgaggctctattatcagtcaaacaggaaaaagagattcagatgaaaatgatagtgaccaggggagaatctgtccttcagaatacttctccagaaggcattcccactattcagcagcagctgcagagtgtgaaggatatgtgggcatcccttttgtctgcagggattcgttgtaaaagccaactcgaaggagctctctccaagtggacaagttatcaggatggcgttcgacagttctccggttggatggatagtatggaagccaacctgaatgaatcagaaaggcagcatgcggagctgcgggataaaacaacgatgctcggaaaagccaagttattaaatgaagaagtgctgagttacagcagcttgctggagaccatcgaagtcaaaggggctggcatgacagaacactatgtcacccagctagaactccaggatctacaggaacgatacagagccatccaagagagggccaaggaagccgtaaccaagtctgaaaaacttgtccgcctgcaccaagagtatcagagagacctaaaggcatttgaagtttggttggggcaagaacaagaaaagctcgaccagtattcagttcttgaaggtgatgcccacactcatgagacaacattgcgtgatcttcaggagctacaggtacactgtgcagaggggcaggccctgttgaactcagtgctgcacaccagagaggatgtgatcccatcaggtatcccacaggcagaggaccgggctttagagtctctccggcaagactggcaggcttaccagcacaggctgtccgagactcgaactcagttcaataacgtggtgaacaaattgaggctaatggagcaaaagtttcagcaagtagatgaatggctcaaaacagcagaggagaaagttagtcccaggaccagacgtcagtctaacagggcaaccaaggagatacaattacatcagatgaagaagtggcacgaagaagtgactgcatacagagatgaagttgaggaagtgggagctagagctcaggagatactggacgagagccacgtgaacagcagaatgggttgccaggccacccagctgacttccagataccaggccctgcttctccaagtgctggaacaaataaaattcctggaggaggagattcagagtttggaggaatcagaatcatccctcagttcctattctgattggtatggctctactcataaaaacttcaagaatgtggctaccaagattgacaaagtagatacagtaatgatggggaagaaattgaagacgttggaggttttgctcaaagacatggagaaaggtcacagtttgctgaaatcagcccgggagaaaggagagagggctgttaaatacttggaggaaggcgaggcagagaggttaagaaaggagattcatgatcacatggagcagttgaaggaactgaccagcactgtccggaaagaacacatgacgctggaaaaaggtcttcatttagcaaaggaattctcagataaatgcaaagcactgacacagtggatagcagaataccaggaaattctacatgttcctgaagaacccaaaatggaattatatgagaaaaaagctcagttatctaaatacaagtcacttcaacaaacggtgctgtcccatgaaccatcagtaaagtcagtgagagagaagggtgaagctcttttggaactggtgcaggacgtcactttaaaggacaaaatagatcaacttcaaagtgattaccaggacctgtgcagcataggaaaggagcatgtcttcagtctggaggcgaaagtcaaagaccatgaagactacaacagtgagctccaagaggtcgaaaagtggctgctgcagatgtctggcagactggtggcacctgacctcctggagacaagcagcctggagacaatcacccagcaattggcccaccacaaggcaatgatggaagaaattgctggttttgaagaccgtttgaacaatcttcaaatgaaaggtgatactttgattggccaatgtgcagaccacctgcaagcgaaacttaaacaaaacgtgcatgctcatctgcagggcacaaaggacagctactcagcgatctgcagcacagctcagaggatgtaccagagtttggaacacgaacttcagaagcacgtcagccgacaagacaccctgcagcagtgccaggcctggctttctgcagtccagccggatttagagccaagtcctcaaccacctcttagtagggcagaagccattaagcaggtcaaacacttcagagctttgcaagagcaggcaaggacctacctagatctcctttgctccatgtgtgacctgtcaaatgcttcggtgaaaaccacagcaaaagacattcaacaaacagagcaaacgattgaacaaaagcttgtccaggcccagaacttaactcagggctgggaagagatcaagcacctgaagtctgagctctggatttacctgcaagatgctgatcagcaactgcagaacatgaagaggaggcactctgagctggagctgaacattgcacagaacatggtttcacaagttaaggattttgttaagaaactacagagcaaacaggcatccgtgaacaccataatagaaaaggtgaataagttaacaaagaaggaggaatcgcctgaacacaaggaaataaatcatttaaatgatcagtggctcgatttgtgccgtcagtctaacaacctgtgcttgcaaagggaagaggatcttcagagaacaagagattaccatgactgtatgaatgttgttgaagtgttcctagaaaaatttactacagaatgggataacttggccagatctgatgcagagagtacagctgtccacctggaagctttgaaaaagttagcattggcattgcaggagagaaagtatgctattgaagatctgaaagatcaaaagcagaaaatgatagagcatctgaatttagatgacaaggagttagtcaaagaacagacgagtcatttagagcaacgttggtttcagcttgaggacctcattaaaaggaaaatccaagtgtcagtcaccaacttggaggagttaaatgtggtgcagtccagatttcaggagctaatggagtgggcagaagagcaacaacccaacatcgccgaggcccttaagcagagccctcctccagatatggctcagaaccttctcatggatcacctggccatctgcagtgaactggaggccaagcagatgctcctgaaatcgcttataaaggacgcagacagggtcatggcagatcttggtctcaatgagcgacaggtcatccagaaggctctctctgatgcacaaagccacgtgaattgtctcagtgacttagtgggccagcgaagaaagtacttaaacaaagccttgtccgagaaaacccagtttctcatggcagtgttccaggccaccagccaaattcagcaacatgagcgaaagataatgttccgtgaacacatctgtctgttaccagatgatgtgagcaaacaagtcaaaacatgtaagagtgcacaagccagcctcaagacttaccaaaatgaagtcactggactttgggcccagggtcgcgaactaatgaaggaagtcacagagcaggaaaagagtgaagtgctggggaagcttcaggaattgcagagtgtctatgacagtgttttacaaaagtgcagtcaccggttacaagaactagagaagaatttggtttctaggaagcattttaaggaagattttgataaagcttgccactggctaaaacaagcagatattgttacatttcctgaaatcaacctaatgaatgagagttctgagcttcatacacaactggctaaataccaaaacattcttgaacaatctccagaatatgaaaatcttctacttacgctgcagagaactgggcagaccatattaccatcgctgaatgaagtcgatcattcctacctcagtgaaaagctaaatgctttgcctcgacaatttaatgtaattgttgccttggctaaagacaagttctataaagtccaggaagcaattcttgctcggaaggaatatgcttccttgattgagttgacaacccagtctctgagtgaacttgaagcccaattcttgaggatgagcaaagttcccaccgacctggccgttgaggaggctctttctctgcaagatggttgcagagccattctggacgaggtggcgggccttggggaggcggtggatgaactgaaccagaaaaaagaaggttttcgcagcacaggtcagccttggcagccagacaagatgctgcaccttgtcaccttatatcacaggctgaagcgacaaacagaacagagggttagcttattagaagacaccaccagtgcttaccaagaacacgagaagatgtgccaacagctggagagacaactgaagtctgtaaaagaggagcagtccaaagtgaatgaggaaacgctgcctgcagaggagaagctcaaaatgtatcactccctggcaggaagtctccaggactcagggattgtactgaaacgagtaaccatacatcttgaagatcttgccccacaccttgaccccttggcttatgagaaagccaggcatcagatccagtcctggcaaggggagttaaaactgttgacttctgccattggtgagacggtgacagaatgtgagagccgaatggtgcagagtatagacttccagactgagatgagtcgctccctggactggctgaggagagtgaaggcagagctcagtgggccggtgtacctagacctcaacctgcaggacatccaagaggaaatcagaaaaatccaaattcatcaggaagaggtccagtccagcttgagaatcatgaatgcgctgagtcacaaggaaaaggagaagttcacaaaggccaaggagctgatttctgcggatttagaacacagcctcgctgagctctcagagctggatggagacatccaggaagccttacgcaccagacaggctaccttgactgaaatatatagccagtgtcaaaggtattatcaggtatttcaagcagccaatgactggcttgaggatgcccaagaattgttacagctggcaggcaatggcctagacgtggagagcgcagaggaaaatctcaaaagccacatggaatttttcagtacagaggatcagttccatagtaacctggaggagctccacagcctggtagccaccctggacccactcatcaagccaaccggcaaagaagacctagaacagaaagtggcttctctggaactcaggagccagaggatgagccgggactctggtgcccaagtggatctcttgcagagatgcacagctcaatggcacgattaccagaaagcaagggaagaggttattgaattgatgaatgatacagaaaagaaattgtctgagttttctttgttgaagacttcgtctagtcatgaagcggaagaaaaattgtcagaacacaaggctttagtgtcagtggttaactctttccatgagaaaattgtggcccttgaggaaaaagcttcacaactggagaaaaccggaaatgatgccagcaaagccaccctgagcaggtcaatgaccaccgtctggcagcgctggacacgccttcgagctgtggcccaggaccaggagaagatcctggaagatgcagtggatgagtggacgggctttaacaacaaggttaaaaaggccactgaaatgattgatcagctgcaagataagttacctggaagttcagcagagaaagcatcgaaagcagagctcttaactcttcttgaataccacgacacgttcgttctggagctggagcagcagcagtcggccttgggcatgctgcggcagcaaaccctgagcatgctccaggatggagccgccccaacccctggggaagagcctccgctcatgcaggaaatcaccgccatgcaagatcggtgcctgaacatgcaggagaaagtgaagactaatggaaagttggtgaagcaagagctgaaggaccgagaaatggtggagactcagatcaattctgtgaaatgttgggttcaggaaacgaaagaatatttagggaatccaacaatagaaatagatgctcaacttgaagaacttcagattctcctaacagaagccacaaatcaccgacagaacattgaaaaaatggcagaagaacagaaggagaagtacttaggtctttataccatattaccttctgaactctcccttcagttggctgaagtggcgttagatctaaagatccgagatcagatccaagacaaaataaaagaagttgagcagagcaaggccacgagccaggaactcagccggcaaattcagaagttagctaaagacctcacaactattctaactaagctgaaagcgaagacagataatgtagttcaagctaaaactgaccaaaaggtgctgggagaggaattagatggctgtaattcaaagttaatggaattagatgcagcagtacagaaattcttggaacagaatggccaactgggtaagccactggccaagaagataggaaaactgactgaacttcaccagcagaccattagacaagctgagaatcggctctccaagctcaatcaggcagcatcacatttagaagaatacaatgaaatgcttgaattaattttgaagtggattgaaaaagctaaagtcttggctcatggaactattgcatggaattctgcaagccagcttcgggaacaatatattttgcatcagaccctgctagaagaatccaaagaaattgacagtgagctggaagcaatgactgagaaattacagtacctcactagcgtgtactgtacagaaaaaatgtctcagcaagtggcagaactgggacgggagactgaggagttgcgacagatgatcaaaattcgtttgcagaacctccaagatgcagctaaggatatgaaaaaatttgaagcagagttgaaaaagttacaagctgccttggagcaagcccaggcaacactgacttctccagaagttggacgtctcagtctcaaggagcagctctctcatcggcagcatttgttgtctgagatggagtcactgaagccgaaggtgcaagcagtgcagctctgccagagtgccctccggatccccgaggatgtggttgccagcttacctctctgtcatgctgctctgcggctgcaggaagaggccagccggctgcagcacaccgccatccagcagtgtaacatcatgcaggcagctgtggtacaatatgaacaatatgagcaagaaatgaaacatctccagcaactgatagaaggagctcacagagagattgaggataaacctgttgccaccagtaacatacaggagctgcaggctcagatttctcggcatgaggagctggcgcagaaaattaagggctaccaggagcagatcgcttctttgaattccaagtgcaagatgctgacgatgaaagccaagcacgccaccatgctgctgacggtgaccgaggtcgaggggctggcggaagggacagaggacctggatggggagctcctccccacgccttcggcccacccctctgtggtcatgatgactgcaggtcgctgtcacactttgctgtcaccggtcactgaggagtctggggaggagggaaccaacagtgagatttcctctccacctgcctgtcgctccccttcacctgtggctaatacagatgcttctgttaaccaggacattgcatattaccaagccttgtctgctgagaggttgcagacagatgctgcaaaaattcaccccagcacatccgcatcccaggagttctatgaaccgggattggagccatccgctactgccaaactgggtgatttgcagcgttcttgggaaaccttaaagaatgtgatcagtgagaagcagcgcacactctatgaagctttggaacgccagcagaagtaccaggactccctccagtccatctctacgaagatggaggccattgagctgaaactcagtgagagcccagagcctggcaggagtccagaaagccagatggctgaacatcaggcattgatggatgagattctcatgctccaggatgaaatcaatgagctccagtcctctctcgcagaggagctggtatccgagtcttgtgaggccgaccctgcggagcagctggccttgcagtccacgctcactgtcttagccgagcgaatgtccaccatcaggatgaaagcctcggggaaacggcagcttttggaggagaagttgaatgatcagctggaggaacaaaggcaggaacaggccctgcagaggtatcgctgtgaagccgatgagctggacagctggctcttgagtaccaaggccactctggacactgcgctgagtccacccaaggagcccatggacatggaggcccagcttatggactgccagaatatgctggtggaaatagagcagaaggtggtggctttatcagaactgtcagtccacaatgagaacctgctgctggagggcaaagctcacaccaaggacgaggccgagcagctggctggaaagctgagaaggctcaaggggagcctgctggagctgcagagagccctgcatgataagcagctcaacatgcagggaacagcacaggagaaggaggagagcgatgttgacctaacagccacgcagagccccggcgtccaggaatggctggcccaagctcgcaccacatggacccagcagcggcagagcagtctccagcaacaaaaagagttagaacaggaattagccgagcagaagagtctccttcgctcagtagccagtcgtggagaggagattctaattcaacattcggcggcagagacctctggtgatgctggcgaaaaacctgatgtgttatcccaggagttggggatggaaggggagaaatcatccgctgaagaccagatgagaatgaaatgggaaagcctacatcaagaatttagtaccaagcagaaactactacagaatgttctggaacaggaacaagagcaagtgctttatagcaggccaaatcgactcttgtctggtgtgccactgtacaaaggggacgtgccaacccaagataaatctgcagttacatctttgctggatggactgaaccaagccttcgaggaggtttcatcccagagtggaggggcaaagaggcagagtatacacttggagcagaagttgtatgatggagtctcagccacctctacttggttggatgacgttgaagaacgtttatttgttgccacagcacttttaccagaagaaacagagacttgtctcttcaaccaagagattcttgccaaagacattaaggaaatgtctgaagaaatggataagaacaaaaacttgttttcccaagcttttccagagaatggtgataatcgagatgttattgaagatactttgggttgtcttttgggcaggttatccttgctagactcagtagtgaatcaacgatgtcatcagatgaaagaaagacttcagcaaatactaaatttccagaatgatctgaaagtgctgtttacatcactggctgacaacaaatacatcattctgcaaaaactggcaaatgtgtttgaacagcccgtagcagaacaaatagaggcaatacaacaggctgaagatggactcaaagaatttgatgcaggaatcattgaattaaagaggcgtggtgacaagctacaggtcgagcagccgtccatgcaagaactctccaagctccaggacatgtatgatgagctgatgatgatcattggctcccggaggagtggtctgaatcagaaccttacactcaagagtcagtatgagagggccctacaagatctggctgacctgctagaaactggtcaggagaagatggcaggagaccagaaaatcatcgtgtcttccaaagaggaaatccagcaactacttgacaaacataaggaatactttcagggcctggaatctcatatgatcttgactgaaacactcttcagaaagataatcagctttgcagtccaaaaggaaacccagttccatacagagctgatggctcaggcttctgctgtactgaaacgggctcacaagaggggtgtggagctggagtacattctagagacgtggtcccatctggatgaggaccagcaggagctcagcagacagctggaggtggtggaaagcagcatcccaagcgtgggtctggtggaggagaacgaggacaggcttattgaccgcataacactctaccagcatttaaaatctagccttaatgaataccagcccaaattatatcaagtattagatgatgggaaacgacttctgatatccatcagctgctcagatctagaaagccaactaaatcaacttggagagtgctggctaagtaacaccaataaaatgtctaaggaacttcacagactggaaacaatattgaaacactggaccagatatcaaagtgaatctgcagatctaattcactggttacaatctgcaaaagaccggctagaattttggactcagcaatctgtgacagtcccacaagagctggaaatggtccgtgatcatctaaatgctttcctggagttttctaaagaagtggatgcccaatcttccctgaaatcatctgttctgagtactggaaatcagctccttcgactaaaaaaggtggacacagccacgctgcgctctgagctgtcgcgcattgatagccagtggactgacctgctaaccaatatcccagccgtccaggagaagctccaccagctccagatggataaactgccttcccgccatgccatttctgaagtcatgagttggatttctctaatggaaaatgttattcagaaggatgaagataatattaaaaattccataggttacaaggcaattcatgaataccttcagaaatataagggttttaagatagacattaactgtaaacagctgacagtggattttgtgaaccagtccgtgctacaaatcagcagtcaggatgtggaaagtaagcgtagtgataagactgattttgctgagcaacttggagcaatgaataaaagttggcaaattctgcaaggtctagtaactgagaagatccagctgttggaaggcttattggaatcttggtcagaatatgaaaataatgtacaatgtctgaaaacatggtttgaaacccaggaaaagagactaaaacaacagcatcgaattggagatcaggcttctgttcaaaatgcactgaaagactgtcaggatctggaagatttgattaaagcaaaagaaaaagaagtagagaaaattgagcagaatggacttgctttgattcagaacaagaaagaagacgtctctagcattgtcatgagcacactgcgagagctcggccaaacctgggcaaatttagatcacatggttggacaattaaagatactgctgaaatcagtgcttgaccaatggagtagtcacaaagtggcctttgacaagataaacagttacctcatggaggccagatactctctttcccgattccgtctgctgactggctccttagaagctgtgcaagttcaggtggacaatcttcagaatctccaagatgatctggaaaaacaggaaaggagcttacagaaatttggctctatcaccaaccaattattaaaagagtgtcacccacccgtgacagaaactcttaccaatacactgaaagaagtcaacatgagatggaataacttgctggaagagattgctgagcagctacagtccagcaaggccctacttcagctttggcaaagatacaaggactactccaaacagtgtgcttcgacagttcagcagcaggaggatcgaaccaatgagctgttgaaggcagccacaaacaaggacattgccgatgatgaggttgccacatggattcaagattgcaacgacctcctcaaaggactgggcacagttaaagattccctcttttttctccatgagctgggagagcaactgaagcaacaagtggatgcttccgcagcatcagctattcaatcggatcaactctctttgagtcaacacttgtgtgccctggagcaagctctctgcaaacagcagacttcattacaggctggagttcttgattatgaaacctttgccaagagtttagaagctttggaggcctggatagtggaagctgaagaaatactacaagggcaggaccctagccactcatctgacctctccacaatccaggaaaggatggaagaacttaagggacagatgttaaaattcagcagcatggctccagatttagaccgtctaaatgagcttggatataggttacccttgaatgataaggaaatcaaaagaatgcagaatctgaaccgccattggtctctgatctcctctcagactacagaaagattcagcaagttgcagtcatttttgctacaacatcagactttcttggaaaaatgtgaaacatggatggaattcctagttcagacagaacaaaagttagcagtagagatttcaggaaattatcagcaccttttggaacagcagagagcacacgagttgtttcaagccgagatgttcagtcgtcagcagattttgcactcaatcattattgatgggcaacgtcttctagaacaaggtcaagttgatgacagggatgaattcaacctgaaattgacactcctcagtaatcaatggcagggagtgattcgcagggcccagcagaggcgggggatcattgacagccagattcgccagtggcagcgctatagggagatggcagaaaagcttcgtaaatggttggttgaagtgtcctacctccccatgagtggtctcggaagtgttcctataccactgcaacaagcaaggaccctctttgatgaagtgcagttcaaagaaaaagtgtttctgcggcaacaaggcagctacatcctgactgtggaggctggcaagcaactccttctctcggcggacagtggcgctgaggccgccttgcaggccgaactcgctgaaatccaagagaaatggaaatcagccagcatgcggctggaagaacagaagaaaaaactagccttcttgttgaaagactgggaaaaatgtgagaaaggaatagcagattccctggagaaactacgaactttcaaaaagaagctttcgcagtctctcccggatcaccatgaagagctccatgcagaacaaatgcgttgcaaggaattagaaaatgcagttgggagctggacagatgacttgacccagttgagcctgctgaaggacaccctctctgcctatatcagtgctgatgatatctccattcttaatgaacgcgtagagcttctgcaaaggcagtgggaagaactatgccaccagctctccttaaggcggcagcaaataggtgaaagattgaatgaatgggcagtcttcagtgaaaagaacaaggaactctgtgagtggttgactcaaatggaaagcaaagtttctcagaatggagacattctcattgaagaaatgatagagaagctcaagaaggattatcaagaggaaattgctattgctcaagagaacaaaatacagctccaacaaatgggagaacgacttgctaaagccagccatgaaagcaaagcatctgagattgaatacaagctgggaaaggtcaacgaccggtggcagcatctcctggacctcattgcagccagggtgaagaagctgaaggagaccctggtagccgtgcagcagcttgataagaacatgagcagcctgaggacctggctcgctcacatcgagtcagagctggccaagccaatagtctacgattcctgtaactcggaagaaatacagagaaagcttaatgagcagcaggagcttcagagagacatagagaagcacagtacaggtgttgcatctgtcctcaacctgtgtgaagtcctgctgcacgactgtgacgcctgtgccactgatgccgagtgtgactctatacagcaggctacgagaaacctggaccggcggtggagaaacatttgtgctatgtccatggaaaggaggctgaaaatcgaagagacgtggcgattgtggcagaaatttctggatgactattcacgttttgaagattggctgaagtcttcagaaaggacagctgcttttcccagctcttctggggtgatctatacagttgccaaggaagaactaaagaaatttgaggctttccagcgacaggtccacgagtgcctgacgcagctggaactgatcaacaagcagtaccgccgcctggccagggagaaccgcactgattcagcatgtagcctcaaacagatggttcacgaaggcaaccagagatgggacaacctgcaaaagcgtgtcacctccatcttgcgcagactcaagcattttattggccagcgtgaggagtttgagactgcgcgggacagcattctggtctggctcacagagatggatctgcagctcactaatattgaacatttttctgagtgtgatgttcaagctaaaataaagcaactcaaggccttccagcaggaaatttcactgaaccacaataagattgagcagataattgcccaaggagaacagctgatagaaaagagtgagcccttggatgcagcgatcatcgaggaggaactagatgagctccgacggtactgccaggaggtcttcgggcgtgtggaaagataccataagaaactgatccgcctgcctctcccagacgatgagcacgacctctcagacagggagctggagctggaagactctgcagctctgtcggacctgcactggcacgaccgctctgcagacagcctgctttctccacagccttcctccaatctctccctctcgctcgctcagcccctccggagcgagcggtcaggacgagacaccccggctagtgtggactccatccccctggagtgggatcacgactatgacctcagtcgggacctggagtctgcaatgtccagagctctgccctctgaggatgaagaaggtcaggatgacaaagatttctacctccggggagctgttggcttatcaggggaccacagtgccctagagtcacagatccgacaactgggcaaagccctggatgatagccgttttcagatacagcaaaccgaaaatatcattcgcagcaaaactcccacggggccggagctagacaccagctacaaaggctacatgaaactgctgggcgaatgcagtagcagtatagactccgtgaagagactggagcacaaactgaaggaggaagaggagagccttcctggctttgttaacctgcatagtaccgaaacccaaacggctggtgtgattgaccgatgggagcttctccaggcccaggcattgagcaaggagttgaggatgaagcagaacctccagaagtggcagcagtttaactcagacttgaacagcatctgggcctggctgggggacacggaggaggagttggaacagctccagcgtctggaactcagcactgacatccagaccatcgagctccagatcaaaaagctcaaggagctccagaaagctgtggaccaccgcaaagccatcatcctctccatcaatctctgcagccctgagttcacccaggctgacagcaaggagagccgggacctgcaggatcgcttgtcgcagatgaatgggcgctgggaccgagtgtgctctctgctggaggagtggcggggcctgctgcaggatgccctgatgcagtgccagggtttccatgaaatgagccatggtttgcttcttatgctggagaacattgacagaaggaaaaatgaaattgtccctattgattctaaccttgatgcagagatacttcaggaccatcacaaacagcttatgcaaataaagcatgagctgttggaatcccaactcagagtagcctctttgcaagacatgtcttgccaactactggtgaatgctgaaggaacagactgtttagaagccaaagaaaaagtccatgttattggaaatcggctcaaacttctcttgaaggaggtcagtcgtcatatcaaggaactggagaagttattagacgtgtcaagtagtcagcaggatttgtcttcctggtcttctgctgatgaactggacacctcagggtctgtgagtcccacatcaggaaggagcaccccaaacagacagaaaacgccacgaggcaagtgtagtctctcacagcctggaccctctgtcagcagtccacatagcaggtccacaaaaggtggctccgattcctccctttctgagccagggccaggtcggtccggccgcggcttcctgttcagagtcctccgagcagctcttccccttcagcttctcctgctcctcctcatcgggcttgcctgccttgtaccaatgtcagaggaagactacagctgtgccctctccaacaactttgcccggtcattccaccccatgctcagatacacgaatggccctcctccactctgaactaagcagatgccatctgcagaagtgctggtagcataaggaggatcgggtcataagcaatcccaaactaccaacaagaggaccttgatcttggcgaaagccctcggtgtggcagctttagccctcctccagatcacatgtgtgcaaattatggcttcagaggtggaagataaacagtgacgggggaacaaacagacaacaagaaggtttggaagaaatctggtttgagactctgaaccttagcactaaggagattgagtaaggacctccaaagttccccggactcatgaattctgggcccttggcccattctgtgcacagccaaggacttcagtagaccatctgggcagctttcccatggtgctgctccaaccatcagataaatgaccctcccaagcaccatgtcagtgtcgtacaatctaccaaccaaccagtgctgaagagattttagaaccttgtaacatacaatttttaagagcttatatggcagcttcctttttaccttgttttcctttggggcatgatgttttaacctttgctttagaagcacaagctgtaaatctaaaaggcacttttttttagaggtataaagaaaaactagatgtaataaataagatcatggaaggctttatgtgaaaaaagttgaatgttatagtaaaaaaaaaaagatatttatgt

SEQ ID NO: 4975 - protein, 8797 aa, Homo sapiens; identical to SEQ ID NO: 645

SEQ ID NO: 4976 - DNA, 900 bp, Homo sapiens
tgaaaaactcagagagctaacctagaaatttggatttctccctttactggagatgaaagttaacactgggccaccgcttcccacagggatcaattgcctgaaactgtatgtggctgctgttttagacaggccgcatgtttttcagtttgccacagtctccatcactccctactcttcccagaaatagaggtccggtgtctactgccatttaccaaccgctttatgccattgttttgttctaatccttgactgatttccatcatttctattactgcctggtcctataggtatgttatttgagaataccttgttcaactctaggtacacattaaaatcactagggagtctttttaaaaataccaattttgagactcacccctagaaattctgattgttgttctgggatgtggcctaagcaaaggaaatttttaaaagttttaccagtgattcttatgtacagccagggcctggaaccattgctttactgtgttaaattctcaagattttaccttagcgtgatctatattaccttctactgaattcaacaggagaagttgaatgatcagctggaggaacaaaggcaggaacaggccctgcagaggtatcgctgtgaagccgatgagctggacagctggctcttgagtaccaaggccactctggacactgcgctgagtccacccaaggagcccatggacatggaggcccagcttatggactgccagaatatgctggtggaaatagagcagaaggtggtggctttatcagaactgtcagtccacaatgagaacctgctgctggagggcaaagctcacaccaaggacgaggccgagcagctggctggaaagctgagaaggctcaaggggagcctgctggagctgcagagagccctgcatgataagc

SEQ ID NO: 4977 - protein, 69 aa, Homo sapiens
MDMEAQLMDCQNMLVEIEQKVVALSELSVHNENLLLEGKAHTKDEAEQLAGKLRRLKGSLLELQRALHD

SEQ ID NO: 4978 - DNA, 702 bp, Homo sapiens
ggcaaatacacctcaataaaatattggaatgaaattgaaaaaatagacaaatgcagattgaatttcttcccacaaccaaatgacgtgaatacaaaggggaaaacaacagcaaaggcatacagtgacaaggaggtggtctcatttccccagaccttgagtctgggctggcattgagatctacattgatcaataatatgacagaagtgattttaagtgacatctgaggctgggccttaagaggacttgagattccactttggctatattggaattcaactctgctctgagacctctacacaaggaaactggtctaagatcctcgtgaataagaagtcacttggaggatagattctaaacctcaagaataagaaataaaagtacaaattggtgtgatgaaggtatattcctatttttggggattgggaggctttacttatttttaaaaactctattgaggtaaagagttaagctgtaacatacttcattgatttcctcacccttttcggctctgttttactatatcccctaatttgttggttgtgctaatatttgtagaaagaggtcttgtatttgctgcatcataatgacatttgtacttttttgactggtttaagtacaaatgaatgaaataaccatttttcctttagttgactttaccctgatttcacctagtgtttcaatgagtaaaaatacagctaaaag

SEQ ID NO: 4979 - protein, 57 aa, Homo sapiens
GKYTSIKYWNEIEKIDKCRLNFFPQPNDVNTKGKTTAKAYSDKEVVSFPQTLSLGWH

SEQ ID NO: 4980 - DNA, 1423 bp, Homo sapiens
cggacttagcccgcctgcacccaggtgaaataaacagccttgttgctcacacaaagcctgtttgatggtctcttcacatggacgcaagtgaaacaatcctttgctgatgaattccatttagagaagtatgggagtctcactctgtgccaggctggagtgcggtggtgcgatctcggcttactgcaacctccacctcccgcgttcaagtgattctcctgcctcagcctctcaagcagctgggactacaggcgcccactaccacgcccagctaatttttgtatttttagtagaaacggggtttcaccatgttggccaggatggtctcgatctcttgacctcgtgatccacctgccgcggcctcccaaagtgctgagattacaggcgtgagccactgcgcctggccaagaagataatagtatttcttactattatttattactatgtaatggcattggtaggagatccagactggatggcacctccaattatcaggaaccggagcccccttcttttggttctaccattctcaacttgttgctatcatttcatggtcctagatggctgcccagcaacttccacatcatatgcattccagcaagaagaaatgaaaaatgcagggagaggggttatttatcctaacgttaagtcaggaccaggaagtggcccttggcacttccgtttatgtctgattggccagcacttaattgcctgctgcgcctggttctgtgggatactggaacgttaggctttagctgggaggctatgcaagagttaaaattccattttccgggatacgaagagaatgctttttggaggtacaatgagcaattgaacctcatgaactaataatgcatcacattttctttttaaagataataactcaaggtacacattaaaatttatttgtaaaaggtgttaaagtaaaaatcccccttaacattccactccatatccattttcctccacagacttaatcactgttaacattttgatgctttcttctttgtattttcatgtaataacatatcatatttactacgcacctattcaactgccttttttaaccaaataaaaatgttattacatagtctggtttttcatttaactatatgtcttagagattgtcctattttgttttgtatggttttatctaaatctactaagctgatgcatagaatttgacagtgtagtcataccatatatgatttaactggtccccattaatagacatttaggctgtttctaatttgtttgcaattcaaaaatttatttcacaaagatactgaattttatgaccagagcctgtgttatagtaaactgtgggtatatttctatggaatagatctattgagagcagtttatgcatcaaagtatatattcatttaaacattcttgcatatttactttttcatgagaactttgg

SEQ ID NO: 4981 - protein, 71 aa, Homo sapiens
MGVSLCARLECGGAISAYCNLHLPRSSDSPASASQAAGTTGAHYHAQLIFVFLVETGFHHVGQDGLDLLTS

SEQ ID NO: 4982 - DNA, 2532 bp, Homo sapiens
ttccttttatgcgaacacaagtatatgaggggttgtgtaaaaattatttttctcttgctgtactacaaagagatagaatcaaactgctttttttcgacatactggtttttctttctgtttttcttctctttcttctatttcttgtggatattatggctaataacacaacaagtttagggagtccatggccagaaaacttttgggaggaccttatcatgtccttcactgtatccatggcaatcgggctggtacttggaggatttatttgggctgtgttcatttgtctgtctcgaagaagaagagccagtgctcccatctcacagtggagttcaagcaggagatctaggtcttcttacacccacggcctcaacagaactggattttaccgccacagtggctgtgaacgtcgaagcaacctcagcctggccagtctcaccttccagcgacaagcttccctggaacaagcaaattcctttccaagaaaatcaagtttcagagcttctactttccatccctttctgcaatgtccaccacttcctgtggaaactgagagtcagctggtgactctcccttcttccaatatctctcccaccatcagcacttcccacagtctgagccgtcctgactactggtccagtaacagtcttcgagtgggcctttcaacaccgcccccacctgcctatgagtccatcatcaaggcattcccagattcctgaggtcttgatccgtcgcccaggcgggagttgcagtagcatgatcaggactcactgcagcctctatctcccaggctcaagtaatcctcccatcttagtgccccaagtagctgggactacaggggtgcactaccacaccgggttgaatttttttttaattttagtagagatgaagtgtcactatgttaccaaggctggtctcaaactcctaaactcagatgatcctcctgcctcggcctcccaaagtgctggaattagcctggccaatcttggatttttaatggaatatgtgggcacaaaatgacagaacataggacattctaaagttccttgatttgatcattataagaagtgtgggactcaagcacaggaaactgaactcttttggtgtcattggatgtttcatttttgacactaattttttctggacaaactctttatgtgtttttcccaagaatagttatctacttcctggaggcaaaatccttggatttactaacatgatgatttaccttttcttcaccgttgtcgttacattgttagaaaagcaacaggaaaaaatccaattcatttgacctaaaaacaagcctcaagtttaaaaccaagctcacgtttttcttaagggaaaaattttctttcttaaacttacatctagcaacttggaaagcactttctctggggatcttcttttgtaactttgcagacaaataagtatgagtcactggggagagagtttgttattgaaatagatgttgcccatgaagaattctccttcctggattgactcttaatcatcaggcatcattcctggtttgcttctctacgaatctcaattccaacttctctgcagagtctgtacagtgattaagccatgccagatggtctttggtgcacacagttatttaagaatccacttccacaggtggctgcccttgtaaggaagaatgcatccctaaatgtggccaccagagagttccagtgggcagatgtctgtggctgcccttctcatttaaggacatgagttcactggagtattactcaaaaagtctgtggttcatttccagtattgtgaatatttagtttatgtggccgtttctttgtttctttgaacagtgggattttcagtgaaaaagtaccctctttttcatttcctattgcagtggtcacagctaatagtgtctgaacatggttcaagaataagagattccatgtagcattttctttattattttcatttcccttatattatccatcattccttaaggacaattattcttaataatgcttatagaaaatgttctctaattaaacatgccaaaaggaaaaagtaagagaaagagggagcaagaagaaaatggaagaaaaagggaaaaaagctaaccggataaccaatttgttataagttggttttcaacaaagaaatttagcagccaagtaaggtttcaagggaatattaacttggtatcagggctacttttttttttttttttttacttgcatgtcatccttaatgtctaacatgaaaaatcagcaaagagtatggtttttatcaagaatttgtgttgggagtaaaaactgctttatagctcccaaattaggaagagaagagcagaaatcctctggggcatttaaccatctggcagaattgttgctgcacccttatcccagttataagacagtcaaaatgactatttcctaaatattgtgagtgtatgaaatgtgaaattaaagcaaaaactggagacttttaatgtatttctttaatttgaaatgttttgtggattgtgaaataaaaataaatttatgtcaagttttattc

SEQ ID NO: 4983 - protein, 235 aa, Homo sapiens; identical to SEQ ID NO: 647

SEQ ID NO: 4984 - DNA, 2672 bp, Homo sapiens
ttccttttatgcgaacacaagtatatgaggggttgtgtaaaaattatttttctcttgctgtactacaaagagatagaatcaaactgctttttttcgacatactggtttttctttctgtttttcttctctttcttctatttcttgtggatattatggctaataacacaacaagtttagggagtccatggccagaaaacttttgggaggaccttatcatgtccttcactgtatccatggcaatcgggctggtacttggaggatttatttgggctgtgttcatttgtctgtctcgaagaagaagagccagtgctcccatctcacagtggagttcaagcaggagatctaggtcttcttacacccacggcctcaacagaactggattttaccgccacagtggctgtgaacgtcgaagcaacctcagcctggccagtctcaccttccagcgacaagcttccctggaacaagcaaattcctttccaagaaaatcaagtttcagagcttctactttccatccctttctgcaatgtccaccacttcctgtggaaactgagagtcagctggtgactctcccttcttccaatatctctcccaccatcagcacttcccacagtctgagccgtcctgactactggtccagtaacagtcttcgagtgggcctttcaacaccgcccccacctgcctatgagtccatcatcaaggcattcccagattcctgaggtcttgatccgtcgcccaggcgggagttgcagtagcatgatcaggactcactgcagcctctatctcccaggctcaagtaatcctcccatcttagtgccccaagtagctgggactacaggggtgcactaccacaccgggttgaatttttttttaattttagtagagatgaagtgtcactatgttaccaaggctggtctcaaactcctaaactcagatgatcctcctgcctcggcctcccaaagtgctggaattagcctggccaatcttggatttttaatggaatatgtgggcacaaaatgacagaacataggacattctaaagttccttgatttgatcattataagaagtgtgggactcaagcacaggaaactgaactcttttggtgtcattggatgtttcatttttgacactaattttttctggacaaactctttatgtgtttttcccaagaatagttatctacttcctggaggcaaaatccttggatttactaacatgatgatttaccttttcttcaccgttgtcgttacattgttagaaaagcaacaggaaaaaatccaattcatttgacctaaaaacaagcctcaagtttaaaaccaagctcacgtttttcttaagggaaaaattttctttcttaaacttacatctagcaacttggaaagcactttctctggggatcttcttttgtaactttgcagacaaataagtatgagtcactggggagagagtttgttattgaaatagatgttgcccatgaagaattctccttcctggattgactcttaatcatcaggcatcattcctggtttgcttctctacgaatctcaattccaacttctctgcagagtctgtacagtgattaagccatgccagatggtctttggtgcacacagttatttaagaatccacttccacaggtggctgcccttgtaaggaagaatgcatccctaaatgtggccaccagagagttccagtgggcagatgtctgtggctgcccttctcatttaaggacatgagttcactggagtattactcaaaaagtctgtggttcatttccagtattgtgaatatttagtttatgtggccgtttctttgtttctttgaacagtgggattttcagtgaaaaagtaccctctttttcatttcctattgcagtggtcacagctaatagtgtctgaacatggttcaagaataagagattccatgtagcattttctttattattttcatttcccttatattatccatcattccttaaggacaattattcttaataatgcttatagaaaatgttctctaattaaacatgccaaaaggaaaaagtaagagaaagagggagcaagaagaaaatggaagaaaaagggaaaaaagctaaccggataaccaatttgttataagttggttttcaacaaagaaatttagcagccaagtaaggtttcaagggaatattaacttggtatcagggctacttttttttttttttttttacttgcatgtcatccttaatgtctaacatgaaaaatcagcaaagagtatggtttttatcaagaatttgtgttgggagtaaaaactgctttatagctcccaaattaggaagagaagagcagaaatcctctggggcatttaaccatctggcagaattgttgctgcacccttatcccagttataagacagtcaaaatgactatttcctaaatattgtgagtgtatgaaatgtgaaattaaagcaaaaactggagacttttaatgtatttctttaatttgaaatgttttgtggattgtgaaataaaaataaatttatgtcaagttttattcaaaattcatttatgaaataatgccaacactgttctaaaaagcaaggagtcaagaaattataaaattcagattaaatcaggaaaacacattagatggaaaattatactatagaatttgagcttattaaaatttattgcata

SEQ ID NO: 4985 - protein, 235 aa, Homo sapiens; identical to SEQ ID NO: 647

SEQ ID NO: 4986 - DNA, 2018 bp, Homo sapiens
ccttttatgcgaacacaagtatatgaggggttgtgtaaaaattatttttctcttgctgtactacaaagagatagaatcaaactgctttttttcgacatactggtttttctttctgtttttcttctctttcttctatttcttgtggatattatggctaataacacaacaagtttagggagtccatggccagaaaacttttgggggtcttgatccgtcgcccaggcgggagttgcagtagcatgatcaggactcactgcagcctctatctcccaggctcaagtaatcctcccatcttagtgccccaagtagctgggactacaggggtgcactaccacaccgggttgaatttttttttaattttagtagagatgaagtgtcactatgttaccaaggctggtctcaaactcctaaactcagatgatcctcctgcctcggcctcccaaagtgctggaattagcctggccaatcttggatttttaatggaatatgtgggcacaaaatgacagaacataggacattctaaagttccttgatttgatcattataagaagtgtgggactcaagcacaggaaactgaactcttttggtgtcattggatgtttcatttttgacactaattttttctggacaaactctttatgtgtttttcccaagaatagttatctacttcctggaggcaaaatccttggatttactaacatgatgatttaccttttcttcaccgttgtcgttacattgttagaaaagcaacaggaaaaaatccaattcatttgacctaaaaacaagcctcaagtttaaaaccaagctcacgtttttcttaagggaaaaattttctttcttaaacttacatctagcaacttggaaagcactttctctggggatcttcttttgtaactttgcagacaaataagtatgagtcactggggagagagtttgttattgaaatagatgttgcccatgaagaattctccttcctggattgactcttaatcatcaggcatcattcctggtttgcttctctacgaatctcaattccaacttctctgcagagtctgtacagtgattaagccatgccagatggtctttggtgcacacagttatttaagaatccacttccacaggtggctgcccttgtaaggaagaatgcatccctaaatgtggccaccagagagttccagtgggcagatgtctgtggctgcccttctcatttaaggacatgagttcactggagtattactcaaaaagtctgtggttcatttccagtattgtgaatatttagtttatgtggccgtttctttgtttctttgaacagtgggattttcagtgaaaaagtaccctctttttcatttcctattgcagtggtcacagctaatagtgtctgaacatggttcaagaataagagattccatgtagcattttctttattattttcatttcccttatattatccatcattccttaaggacaattattcttaataatgcttatagaaaatgttctctaattaaacatgccaaaaggaaaaagtaagagaaagagggagcaagaagaaaatggaagaaaaagggaaaaaagctaaccggataaccaatttgttataagttggttttcaacaaagaaatttagcagccaagtaaggtttcaagggaatattaacttggtatcagggctacttttttttttttttttttacttgcatgtcatccttaatgtctaacatgaaaaatcagcaaagagtatggtttttatcaagaatttgtgttgggagtaaaaactgctttatagctcccaaattaggaagagaagagcagaaatcctctggggcatttaaccatctggcagaattgttgctgcacccttatcccagttataagacagtcaaaatgactatttcctaaatattgtgagtgtatgaaatgtgaaattaaagcaaaaactggagacttttaatgtatttctttaatttgaaatgttttgtggattgtgaaataaaaataaatttatgtcaagttttattc

SEQ ID NO: 4987 - protein, 106 aa, Homo sapiens
MARKLLGVLIRRPGGSCSSMIRTHCSLYLPGSSNPPILVPQVAGTTGVHYHTGLNFFLILVEMKCHYVTKAGLKLLNSDDPPASASQSAGISLANLGFLMEYVGTK

SEQ ID NO: 4988 - DNA, 2158 bp, Homo sapiens
ccttttatgcgaacacaagtatatgaggggttgtgtaaaaattatttttctcttgctgtactacaaagagatagaatcaaactgctttttttcgacatactggtttttctttctgtttttcttctctttcttctatttcttgtggatattatggctaataacacaacaagtttagggagtccatggccagaaaacttttgggggtcttgatccgtcgcccaggcgggagttgcagtagcatgatcaggactcactgcagcctctatctcccaggctcaagtaatcctcccatcttagtgccccaagtagctgggactacaggggtgcactaccacaccgggttgaatttttttttaattttagtagagatgaagtgtcactatgttaccaaggctggtctcaaactcctaaactcagatgatcctcctgcctcggcctcccaaagtgctggaattagcctggccaatcttggatttttaatggaatatgtgggcacaaaatgacagaacataggacattctaaagttccttgatttgatcattataagaagtgtgggactcaagcacaggaaactgaactcttttggtgtcattggatgtttcatttttgacactaattttttctggacaaactctttatgtgtttttcccaagaatagttatctacttcctggaggcaaaatccttggatttactaacatgatgatttaccttttcttcaccgttgtcgttacattgttagaaaagcaacaggaaaaaatccaattcatttgacctaaaaacaagcctcaagtttaaaaccaagctcacgtttttcttaagggaaaaattttctttcttaaacttacatctagcaacttggaaagcactttctctggggatcttcttttgtaactttgcagacaaataagtatgagtcactggggagagagtttgttattgaaatagatgttgcccatgaagaattctccttcctggattgactcttaatcatcaggcatcattcctggtttgcttctctacgaatctcaattccaacttctctgcagagtctgtacagtgattaagccatgccagatggtctttggtgcacacagttatttaagaatccacttccacaggtggctgcccttgtaaggaagaatgcatccctaaatgtggccaccagagagttccagtgggcagatgtctgtggctgcccttctcatttaaggacatgagttcactggagtattactcaaaaagtctgtggttcatttccagtattgtgaatatttagtttatgtggccgtttctttgtttctttgaacagtgggattttcagtgaaaaagtaccctctttttcatttcctattgcagtggtcacagctaatagtgtctgaacatggttcaagaataagagattccatgtagcattttctttattattttcatttcccttatattatccatcattccttaaggacaattattcttaataatgcttatagaaaatgttctctaattaaacatgccaaaaggaaaaagtaagagaaagagggagcaagaagaaaatggaagaaaaagggaaaaaagctaaccggataaccaatttgttataagttggttttcaacaaagaaatttagcagccaagtaaggtttcaagggaatattaacttggtatcagggctacttttttttttttttttttacttgcatgtcatccttaatgtctaacatgaaaaatcagcaaagagtatggtttttatcaagaatttgtgttgggagtaaaaactgctttatagctcccaaattaggaagagaagagcagaaatcctctggggcatttaaccatctggcagaattgttgctgcacccttatcccagttataagacagtcaaaatgactatttcctaaatattgtgagtgtatgaaatgtgaaattaaagcaaaaactggagacttttaatgtatttctttaatttgaaatgttttgtggattgtgaaataaaaataaatttatgtcaagttttattcaaaattcatttatgaaataatgccaacactgttctaaaaagcaaggagtcaagaaattataaaattcagattaaatcaggaaaacacattagatggaaaattatactatagaatttgagcttattaaaatttattgcata

SEQ ID NO: 4989 - protein, 106 aa, Homo sapiens; identical to SEQ ID NO: 4987

SEQ ID NO: 4990 - DNA, 3035 bp, Homo sapiens
ttatgcgaacacaagtatatgaggggttgtgtaaaaattatttttctcttgctgtactacaaagagatagaatcaaactgctttttttcgacatactggtttttctttctgtttttcttctctttcttctatttcttgtggatattatggctaataacacaacaagtttagggagtccatggccagaaaacttttgggaggaccttatcatgtccttcactgtatccatggcaatcgggctggtacttggaggatttatttgggctgtgttcatttgtctgtctcgaagaagaagagccagtgctcccatctcacagtggagttcaagcaggagatctaggtcttcttacacccacggcctcaacagaactggattttaccgccacagtggctgtgaacgtcgaagcaacctcagcctggccagtctcaccttccagcgacaagcttccctggaacaagcaaattcctttccaagaaaatcaagtttcagagcttctactttccatccctttctgcaatgtccaccacttcctgtggaaactgagagtcagctggtgactctcccttcttccaatatctctcccaccatcagcacttcccacagtctgagccgtcctgactactggtccagtaacagtcttcgagtgggcctttcaacaccgcccccacctgcctatgagtccatcatcaaggcattcccagattcctgagtagggtggcttttggtttttgtttctttcttgtcttgtcttttattgaaaggaaatcaaaaataggctaaacagaattttgagggcatggcccaaataactcatgagttccaagttgaaacatggttgtgcaagttggacattacaatgtaaaacacattttcttcaaacacgttttcccttttgtttcaaaaaatgtaatattttcccccaagcgttttatatttatgtattttgtattcaatgtgaggcttattaaaaatagtgattctaatgtaagaatcagctaagatgcattatatatattttaattaaaattaaaacttcagatatttgtggattacaatcctcatttacttccaatgtgactaaaaagagaaaaaaaatcactgtgtcactttaaagaaaaatcttctaagggatttggattttactttctttagaatgacaagtgaatcatattgacattttacaatcttagatttttctttttttttcttttgagacagggtcttgatccgtcgcccaggcgggagttgcagtagcatgatcaggactcactgcagcctctatctcccaggctcaagtaatcctcccatcttagtgccccaagtagctgggactacaggggtgcactaccacaccgggttgaatttttttttaattttagtagagatgaagtgtcactatgttaccaaggctggtctcaaactcctaaactcagatgatcctcctgcctcggcctcccaaagtgctggaattagcctggccaatcttggatttttaatggaatatgtgggcacaaaatgacagaacataggacattctaaagttccttgatttgatcattataagaagtgtgggactcaagcacaggaaactgaactcttttggtgtcattggatgtttcatttttgacactaattttttctggacaaactctttatgtgtttttcccaagaatagttatctacttcctggaggcaaaatccttggatttactaacatgatgatttaccttttcttcaccgttgtcgttacattgttagaaaagcaacaggaaaaaatccaattcatttgacctaaaaacaagcctcaagtttaaaaccaagctcacgtttttcttaagggaaaaattttctttcttaaacttacatctagcaacttggaaagcactttctctggggatcttcttttgtaactttgcagacaaataagtatgagtcactggggagagagtttgttattgaaatagatgttgcccatgaagaattctccttcctggattgactcttaatcatcaggcatcattcctggtttgcttctctacgaatctcaattccaacttctctgcagagtctgtacagtgattaagccatgccagatggtctttggtgcacacagttatttaagaatccacttccacaggtggctgcccttgtaaggaagaatgcatccctaaatgtggccaccagagagttccagtgggcagatgtctgtggctgcccttctcatttaaggacatgagttcactggagtattactcaaaaagtctgtggttcatttccagtattgtgaatatttagtttatgtggccgtttctttgtttctttgaacagtgggattttcagtgaaaaagtaccctctttttcatttcctattgcagtggtcacagctaatagtgtctgaacatggttcaagaataagagattccatgtagcattttctttattattttcatttcccttatattatccatcattccttaaggacaattattcttaataatgcttatagaaaatgttctctaattaaacatgccaaaaggaaaaagtaagagaaagagggagcaagaagaaaatggaagaaaaagggaaaaaagctaaccggataaccaatttgttataagttggttttcaacaaagaaatttagcagccaagtaaggtttcaagggaatattaacttggtatcagggctacttttttttttttttttttacttgcatgtcatccttaatgtctaacatgaaaaatcagcaaagagtatggtttttatcaagaatttgtgttgggagtaaaaactgctttatagctcccaaattaggaagagaagagcagaaatcctctggggcatttaaccatctggcagaattgttgctgcacccttatcccagttataagacagtcaaaatgactatttcctaaatattgtgagtgtatgaaatgtgaaattaaagcaaaaactggagacttttaatgtatttctttaatttgaaatgttttgtggattgtgaaataaaaataaatttatgtcaagttttattc

SEQ ID NO: 4991 - protein, 235 aa, Homo sapiens; identical to SEQ ID NO: 647

SEQ ID NO: 4992 - DNA, 3175 bp, Homo sapiens
ttatgcgaacacaagtatatgaggggttgtgtaaaaattatttttctcttgctgtactacaaagagatagaatcaaactgctttttttcgacatactggtttttctttctgtttttcttctctttcttctatttcttgtggatattatggctaataacacaacaagtttagggagtccatggccagaaaacttttgggaggaccttatcatgtccttcactgtatccatggcaatcgggctggtacttggaggatttatttgggctgtgttcatttgtctgtctcgaagaagaagagccagtgctcccatctcacagtggagttcaagcaggagatctaggtcttcttacacccacggcctcaacagaactggattttaccgccacagtggctgtgaacgtcgaagcaacctcagcctggccagtctcaccttccagcgacaagcttccctggaacaagcaaattcctttccaagaaaatcaagtttcagagcttctactttccatccctttctgcaatgtccaccacttcctgtggaaactgagagtcagctggtgactctcccttcttccaatatctctcccaccatcagcacttcccacagtctgagccgtcctgactactggtccagtaacagtcttcgagtgggcctttcaacaccgcccccacctgcctatgagtccatcatcaaggcattcccagattcctgagtagggtggcttttggtttttgtttctttcttgtcttgtcttttattgaaaggaaatcaaaaataggctaaacagaattttgagggcatggcccaaataactcatgagttccaagttgaaacatggttgtgcaagttggacattacaatgtaaaacacattttcttcaaacacgttttcccttttgtttcaaaaaatgtaatattttcccccaagcgttttatatttatgtattttgtattcaatgtgaggcttattaaaaatagtgattctaatgtaagaatcagctaagatgcattatatatattttaattaaaattaaaacttcagatatttgtggattacaatcctcatttacttccaatgtgactaaaaagagaaaaaaaatcactgtgtcactttaaagaaaaatcttctaagggatttggattttactttctttagaatgacaagtgaatcatattgacattttacaatcttagatttttctttttttttcttttgagacagggtcttgatccgtcgcccaggcgggagttgcagtagcatgatcaggactcactgcagcctctatctcccaggctcaagtaatcctcccatcttagtgccccaagtagctgggactacaggggtgcactaccacaccgggttgaatttttttttaattttagtagagatgaagtgtcactatgttaccaaggctggtctcaaactcctaaactcagatgatcctcctgcctcggcctcccaaagtgctggaattagcctggccaatcttggatttttaatggaatatgtgggcacaaaatgacagaacataggacattctaaagttccttgatttgatcattataagaagtgtgggactcaagcacaggaaactgaactcttttggtgtcattggatgtttcatttttgacactaattttttctggacaaactctttatgtgtttttcccaagaatagttatctacttcctggaggcaaaatccttggatttactaacatgatgatttaccttttcttcaccgttgtcgttacattgttagaaaagcaacaggaaaaaatccaattcatttgacctaaaaacaagcctcaagtttaaaaccaagctcacgtttttcttaagggaaaaattttctttcttaaacttacatctagcaacttggaaagcactttctctggggatcttcttttgtaactttgcagacaaataagtatgagtcactggggagagagtttgttattgaaatagatgttgcccatgaagaattctccttcctggattgactcttaatcatcaggcatcattcctggtttgcttctctacgaatctcaattccaacttctctgcagagtctgtacagtgattaagccatgccagatggtctttggtgcacacagttatttaagaatccacttccacaggtggctgcccttgtaaggaagaatgcatccctaaatgtggccaccagagagttccagtgggcagatgtctgtggctgcccttctcatttaaggacatgagttcactggagtattactcaaaaagtctgtggttcatttccagtattgtgaatatttagtttatgtggccgtttctttgtttctttgaacagtgggattttcagtgaaaaagtaccctctttttcatttcctattgcagtggtcacagctaatagtgtctgaacatggttcaagaataagagattccatgtagcattttctttattattttcatttcccttatattatccatcattccttaaggacaattattcttaataatgcttatagaaaatgttctctaattaaacatgccaaaaggaaaaagtaagagaaagagggagcaagaagaaaatggaagaaaaagggaaaaaagctaaccggataaccaatttgttataagttggttttcaacaaagaaatttagcagccaagtaaggtttcaagggaatattaacttggtatcagggctacttttttttttttttttttacttgcatgtcatccttaatgtctaacatgaaaaatcagcaaagagtatggtttttatcaagaatttgtgttgggagtaaaaactgctttatagctcccaaattaggaagagaagagcagaaatcctctggggcatttaaccatctggcagaattgttgctgcacccttatcccagttataagacagtcaaaatgactatttcctaaatattgtgagtgtatgaaatgtgaaattaaagcaaaaactggagacttttaatgtatttctttaatttgaaatgttttgtggattgtgaaataaaaataaatttatgtcaagttttattcaaaattcatttatgaaataatgccaacactgttctaaaaagcaaggagtcaagaaattataaaattcagattaaatcaggaaaacacattagatggaaaattatactatagaatttgagcttattaaaatttattgcata

SEQ ID NO: 4993 - protein, 235 aa, Homo sapiens; identical to SEQ ID NO: 647

SEQ ID NO: 4994 - DNA, 2234 bp, Homo sapiens
ctcttgctgtactacaaagagatagaatcaaactgctttttttcgacatactggtttttctttctgtttttcttctctttcttctatttcttgtggatattatggctaataacacaacaagtttagggagtccatggccagaaaacttttgggaggaccttatcatgtccttcactgtatccatggcaatcgggctggtacttggaggatttatttgggctgtgttcatttgtcttctcaccttccagcgacaagcttccctggaacaagcaaattcctttccaagaaaatcaagtttcagagcttctactttccatccctttctgcaatgtccaccacttcctgtggaaactgagagtcagctggtgactctcccttcttccaatatctctcccaccatcagcacttcccacagtctgagccgtcctgactactggtccagtaacagtcttcgagtgggcctttcaacaccgcccccacctgcctatgagtccatcatcaaggcattcccagattcctgagtagggtggcttttggtttttgtttctttcttgtcttgtcttttattgaaaggaaatcaaaaataggctaaacagaattttgagggcatggcccaaataactcatgagttccaagttgaaacatggttgtgcaagttggacattacaatgtgcctggccaatcttggatttttaatggaatatgtgggcacaaaatgacagaacataggacattctaaagttccttgatttgatcattataagaagtgtgggactcaagcacaggaaactgaactcttttggtgtcattggatgtttcatttttgacactaattttttctggacaaactctttatgtgtttttcccaagaatagttatctacttcctggaggcaaaatccttggatttactaacatgatgatttaccttttcttcaccgttgtcgttacattgttagaaaagcaacaggaaaaaatccaattcatttgacctaaaaacaagcctcaagtttaaaaccaagctcacgtttttcttaagggaaaaattttctttcttaaacttacatctagcaacttggaaagcactttctctggggatcttcttttgtaactttgcagacaaataagtatgagtcactggggagagagtttgttattgaaatagatgttgcccatgaagaattctccttcctggattgactcttaatcatcaggcatcattcctggtttgcttctctacgaatctcaattccaacttctctgcagagtctgtacagtgattaagccatgccagatggtctttggtgcacacagttatttaagaatccacttccacaggtggctgcccttgtaaggaagaatgcatccctaaatgtggccaccagagagttccagtgggcagatgtctgtggctgcccttctcatttaaggacatgagttcactggagtattactcaaaaagtctgtggttcatttccagtattgtgaatatttagtttatgtggccgtttctttgtttctttgaacagtgggattttcagtgaaaaagtaccctctttttcatttcctattgcagtggtcacagctaatagtgtctgaacatggttcaagaataagagattccatgtagcattttctttattattttcatttcccttatattatccatcattccttaaggacaattattcttaataatgcttatagaaaatgttctctaattaaacatgccaaaaggaaaaagtaagagaaagagggagcaagaagaaaatggaagaaaaagggaaaaaagctaaccggataaccaatttgttataagttggttttcaacaaagaaatttagcagccaagtaaggtttcaagggaatattaacttggtatcagggctacttttttttttttttttttacttgcatgtcatccttaatgtctaacatgaaaaatcagcaaagagtatggtttttatcaagaatttgtgttgggagtaaaaactgctttatagctcccaaattaggaagagaagagcagaaatcctctggggcatttaaccatctggcagaattgttgctgcacccttatcccagttataagacagtcaaaatgactatttcctaaatattgtgagtgtatgaaatgtgaaattaaagcaaaaactggagacttttaatgtatttctttaatttgaaatgttttgtggattgtgaaataaaaataaatttatgtcaagttttattc

SEQ ID NO: 4995 - protein, 139 aa, Homo sapiens
MANNTTSLGSPWPENFWEDLIMSFTVSMAIGLVLGGFIWAVFICLLTFQRQASLEQANSFPRKSSFRASTFHPFLQCPPLPVETESQLVTLPSSNISPTISTSHSLSRPDYWSSNSLRVGLSTPPPPAYESIIKAFPDS

SEQ ID NO: 4996 - DNA, 2374 bp, Homo sapiens
ctcttgctgtactacaaagagatagaatcaaactgctttttttcgacatactggtttttctttctgtttttcttctctttcttctatttcttgtggatattatggctaataacacaacaagtttagggagtccatggccagaaaacttttgggaggaccttatcatgtccttcactgtatccatggcaatcgggctggtacttggaggatttatttgggctgtgttcatttgtcttctcaccttccagcgacaagcttccctggaacaagcaaattcctttccaagaaaatcaagtttcagagcttctactttccatccctttctgcaatgtccaccacttcctgtggaaactgagagtcagctggtgactctcccttcttccaatatctctcccaccatcagcacttcccacagtctgagccgtcctgactactggtccagtaacagtcttcgagtgggcctttcaacaccgcccccacctgcctatgagtccatcatcaaggcattcccagattcctgagtagggtggcttttggtttttgtttctttcttgtcttgtcttttattgaaaggaaatcaaaaataggctaaacagaattttgagggcatggcccaaataactcatgagttccaagttgaaacatggttgtgcaagttggacattacaatgtgcctggccaatcttggatttttaatggaatatgtgggcacaaaatgacagaacataggacattctaaagttccttgatttgatcattataagaagtgtgggactcaagcacaggaaactgaactcttttggtgtcattggatgtttcatttttgacactaattttttctggacaaactctttatgtgtttttcccaagaatagttatctacttcctggaggcaaaatccttggatttactaacatgatgatttaccttttcttcaccgttgtcgttacattgttagaaaagcaacaggaaaaaatccaattcatttgacctaaaaacaagcctcaagtttaaaaccaagctcacgtttttcttaagggaaaaattttctttcttaaacttacatctagcaacttggaaagcactttctctggggatcttcttttgtaactttgcagacaaataagtatgagtcactggggagagagtttgttattgaaatagatgttgcccatgaagaattctccttcctggattgactcttaatcatcaggcatcattcctggtttgcttctctacgaatctcaattccaacttctctgcagagtctgtacagtgattaagccatgccagatggtctttggtgcacacagttatttaagaatccacttccacaggtggctgcccttgtaaggaagaatgcatccctaaatgtggccaccagagagttccagtgggcagatgtctgtggctgcccttctcatttaaggacatgagttcactggagtattactcaaaaagtctgtggttcatttccagtattgtgaatatttagtttatgtggccgtttctttgtttctttgaacagtgggattttcagtgaaaaagtaccctctttttcatttcctattgcagtggtcacagctaatagtgtctgaacatggttcaagaataagagattccatgtagcattttctttattattttcatttcccttatattatccatcattccttaaggacaattattcttaataatgcttatagaaaatgttctctaattaaacatgccaaaaggaaaaagtaagagaaagagggagcaagaagaaaatggaagaaaaagggaaaaaagctaaccggataaccaatttgttataagttggttttcaacaaagaaatttagcagccaagtaaggtttcaagggaatattaacttggtatcagggctacttttttttttttttttttacttgcatgtcatccttaatgtctaacatgaaaaatcagcaaagagtatggtttttatcaagaatttgtgttgggagtaaaaactgctttatagctcccaaattaggaagagaagagcagaaatcctctggggcatttaaccatctggcagaattgttgctgcacccttatcccagttataagacagtcaaaatgactatttcctaaatattgtgagtgtatgaaatgtgaaattaaagcaaaaactggagacttttaatgtatttctttaatttgaaatgttttgtggattgtgaaataaaaataaatttatgtcaagttttattcaaaattcatttatgaaataatgccaacactgttctaaaaagcaaggagtcaagaaattataaaattcagattaaatcaggaaaacacattagatggaaaattatactatagaatttgagcttattaaaatttattgcata

SEQ ID NO: 4997 - protein, 139 aa, Homo sapiens; identical to SEQ ID NO: 4995

SEQ ID NO: 4998 - DNA, 3165 bp, Homo sapiens
cccacgtatgtgtgattcaggagtcaaccaaagatatgtgaaatgtttataaataaaatttggggattctcctctctggctttctcttctccaggatttccctctcacattctcagcagctcttgtttccacaatctctgtcctttgtttctcaagatcagaaacagtgcaggttttcgactgtagctttacctgtcccagactggaagcttccctcaggttaaaaggtttgaaaactggagcttgactagtacttgctgttcttttcttccaggtctcaactcctctccagtagctacaagcatttggtcattcttaaggcctttagaggaccttatcatgtccttcactgtatccatggcaatcgggctggtacttggaggatttatttgggctgtgttcatttgtctgtctcgaagaagaagagccagtgctcccatctcacagtggagttcaagcaggagatctaggtcttcttacacccacggcctcaacagaactggattttaccgccacagtggctgtgaacgtcgaagcaacctcagcctggccagtctcaccttccagcgacaagcttccctggaacaagcaaattcctttccaagaaaatcaagtttcagagcttctactttccatccctttctgcaatgtccaccacttcctgtggaaactgagagtcagctggtgactctcccttcttccaatatctctcccaccatcagcacttcccacagtctgagccgtcctgactactggtccagtaacagtcttcgagtgggcctttcaacaccgcccccacctgcctatgagtccatcatcaaggcattcccagattcctgagtagggtggcttttggtttttgtttctttcttgtcttgtcttttattgaaaggaaatcaaaaataggctaaacagaattttgagggcatggcccaaataactcatgagttccaagttgaaacatggttgtgcaagttggacattacaatgtaaaacacattttcttcaaacacgttttcccttttgtttcaaaaaatgtaatattttcccccaagcgttttatatttatgtattttgtattcaatgtgaggcttattaaaaatagtgattctaatgtaagaatcagctaagatgcattatatatattttaattaaaattaaaacttcagatatttgtggattacaatcctcatttacttccaatgtgactaaaaagagaaaaaaaatcactgtgtcactttaaagaaaaatcttctaagggatttggattttactttctttagaatgacaagtgaatcatattgacattttacaatcttagatttttctttttttttcttttgagacagggtcttgatccgtcgcccaggcgggagttgcagtagcatgatcaggactcactgcagcctctatctcccaggctcaagtaatcctcccatcttagtgccccaagtagctgggactacaggggtgcactaccacaccgggttgaatttttttttaattttagtagagatgaagtgtcactatgttaccaaggctggtctcaaactcctaaactcagatgatcctcctgcctcggcctcccaaagtgctggaattagcctggccaatcttggatttttaatggaatatgtgggcacaaaatgacagaacataggacattctaaagttccttgatttgatcattataagaagtgtgggactcaagcacaggaaactgaactcttttggtgtcattggatgtttcatttttgacactaattttttctggacaaactctttatgtgtttttcccaagaatagttatctacttcctggaggcaaaatccttggatttactaacatgatgatttaccttttcttcaccgttgtcgttacattgttagaaaagcaacaggaaaaaatccaattcatttgacctaaaaacaagcctcaagtttaaaaccaagctcacgtttttcttaagggaaaaattttctttcttaaacttacatctagcaacttggaaagcactttctctggggatcttcttttgtaactttgcagacaaataagtatgagtcactggggagagagtttgttattgaaatagatgttgcccatgaagaattctccttcctggattgactcttaatcatcaggcatcattcctggtttgcttctctacgaatctcaattccaacttctctgcagagtctgtacagtgattaagccatgccagatggtctttggtgcacacagttatttaagaatccacttccacaggtggctgcccttgtaaggaagaatgcatccctaaatgtggccaccagagagttccagtgggcagatgtctgtggctgcccttctcatttaaggacatgagttcactggagtattactcaaaaagtctgtggttcatttccagtattgtgaatatttagtttatgtggccgtttctttgtttctttgaacagtgggattttcagtgaaaaagtaccctctttttcatttcctattgcagtggtcacagctaatagtgtctgaacatggttcaagaataagagattccatgtagcattttctttattattttcatttcccttatattatccatcattccttaaggacaattattcttaataatgcttatagaaaatgttctctaattaaacatgccaaaaggaaaaagtaagagaaagagggagcaagaagaaaatggaagaaaaagggaaaaaagctaaccggataaccaatttgttataagttggttttcaacaaagaaatttagcagccaagtaaggtttcaagggaatattaacttggtatcagggctacttttttttttttttttttacttgcatgtcatccttaatgtctaacatgaaaaatcagcaaagagtatggtttttatcaagaatttgtgttgggagtaaaaactgctttatagctcccaaattaggaagagaagagcagaaatcctctggggcatttaaccatctggcagaattgttgctgcacccttatcccagttataagacagtcaaaatgactatttcctaaatattgtgagtgtatgaaatgtgaaattaaagcaaaaactggagacttttaatgtatttctttaatttgaaatgttttgtggattgtgaaataaaaataaatttatgtcaagttttattc

SEQ ID NO: 4999 - protein, 166 aa, Homo sapiens [sequence omitted]

SEQ ID NO: 5000 - DNA, 3305 bp, Homo sapiens
cccacgtatgtgtgattcaggagtcaaccaaagatatgtgaaatgtttataaataaaatttggggattctcctctctggctttctcttctccaggatttccctctcacattctcagcagctcttgtttccacaatctctgtcctttgtttctcaagatcagaaacagtgcaggttttcgactgtagctttacctgtcccagactggaagcttccctcaggttaaaaggtttgaaaactggagcttgactagtacttgctgttcttttcttccaggtctcaactcctctccagtagctacaagcatttggtcattcttaaggcctttagaggaccttatcatgtccttcactgtatccatggcaatcgggctggtacttggaggatttatttgggctgtgttcatttgtctgtctcgaagaagaagagccagtgctcccatctcacagtggagttcaagcaggagatctaggtcttcttacacccacggcctcaacagaactggattttaccgccacagtggctgtgaacgtcgaagcaacctcagcctggccagtctcaccttccagcgacaagcttccctggaacaagcaaattcctttccaagaaaatcaagtttcagagcttctactttccatccctttctgcaatgtccaccacttcctgtggaaactgagagtcagctggtgactctcccttcttccaatatctctcccaccatcagcacttcccacagtctgagccgtcctgactactggtccagtaacagtcttcgagtgggcctttcaacaccgcccccacctgcctatgagtccatcatcaaggcattcccagattcctgagtagggtggcttttggtttttgtttctttcttgtcttgtcttttattgaaaggaaatcaaaaataggctaaacagaattttgagggcatggcccaaataactcatgagttccaagttgaaacatggttgtgcaagttggacattacaatgtaaaacacattttcttcaaacacgttttcccttttgtttcaaaaaatgtaatattttcccccaagcgttttatatttatgtattttgtattcaatgtgaggcttattaaaaatagtgattctaatgtaagaatcagctaagatgcattatatatattttaattaaaattaaaacttcagatatttgtggattacaatcctcatttacttccaatgtgactaaaaagagaaaaaaaatcactgtgtcactttaaagaaaaatcttctaagggatttggattttactttctttagaatgacaagtgaatcatattgacattttacaatcttagatttttctttttttttcttttgagacagggtcttgatccgtcgcccaggcgggagttgcagtagcatgatcaggactcactgcagcctctatctcccaggctcaagtaatcctcccatcttagtgccccaagtagctgggactacaggggtgcactaccacaccgggttgaatttttttttaattttagtagagatgaagtgtcactatgttaccaaggctggtctcaaactcctaaactcagatgatcctcctgcctcggcctcccaaagtgctggaattagcctggccaatcttggatttttaatggaatatgtgggcacaaaatgacagaacataggacattctaaagttccttgatttgatcattataagaagtgtgggactcaagcacaggaaactgaactcttttggtgtcattggatgtttcatttttgacactaattttttctggacaaactctttatgtgtttttcccaagaatagttatctacttcctggaggcaaaatccttggatttactaacatgatgatttaccttttcttcaccgttgtcgttacattgttagaaaagcaacaggaaaaaatccaattcatttgacctaaaaacaagcctcaagtttaaaaccaagctcacgtttttcttaagggaaaaattttctttcttaaacttacatctagcaacttggaaagcactttctctggggatcttcttttgtaactttgcagacaaataagtatgagtcactggggagagagtttgttattgaaatagatgttgcccatgaagaattctccttcctggattgactcttaatcatcaggcatcattcctggtttgcttctctacgaatctcaattccaacttctctgcagagtctgtacagtgattaagccatgccagatggtctttggtgcacacagttatttaagaatccacttccacaggtggctgcccttgtaaggaagaatgcatccctaaatgtggccaccagagagttccagtgggcagatgtctgtggctgcccttctcatttaaggacatgagttcactggagtattactcaaaaagtctgtggttcatttccagtattgtgaatatttagtttatgtggccgtttctttgtttctttgaacagtgggattttcagtgaaaaagtaccctctttttcatttcctattgcagtggtcacagctaatagtgtctgaacatggttcaagaataagagattccatgtagcattttctttattattttcatttcccttatattatccatcattccttaaggacaattattcttaataatgcttatagaaaatgttctctaattaaacatgccaaaaggaaaaagtaagagaaagagggagcaagaagaaaatggaagaaaaagggaaaaaagctaaccggataaccaatttgttataagttggttttcaacaaagaaatttagcagccaagtaaggtttcaagggaatattaacttggtatcagggctacttttttttttttttttttacttgcatgtcatccttaatgtctaacatgaaaaatcagcaaagagtatggtttttatcaagaatttgtgttgggagtaaaaactgctttatagctcccaaattaggaagagaagagcagaaatcctctggggcatttaaccatctggcagaattgttgctgcacccttatcccagttataagacagtcaaaatgactatttcctaaatattgtgagtgtatgaaatgtgaaattaaagcaaaaactggagacttttaatgtatttctttaatttgaaatgttttgtggattgtgaaataaaaataaatttatgtcaagttttattcaaaattcatttatgaaataatgccaacactgttctaaaaagcaaggagtcaagaaattataaaattcagattaaatcaggaaaacacattagatggaaaattatactatagaatttgagcttattaaaatttattgcata

SEQ ID NO: 5001 - protein, 166 aa, Homo sapiens [sequence omitted]

SEQ ID NO: 5002 - DNA, 1686 bp, Homo sapiens
attcatcccatggccgtcatactgtgacgtctttcagagcactttgtgattgctcagtcctaagtataagccctataaaatgatgggctttgaaatgctggtcagggtagagtgagaagcaccagcaggcagtaacagccaacccttagccattgctaagggcagagaactggtggagcctttctcttactcccaggacttcagcacctaagacagctccaaaacaaaccagaacagtcagctccgggggagcacgactgggcgagaggcacagaaatggacaccagaaataaggcccagctccttgtgctcctgactcttctcagtgtgctcttctcacagacttcggcatggcctctttacagggcaccttctgctctcaggttgggtgacagaataccctttgagggagcaaatgaacctgatcaagtttcattaaaagaagacattgacatgttgcaaaatgcattagctgaaaatgacacaccctattatgatgtatccagaaatgccaggcatgctgatggagttttcaccagtgacttcagtaaactcttgggtcaactttctgccaaaaagtaccttgagtctcttatgggaaaacgtgttagcagtaacatctcagaagaccctgtaccagtcaaacgtcactcagatgcagtcttcactgacaactatacccgccttagaaaacaaatggctgtaaagaaatatttgaactcaattctgaatggaaagaggagcagtgagggagaatctcccgactttccagaagagttagaaaaatgatgaaaaagacctttggagcaaagctgatgacaacttcccagtgaattcttgaaggaaaatgatacgcaacataattaaattttgagttctacataagtaattcaagaaaacaacttcaatatccaaaccaaataaaaatattgtgttgtgaatgttgtgatgtattctagctaatgtaataactgtgaagtttacattgtaaatagtatttgagagttctaaattttgtctttaactcataaaaagcctgcaatttcatatgctgtatatcctttctaacaaaaaaatatatttaatgataagtaaatgctaggttaattccaattatatgagacgtttttggaagagtagtaatagagcaaaattgatgtgtttatttatagagtgtacttaactattcaggagagtagaacagataatcagtgtgtctaaatttgaatgttaagcagatggaatgctgtgttaaataaacctcaaaatgtctaagatagtaacaatgaagataaaaagacattcttccaaaaagattttcagaaaatattatgtgtttccatattttataggcaacctttatttttaatggtgttttaaaaaatctcaaatttggattgctaatcaccaaaggctctctcctgatagtctttcagttaaggagaacgacccctgcttctgacactgaaacttccctttctgcttgtgttaagtatgtgtaaaatgtgaagtgaatgaaacactcagttgttcaataataaatatttttgccataatgactcagaatattgctttggtcatatgagcttccttctgtgaaagtacatttggagacacaactatttttccaaaataattttaagaaatcaaagagagaaaataaagaccttgcttatgattgcagat

SEQ ID NO: 5003 - protein, 170 aa, Homo sapiens; identical to SEQ ID NO: 649

SEQ ID NO: 5004 - DNA, 3516 bp, Homo sapiens
agagagggaaagtaacccgagtccgccgcttcgggcggacccgccccctcccacgagtttccctagaccctcggccccgccctctcttttattcggtttgcagcaaccggagctgaaactttgcaacccgagcgcgcacgctctgcgctcggccctgccagggcggcacgggagggcggcgcaggaggtgggacctgcgccgggaaggctccgggacgccagcgcacgcggagcggggaccccggagagccagcaggcgagaagaccggccgagggagagccgatcgcgcctcgagagatccgaggaagtggtcgcgggccgggaggctcccgtgccgagccgaggccaggggtctggggtcgcagcccggcgtgcctgcagctgccgtcgctcgggagcagcagctgtgcccgggatcccggcggcggcgggggaaggaggagctgcagctggactgtggcagctggagggagagggccgggctcccctggcggagccgcgctgggacgactggctgaccgcggccatgcagtcttgacggagtcgctcgggcgcaggggagcagccgcgggcgcgccctcccgggaaggggcaccggagcgcaggcagcagcactttatctgcgactctccagcccagcgagaggcgaagcggtttaccatggaacccgtgaccaagtggagccccaaacaagtggtggactggactagagggttggatgactgcctgcaacaatatgtccacaagtttgaacgagagaagatcaacggcgagcagctgctgcagatttcccatcaggacctggaggagctgggggtcacacggattggacaccaggagcttgtgttggaggctgtggaccttctctgtgcactgaattatggcctcgaaactgataacatgaagaacttggttctgaaactgagagcatcttcccacaatttacagaattacataagtagccgacggaaaagtcccgcttacgatggcaacacctcccgcaaggcccccaatgagttcctgacctcggtggtggagctcatcggcgccgccaaggccctgctggcgtggctggaccgggctccgtttacagggatcactgatttctcagtcacgaagaacaaaattatccagctttgcttggacctgaccactacagtccagaaggattgctttgtagcggaaatggaggataaagttttaactgtggtcaaggttttaaatggcatctgtgacaaaacaatccgatctaccacagatcctgtgatgagccagtgtgcatgtctggaggaagttcacttaccaaacattaaacctggggaaggcctgggcatgtacatcaaatcaacctatgatgggttacacgtgattactggaaccacagaaaattctcctgcagacagatctcagaagattcatgctggtgacgaagtcattcaagttaatcagcaaactgtggtgggatggcagctgaaaaatctggtgaagaaattgagagagaatcccaccggagttgtgttactgcttaagaagcgccccaccgggtctttcaactttactcctgctcccctgaaaaacctacggtggaagccacctcttgtacagacctcacctccacccgcgacaacccagtcccctgaaagcactatggatacctcactgaagaaggagaagtcagccatcctggatctttatattcctcctccgcctgctgttccctactctccccgggatgagaatggcagttttgtttatggagggtccagtaagtgcaaacaaccattgcctggtcctaagggttcagagtccccgaattccttcttggaccaggaaagccggagacgaagattcaccattgcagactcggatcagttgcctgggtactcggtggaaaccaacattctgcccacaaaaatgagagagaaaacaccatcttatggcaagccacggcctttgtccatgcctgctgatgggaactggatggggattgtggacccttttgccagacctcgaggtcatggcaggaaaggggaggatgccctttgccggtatttcagtaacgagcggattcctccgatcattgaagagagctcctctcccccataccggttctccagacccacgaccgagcggcatctggtccggggtgcggactacatccgaggaagcaggtgctacatcaactcagatctccacagcagcgccacgattccattccaggaggaagggaccaaaaagaaatctggctcctcagctacgaagtcctcgtccacagaaccgtccctcctggtcagctggtttacgcgcctcaaactgttgactcactgagagggaccctgctcaggccacctgcctggctcctgccccaagtgccttgcttttacagtggacagcctcttctcgtttcagcctcagtattatgtagggaccttatgcaatttctttttcttttgaaaagttatctactgcccttcttggaagtttgcaggattggatgggaacaaattcagaggatcttaggtgctggcttgtggagacaaaaggagggaaatgggtagagcctgtttgtcttgcttccccagagatagaatgtgaagacacgcgctagaaatcgcagtcctggccagagacgttatggtcattgtgagggactggtggcattgttcctttttgaggggctggggggactcaaattggtggctgttttcacacagatgtgttggtttgtggtccaacttctttatctgaaaaagccagtgagaaaacatttttgatttgatttttctaaactatctaccatattttaagtgtagcagctttgactttgcaataacgtggcaagtatctgatttctcctttgaggcagaggtttaagtgtaggcctgttacacttgtttgatacctttttcatgacagtctcagtatagatcagttggtacagaaatacatgaacacattttgatagggcttatttcacacaaagaagtttatggttatttgtgtggggtggtgttgttatatattattgtctttaagggaaaagaagctataagattcgctgacagccaaagtatcatttagaaaagtgaagcaacaagatttaggttgatgaaagatacatgagtttgcattttgacctgttcagtgtctgtcttccagcacggtgtgtacacttcttcaaaattgtacacagtttgctaattagaaatatcttggaaagcctcatggtcactaattttcaactagcatcaggtattttgaaaacgtgtgtctggatattaactcttgtttaaactgaatgtatgatattttgttagaatggaaaagtactatcttgttaatttaagtattttaaatatagttgtatatttttcttactcttagtcacctgtaattgaaatatttctgttttgcgtcatacacgaagctagtgaaaaagaaagtgcaaggcattttcagatgagcaagtgactatcgtggctgttgccagcagggcagtattgttaaaaaaaatc

SEQ ID NO: 5005 - protein, 555 aa, Homo sapiens; identical to SEQ ID NO: 653

SEQ ID NO: 5006 - DNA, 2641 bp, Homo sapiens
gtcagtgtgttaatgaatgttttgttgaacccttttcatctatcaaggactgaaatatctgatttaatctcagtggtgcttaaaataaacttttgtggctgagtttactcaagcccttatttgaaagctattcttataggcaggcccagagctaaagactgccagcttgttggcccactgctgtctgttcctgggggcacattgggagccgtcgtcaggtttcttgacttggacttctgacttactactctctggacagtctggagagtaggtggatttcagttcagttatttttgattgctttgtagcggaaatggaggataaagttttaactgtggtcaaggttttaaatggcatctgtgacaaaacaatccgatctaccacagatcctgtgatgagccagtgtgcatgtctggaggaagttcacttaccaaacattaaacctggggaaggcctgggcatgtacatcaaatcaacctatgatgggttacacgtgattactggaaccacagaaaattctcctgcagacagatctcagaagattcatgctggtgacgaagtcattcaagttaatcagcaaactgtggtgggatggcagctgaaaaatctggtgaagaaattgagagagaatcccaccggagttgtgttactgcttaagaagcgccccaccgggtctttcaactttactcctgctcccctgaaaaacctacggtggaagccacctcttgtacagacctcacctccacccgcgacaacccagtcccctgaaagcactatggatacctcactgaagaaggagaagtcagccatcctggatctttatattcctcctccgcctgctgttccctactctccccgggatgagaatggcagttttgtttatggagggtccagtaagtgcaaacaaccattgcctggtcctaagggttcagagtccccgaattccttcttggaccaggaaagccggagacgaagattcaccattgcagactcggatcagttgcctgggtactcggtggaaaccaacattctgcccacaaaaatgagagagaaaacaccatcttatggcaagccacggcctttgtccatgcctgctgatgggaactggatggggattgtggacccttttgccagacctcgaggtcatggcaggaaaggggaggatgccctttgccggtatttcagtaacgagcggattcctccgatcattgaagagagctcctctcccccataccggttctccagacccacgaccgagcggcatctggtccggggtgcggactacatccgaggaagcaggtgctacatcaactcagatctccacagcagcgccacgattccattccaggaggaagggaccaaaaagaaatctggctcctcagctacgaagtcctcgtccacagaaccgtccctcctggtcagctggtttacgcgcctcaaactgttgactcactgagagggaccctgctcaggccacctgcctggctcctgccccaagtgccttgcttttacagtggacagcctcttctcgtttcagcctcagtattatgtagggaccttatgcaatttctttttcttttgaaaagttatctactgcccttcttggaagtttgcaggattggatgggaacaaattcagaggatcttaggtgctggcttgtggagacaaaaggagggaaatgggtagagcctgtttgtcttgcttccccagagatagaatgtgaagacacgcgctagaaatcgcagtcctggccagagacgttatggtcattgtgagggactggtggcattgttcctttttgaggggctggggggactcaaattggtggctgttttcacacagatgtgttggtttgtggtccaacttctttatctgaaaaagccagtgagaaaacatttttgatttgatttttctaaactatctaccatattttaagtgtagcagctttgactttgcaataacgtggcaagtatctgatttctcctttgaggcagaggtttaagtgtaggcctgttacacttgtttgatacctttttcatgacagtctcagtatagatcagttggtacagaaatacatgaacacattttgatagggcttatttcacacaaagaagtttatggttatttgtgtggggtggtgttgttatatattattgtctttaagggaaaagaagctataagattcgctgacagccaaagtatcatttagaaaagtgaagcaacaagatttaggttgatgaaagatacatgagtttgcattttgacctgttcagtgtctgtcttccagcacggtgtgtacacttcttcaaaattgtacacagtttgctaattagaaatatcttggaaagcctcatggtcactaattttcaactagcatcaggtattttgaaaacgtgtgtctggatattaactcttgtttaaactgaatgtatgatattttgttagaatggaaaagtactatcttgttaatttaagtattttaaatatagttgtatatttttcttactcttagtcacctgtaattgaaatatttctgttttgcgtcatacacgaagctagtgaaaaagaaagtgcaaggcattttcagatgagcaagtgactatcgtggctgttgccagcagggcagtattgttaaaaaaaa

SEQ ID NO: 5007 - protein, 380 aa, Homo sapiens
MEDKVLTVVKVLNGICDKTIRSTTDPVMSQCACLEEVHLPNIKPGEGLGMYIKSTYDGLHVITGTTENSPADRSQKIHAGDEVIQVNQQTVVGWQLKNLVKKLRENPTGVVLLLKKRPTGSFNFTPAPLKNLRWKPPLVQTSPPPATTQSPESTMDTSLKKEKSAILDLYIPPPPAVPYSPRDENGSFVYGGSSKCKQPLPGPKGSESPNSFLDQESRRRRFTIADSDQLPGYSVETNILPTKMREKTPSYGKPRPLSMPADGNWMGIVDPFARPRGHGRKGEDALCRYFSNERIPPIIEESSSPPYRFSRPTTERHLVRGADYIRGSRCYINSDLHSSATIPFQEEGTKKKSGSSATKSSSTEPSLLVSWFTRLKLLTH

SEQ ID NO: 5008 - DNA, 2510 bp, Homo sapiens
gtcagtgtgttaatgaatgttttgttgaacccttttcatctatcaaggactgaaatatctgatttaatctcagtggtgcttaaaataaacttttgtggctgagtttactcaagcccttatttgaaagctattcttataggcaggcccagagctaaagactgccagcttgttggcccactgctgtctgttcctgggggcacattgggagccgtcgtcaggtttcttgacttggacttctgacttactactctctggacagtctggagagtaggtggatttcagttcagttatttttgattgctttgtagcggaaatggaggataaagttttaactgtggtcaaggttttaaatggcatctgtgacaaaacaatccgatctaccacagatcctgtgatgagccagtgtgcatgtctggaggaagttcacttaccaaacattaaacctggggaaggcctgggcatgtacatcaaatcaacctatgatgggttacacgtgattactggaaccacagaaaattctcctgcagacagatctcagaagattcatgctggtgacgaagtcattcaagttaatcagcaaactgtggtgggatggcagctgaaaaatctggtgaagaaattgagagagaatcccaccggagttgtgttactgcttaagaagcgccccaccgggtctttcaactttactcctgctcccctgaaaaacctacggtggaagccacctcttgtacagacctcacctccacccgcgacaacccagtcccctgaaagcactatggatacctcactgaagaaggagaagtcagccatcctggatctttatattcctcctccgcctgctgttccctactctccccgggatgagaatggcagttttgtttatggagggtccagtaagtgcaaacaaccattgcctggtcctaagggttcagagtccccgaattccttcttggaccaggaaagccggagacgaagattcaccattgcagactcggatcagttgcctgggtactcggtggaaaccaacattctgcccacaaaaatgagagagaaaacaccatcttatggcaagccacggcctttgtccatgcctgctgatgggaactggatggggattgtggacccttttgccagacctcgaggtcatggcaggaaaggggaggatgccctttgccggtatttcagtaacgagcggattcctccgatcattgaagagagctcctctcccccataccggttctccagacccacgaccgagcggcatctggtccggggtgcggactacatccgaggaagcaggtgctacatcaactcagatctccacagcagcgccacgattccattccaggaggaagggaccaaaaagaaatctggctcctcagctacgaagtcctcgtccacagaaccgtccctcctggtcagctggtttacgcgcctcaaactgttgactcactgagagggaccctgctcaggccacctgcctggctcctgccccaagtgccttgcttttacagtggacagcctcttctcgtttcagcctcagtattatgtagggaccttatgcaatttctttttcttttgaaaagttatctactgcccttcttggaagtttgcaggattggatgggaacaaattcagaggatcttaggtgctggcttgtggagacaaaaggagggaaatgggtagagcctgtttgtcttgcttccccagagatagaatgtgaagacacgcgctagaaatcgcagtcctggccagagacgttatggtcattgtgagggactggtggcattgttcctttttgaggggctggggggactcaaattggtggctgttttcacacagatgtgttggtttgtggtccaacttctttatctgaaaaagccagtgagaaaacatttttgatttgatttttctaaactatctaccatattttaagtgtagcagctttgactttgcaataacgtggcaagtatctgatttctcctttgaggcagaggtttaagtgtaggcctgttacacttgtttgatacctttttcatgacagtctcagtatagatcagttggtacagaaatacatgaacacattttgatagggcttatttcacacaaagaagtttatggttatttgtgtggggtggtgttgttatatattattgtctttaagggaaaagaagctataagattcgctgacagccaaagtatcatttagaaaagtgaagcaacaagatttaggttgatgaaagatacatgagtttgcattttgacctgttcagtgtctgtcttccagcacggtgtgtacacttcttcaaaattgtacacagtttgctaattagaaatatcttggaaagcctcatggtcactaattttcaactagcatcaggtattttgaaaacgtgtgtctggatattaactcttgtttaaactgaatgtatgatattttgttagaatggaaaagtactatcttgttaatttaagtattttaaatatagttgtatatttttcttactctt

SEQ ID NO: 5009 - protein, 380 aa, Homo sapiens; identical to SEQ ID NO: 5007

SEQ ID NO: 5010 - DNA, 3383 bp, Homo sapiens
agagagggaaagtaacccgagtccgccgcttcgggcggacccgccccctcccacgagtttccctagaccctcggccccgccctctcttttattcggtttgcagcaaccggagctgaaactttgcaacccgagcgcgcacgctctgcgctcggccctgccagggcggcacgggagggcggcgcaggaggtgggacctgcgccgggaaggctccgggacgccagcgcacgcggagcggggaccccggagagccagcaggcgagaagaccggccgagggagagccgatcgcgcctcgagagatccgaggaagtggtcgcgggccgggaggctcccgtgccgagccgaggccaggggtctggggtcgcagcccggcgtgcctgcagctgccgtcgctcgggagcagcagctgtgcccgggatcccggcggcggcgggggaaggaggagctgcagctggactgtggcagctggagggagagggccgggctcccctggcggagccgcgctgggacgactggctgaccgcggccatgcagtcttgacggagtcgctcgggcgcaggggagcagccgcgggcgcgccctcccgggaaggggcaccggagcgcaggcagcagcactttatctgcgactctccagcccagcgagaggcgaagcggtttaccatggaacccgtgaccaagtggagccccaaacaagtggtggactggactagagggttggatgactgcctgcaacaatatgtccacaagtttgaacgagagaagatcaacggcgagcagctgctgcagatttcccatcaggacctggaggagctgggggtcacacggattggacaccaggagcttgtgttggaggctgtggaccttctctgtgcactgaattatggcctcgaaactgataacatgaagaacttggttctgaaactgagagcatcttcccacaatttacagaattacataagtagccgacggaaaagtcccgcttacgatggcaacacctcccgcaaggcccccaatgagttcctgacctcggtggtggagctcatcggcgccgccaaggccctgctggcgtggctggaccgggctccgtttacagggatcactgatttctcagtcacgaagaacaaaattatccagctttgcttggacctgaccactacagtccagaaggattgctttgtagcggaaatggaggataaagttttaactgtggtcaaggttttaaatggcatctgtgacaaaacaatccgatctaccacagatcctgtgatgagccagtgtgcatgtctggaggaagttcacttaccaaacattaaacctggggaaggcctgggcatgtacatcaaatcaacctatgatgggttacacgtgattactggaaccacagaaaattctcctgcagacagatctcagaagattcatgctggtgacgaagtcattcaagttaatcagcaaactgtggtgggatggcagctgaaaaatctggtgaagaaattgagagagaatcccaccggagttgtgttactgcttaagaagcgccccaccgggtctttcaactttactcctgctcccctgaaaaacctacggtggaagccacctcttgtacagacctcacctccacccgcgacaacccagtcccctgaaagcactatggatacctcactgaagaaggagaagtcagccatcctggatctttatattcctcctccgcctgctgttccctactctccccgggatgagaatggcagttttgtttatggagggtccagtaagtgcaaacaaccattgcctggtcctaagggttcagagtccccgaattccttcttggaccaggaaagccggagacgaagattcaccattgcagactcggatcagttgcctgggtactcggtggaaaccaacattctgcccacaaaaatgagagagaaaacaccatcttatggcaagccacggcctttgtccatgcctgctgatgggaactggatggggattgtggacccttttgccagacctcgaggtcatggcaggaaaggggaggatgccctttgccggtatttcagtaacgagcggattcctccgatcattgaagagagctcctctcccccataccggttctccagacccacgaccgagcggcatctggtccggggtgcggactacatccgaggaagcaggtgctacatcaactcagatctccacagcagcgccacgattccattccaggaggaagggaccaaaaagaaatctggctcctcagctacgaagtcctcgtccacagaaccgtccctcctggtcagctggtttacgcgcctcaaactgttgactcactgagagggaccctgctcaggccacctgcctggctcctgccccaagtgccttgcttttacagtggacagcctcttctcgtttcagcctcagtattatgtagggaccttatgcaatttctttttcttttgaaaagttatctactgcccttcttggaagtttgcaggattggatgggaacaaattcagaggatcttaggtgctggcttgtggagacaaaaggagggaaatgggtagagcctgtttgtcttgcttccccagagatagaatgtgaagacacgcgctagaaatcgcagtcctggccagagacgttatggtcattgtgagggactggtggcattgttcctttttgaggggctggggggactcaaattggtggctgttttcacacagatgtgttggtttgtggtccaacttctttatctgaaaaagccagtgagaaaacatttttgatttgatttttctaaactatctaccatattttaagtgtagcagctttgactttgcaataacgtggcaagtatctgatttctcctttgaggcagaggtttaagtgtaggcctgttacacttgtttgatacctttttcatgacagtctcagtatagatcagttggtacagaaatacatgaacacattttgatagggcttatttcacacaaagaagtttatggttatttgtgtggggtggtgttgttatatattattgtctttaagggaaaagaagctataagattcgctgacagccaaagtatcatttagaaaagtgaagcaacaagatttaggttgatgaaagatacatgagtttgcattttgacctgttcagtgtctgtcttccagcacggtgtgtacacttcttcaaaattgtacacagtttgctaattagaaatatcttggaaagcctcatggtcactaattttcaactagcatcaggtattttgaaaacgtgtgtctggatattaactcttgtttaaactgaatgtatgatattttgttagaatggaaaagtactatcttgttaatttaagtattttaaatatagttgtatatttttcttactctt

SEQ ID NO: 5011 - protein, 555 aa, Homo sapiens; identical to SEQ ID NO: 653

SEQ ID NO: 5012 - DNA, 2344 bp, Homo sapiens
gtcagtgtgttaatgaatgttttgttgaacccttttcatctatcaaggactgaaatatctgatttaatctcagtggtgcttaaaataaacttttgtggctgagtttactcaagcccttatttgaaagctattcttataggcaggcccagagctaaagactgccagcttgttggcccactgctgtctgttcctgggggcacattgggagccgtcgtcaggtttcttgacttggacttctgacttactactctctggacagtctggagagtaggtggatttcagttcagttatttttgattgctttgtagcggaaatggaggataaagttttaactgtggtcaaggttttaaatggcatctgtgacaaaacaatccgatctaccacagatcctgtgatgagccagtgtgcatgtctggaggaagttcacttaccaaacattaaacctggggaaggcctgggcatgtacatcaaatcaacctatgatgggttacacgtgattactggaaccacagaaaattctcctgcagacagatctcagaagattcatgctggtgacgaagtcattcaagttaatcagcaaactgtggtgggatggcagctgaaaaatctggtgaagaaattgagagagaatcccaccggagttgtgttactgcttaagaagcgccccaccgggtctttcaactttactcctgctcccctgaaaaacctacggtggaagccacctcttgtacagacctcacctccacccgcgacaacccagtcccctgaaagcactatggatacctcactgaagaaggagaagtcagccatcctggatctttatattcctcctccgcctgctgttccctactctccccgggatgagaatggcagttttgtttatggagggtccagtaagtgcaaacaaccattgcctggtcctaagggttcagagtccccgaattccttcttggaccaggaaagccggagacgaagattcaccattgcagactcggatcagttgcctgggtactcggtggaaaccaacattctgcccacaaaaatgagagagaaaacaccatcttatggcaagccacggcctttgtccatgcctgctgatgggaactggatggggattgtggacccttttgccagacctcgaggtcatggcaggaaaggggaggatgccctttgccggtatttcagtaacgagcggattcctccgatcattgaagagagctcctctcccccataccggttctccagacccacgaccgagcggcatctggtccggggtgcggactacatccgaggaagcaggtgctacatcaactcagatctccacagcagcgccacgattccattccaggaggaagggaccaaaaagaaatctggctcctcagctacgaagtcctcgtccacagaaccgtccctcctggtcagctggtttacgcgcctcaaactgttgactcactgagagggaccctgctcaggccacctgcctggctcctgccccaagtgccttgcttttacagtggacagcctcttctcgtttcagcctcagtattatgtagggaccttatgcaatttctttttcttttgaaaagttatctactgcccttcttggaagtttgcaggattggatgggaacaaattcagaggatcttaggtgctggcttgtggagacaaaaggagggaaatgggtagagcctgtttgtcttgcttccccagagatagaatgtgaagacacgcgctagaaatcgcagtcctggccagagacgttatggtcattgtgagggactggtggcattgttcctttttgaggggctggggggactcaaattggtggctgttttcacacagatgtgttggtttgtggtccaacttctttatctgaaaaagccagtgagaaaacatttttgatttgatttttctaaactatctaccatattttaagtgtagcagctttgactttgcaataacgtggcaagtatctgatttctcctttgaggcagaggtttaagtgtaggcctgttacacttgtttgatacctttttcatgacagtctcagtatagatcagttggtacagaaatacatgaacacattttgatagggcttatttcacacaaagaagtttatggttatttgtgtggggtggtgttgttatatattattgtctttaagggaaaagaagctataagattcgctgacagccaaagtatcatttagaaaagtgaagcaacaagatttaggttgatgaaagatacatgagtttgcattttgacctgttcagtgtctgtcttccagcacggtgtgtacacttcttcaaaattgtacacagtttgctaattagaaatatcttgg

SEQ ID NO: 5013 - protein, 380 aa, Homo sapiens; identical to SEQ ID NO: 5007

SEQ ID NO: 5014 - DNA, 3217 bp, Homo sapiens
agagagggaaagtaacccgagtccgccgcttcgggcggacccgccccctcccacgagtttccctagaccctcggccccgccctctcttttattcggtttgcagcaaccggagctgaaactttgcaacccgagcgcgcacgctctgcgctcggccctgccagggcggcacgggagggcggcgcaggaggtgggacctgcgccgggaaggctccgggacgccagcgcacgcggagcggggaccccggagagccagcaggcgagaagaccggccgagggagagccgatcgcgcctcgagagatccgaggaagtggtcgcgggccgggaggctcccgtgccgagccgaggccaggggtctggggtcgcagcccggcgtgcctgcagctgccgtcgctcgggagcagcagctgtgcccgggatcccggcggcggcgggggaaggaggagctgcagctggactgtggcagctggagggagagggccgggctcccctggcggagccgcgctgggacgactggctgaccgcggccatgcagtcttgacggagtcgctcgggcgcaggggagcagccgcgggcgcgccctcccgggaaggggcaccggagcgcaggcagcagcactttatctgcgactctccagcccagcgagaggcgaagcggtttaccatggaacccgtgaccaagtggagccccaaacaagtggtggactggactagagggttggatgactgcctgcaacaatatgtccacaagtttgaacgagagaagatcaacggcgagcagctgctgcagatttcccatcaggacctggaggagctgggggtcacacggattggacaccaggagcttgtgttggaggctgtggaccttctctgtgcactgaattatggcctcgaaactgataacatgaagaacttggttctgaaactgagagcatcttcccacaatttacagaattacataagtagccgacggaaaagtcccgcttacgatggcaacacctcccgcaaggcccccaatgagttcctgacctcggtggtggagctcatcggcgccgccaaggccctgctggcgtggctggaccgggctccgtttacagggatcactgatttctcagtcacgaagaacaaaattatccagctttgcttggacctgaccactacagtccagaaggattgctttgtagcggaaatggaggataaagttttaactgtggtcaaggttttaaatggcatctgtgacaaaacaatccgatctaccacagatcctgtgatgagccagtgtgcatgtctggaggaagttcacttaccaaacattaaacctggggaaggcctgggcatgtacatcaaatcaacctatgatgggttacacgtgattactggaaccacagaaaattctcctgcagacagatctcagaagattcatgctggtgacgaagtcattcaagttaatcagcaaactgtggtgggatggcagctgaaaaatctggtgaagaaattgagagagaatcccaccggagttgtgttactgcttaagaagcgccccaccgggtctttcaactttactcctgctcccctgaaaaacctacggtggaagccacctcttgtacagacctcacctccacccgcgacaacccagtcccctgaaagcactatggatacctcactgaagaaggagaagtcagccatcctggatctttatattcctcctccgcctgctgttccctactctccccgggatgagaatggcagttttgtttatggagggtccagtaagtgcaaacaaccattgcctggtcctaagggttcagagtccccgaattccttcttggaccaggaaagccggagacgaagattcaccattgcagactcggatcagttgcctgggtactcggtggaaaccaacattctgcccacaaaaatgagagagaaaacaccatcttatggcaagccacggcctttgtccatgcctgctgatgggaactggatggggattgtggacccttttgccagacctcgaggtcatggcaggaaaggggaggatgccctttgccggtatttcagtaacgagcggattcctccgatcattgaagagagctcctctcccccataccggttctccagacccacgaccgagcggcatctggtccggggtgcggactacatccgaggaagcaggtgctacatcaactcagatctccacagcagcgccacgattccattccaggaggaagggaccaaaaagaaatctggctcctcagctacgaagtcctcgtccacagaaccgtccctcctggtcagctggtttacgcgcctcaaactgttgactcactgagagggaccctgctcaggccacctgcctggctcctgccccaagtgccttgcttttacagtggacagcctcttctcgtttcagcctcagtattatgtagggaccttatgcaatttctttttcttttgaaaagttatctactgcccttcttggaagtttgcaggattggatgggaacaaattcagaggatcttaggtgctggcttgtggagacaaaaggagggaaatgggtagagcctgtttgtcttgcttccccagagatagaatgtgaagacacgcgctagaaatcgcagtcctggccagagacgttatggtcattgtgagggactggtggcattgttcctttttgaggggctggggggactcaaattggtggctgttttcacacagatgtgttggtttgtggtccaacttctttatctgaaaaagccagtgagaaaacatttttgatttgatttttctaaactatctaccatattttaagtgtagcagctttgactttgcaataacgtggcaagtatctgatttctcctttgaggcagaggtttaagtgtaggcctgttacacttgtttgatacctttttcatgacagtctcagtatagatcagttggtacagaaatacatgaacacattttgatagggcttatttcacacaaagaagtttatggttatttgtgtggggtggtgttgttatatattattgtctttaagggaaaagaagctataagattcgctgacagccaaagtatcatttagaaaagtgaagcaacaagatttaggttgatgaaagatacatgagtttgcattttgacctgttcagtgtctgtcttccagcacggtgtgtacacttcttcaaaattgtacacagtttgctaattagaaatatcttgg

SEQ ID NO: 5015 - protein, 555 aa, Homo sapiens; identical to SEQ ID NO: 653

SEQ ID NO: 5016 - DNA, 8863 bp, Homo sapiens
cgagcccagtcgagccgcgctcacctcgggctcccgctccgtctccacctccgcctttgccctggcggcgcgaccccgtcccgggcgcggcccccagcagtcgcgcgccgttagcctagcgctctctgctcctgctgcagctgctgctgctcgtcgctgccccggggtccacgcaggcccaggccgccccgttccccgagctgtgcagggtgactctgttttgagaagtgcaaccagatctctcctggaattcaacacaacagtgagctgtgaccagcaaggcacaaatcacagagtccagagcagcattgccttcctgtgtgggaaaaccctgggaactcctgaatttgtaactgcaacagaatgtgtgcactactttgagtggaggaccactgcagcctgcaagaaagacatatttaaagcaaataaggaggtgccatgctatgtgtttgatgaagagttgaggaagcatgatctcaatcctctgatcaagcttagtggtgcctacttggtggatgactccgatccggacacttctctattcatcaatgtttgtagagacatagacacactacgagacccaggttcacagctgcgggcctgtccccccggcactgccgcctgcctggtaagaggacaccaggcgtttgatgttggccagccccgggacggactgaagctggtgcgcaaggacaggcttgtcctgagttacgtgagggaagaggcaggaaagctagacttttgtgatggtcacagccctgcggtgactattacatttgtttgcccgtcggagcggagagagggcaccattcccaaactcacagctaaatccaactgccgctatgaaattgagtggattactgagtatgcctgccacagagattacctggaaagtaaaacttgttctctgagcggcgagcagcaggatgtctccatagacctcacaccacttgcccagagcggaggttcatcctatatttcagatggaaaagaatatttgttttatttgaatgtctgtggagaaactgaaatacagttctgtaataaaaaacaagctgcagtttgccaagtgaaaaagagcgatacctctcaagtcaaagcagcaggaagataccacaatcagaccctccgatattcggatggagacctcaccttgatatattttggaggtgatgaatgcagctcagggtttcagcggatgagcgtcataaactttgagtgcaataaaaccgcaggtaacgatgggaaaggaactcctgtattcacaggggaggttgactgcacctacttcttcacatgggacacggaatacgcctgtgttaaggagaaggaagacctcctctgcggtgccaccgacgggaagaagcgctatgacctgtccgcgctggtccgccatgcagaaccagagcagaattgggaagctgtggatggcagtcagacggaaacagagaagaagcattttttcattaatatttgtcacagagtgctgcaggaaggcaaggcacgagggtgtcccgaggacgcggcagtgtgtgcagtggataaaaatggaagtaaaaatctgggaaaatttatttcctctcccatgaaagagaaaggaaacattcaactctcttattcagatggtgatgattgtggtcatggcaagaaaattaaaactaatatcacacttgtatgcaagccaggtgatctggaaagtgcaccagtgttgagaacttctggggaaggcggttgcttttatgagtttgagtggcacacagctgcggcctgtgtgctgtctaagacagaaggggagaactgcacggtctttgactcccaggcagggttttcttttgacttatcacctctcacaaagaaaaatggtgcctataaagttgagacaaagaagtatgacttttatataaatgtgtgtggcccggtgtctgtgagcccctgtcagccagactcaggagcctgccaggtggcaaaaagtgatgagaagacttggaacttgggtctgagtaatgcgaagctttcatattatgatgggatgatccaactgaactacagaggcggcacaccctataacaatgaaagacacacaccgagagctacgctcatcacctttctctgtgatcgagacgcgggagtgggcttccctgaatatcaggaagaggataactccacctacaacttccggtggtacaccagctatgcctgcccggaggagcccctggaatgcgtagtgaccgacccctccacgctggagcagtacgacctctccagtctggcaaaatctgaaggtggccttggaggaaactggtatgccatggacaactcaggggaacatgtcacgtggaggaaatactacattaacgtgtgtcggcctctgaatccagtgccgggctgcaaccgatatgcatcggcttgccagatgaagtatgaaaaagatcagggctccttcactgaagtggtttccatcagtaacttgggaatggcaaagaccggcccggtggttgaggacagcggcagcctccttctggaatacgtgaatgggtcggcctgcaccaccagcgatggcagacagaccacatataccacgaggatccatctcgtctgctccaggggcaggctgaacagccaccccatcttttctctcaactgggagtgtgtggtcagtttcctgtggaacacagaggctgcctgtcccattcagacaacgacggatacagaccaggcttgctctataagggatcccaacagtggatttgtgtttaatcttaatccgctaaacagttcgcaaggatataacgtctctggcattgggaagatttttatgtttaatgtctgcggcacaatgcctgtctgtgggaccatcctgggaaaacctgcttctggctgtgaggcagaaacccaaactgaagagctcaagaattggaagccagcaaggccagtcggaattgagaaaagcctccagctgtccacagagggcttcatcactctgacctacaaagggcctctctctgccaaaggtaccgctgatgcttttatcgtccgctttgtttgcaatgatgatgtttactcagggcccctcaaattcctgcatcaagatatcgactctgggcaagggatccgaaacacttactttgagtttgaaaccgcgttggcctgtgttccttctccagtggactgccaagtcaccgacctggctggaaatgagtacgacctgactggcctaagcacagtcaggaaaccttggacggctgttgacacctctgtcgatgggagaaagaggactttctatttgagcgtttgcaatcctctcccttacattcctggatgccagggcagcgcagtggggtcttgcttagtgtcagaaggcaatagctggaatctgggtgtggtgcagatgagtccccaagccgcggcgaatggatctttgagcatcatgtatgtcaacggtgacaagtgtgggaaccagcgcttctccaccaggatcacgtttgagtgtgctcagatatcgggctcaccagcatttcagcttcaggatggttgtgagtacgtgtttatctggagaactgtggaagcctgtcccgttgtcagagtggaaggggacaactgtgaggtgaaagacccaaggcatggcaacttgtatgacctgaagcccctgggcctcaacgacaccatcgtgagcgctggcgaatacacttattacttccgggtctgtgggaagctttcctcagacgtctgccccacaagtgacaagtccaaggtggtctcctcatgtcaggaaaagcgggaaccgcagggatttcacaaagtggcaggtctcctgactcagaagctaacttatgaaaatggcttgttaaaaatgaacttcacggggggggacacttgccataaggtttatcagcgctccacagccatcttcttctactgtgaccgcggcacccagcggccagtatttctaaaggagacttcagattgttcctacttgtttgagtggcgaacgcagtatgcctgcccacctttcgatctgactgaatgttcattcaaagatggggctggcaactccttcgacctctcgtccctgtcaaggtacagtgacaactgggaagccatcactgggacgggggacccggagcactacctcatcaatgtctgcaagtctctggccccgcaggctggcactgagccgtgccctccagaagcagccgcgtgtctgctgggtggctccaagcccgtgaacctcggcagggtaagggacggacctcagtggagagatggcataattgtcctgaaatacgttgatggcgacttatgtccagatgggattcggaaaaagtcaaccaccatccgattcacctgcagcgagagccaagtgaactccaggcccatgttcatcagcgccgtggaggactgtgagtacacctttgcctggcccacagccacagcctgtcccatgaagagcaacgagcatgatgactgccaggtcaccaacccaagcacaggacacctgtttgatctgagctccttaagtggcagggcgggattcacagctgcttacagcgagaaggggttggtttacatgagcatctgtggggagaatgaaaactgccctcctggcgtgggggcctgctttggacagaccaggattagcgtgggcaaggccaacaagaggctgagatacgtggaccaggtcctgcagctggtgtacaaggatgggtccccttgtccctccaaatccggcctgagctataagagtgtgatcagtttcgtgtgcaggcctgaggccaggccaaccaataggcccatgctcatctccctggacaagcagacatgcactctcttcttctcctggcacacgccgctggcctgcgagcaagcgaccgaatgttccgtgaggaatggaagctctattgttgacttgtctccccttattcatcgcactggtggttatgaggcttatgatgagagtgaggatgatgcctccgataccaaccctgatttctacatcaatatttgtcagccactaaatcccatgcacggagtgccctgtcctgccggagccgctgtgtgcaaagttcctattgatggtccccccatagatatcggccgggtagcaggaccaccaatactcaatccaatagcaaatgagatttacttgaattttgaaagcagtactccttgcttagcggacaagcatttcaactacacctcgctcatcgcgtttcactgtaagagaggtgtgagcatgggaacgcctaagctgttaaggaccagcgagtgcgactttgtgttcgaatgggagactcctgtcgtctgtcctgatgaagtgaggatggatggctgtaccctgacagatgagcagctcctctacagcttcaacttgtccagcctttccacgagcacctttaaggtgactcgcgactcgcgcacctacagcgttggggtgtgcacctttgcagtcgggccagaacaaggaggctgtaaggacggaggagtctgtctgctctcaggcaccaagggggcatcctttggacggctgcaatcaatgaaactggattacaggcaccaggatgaagcggtcgttttaagttacgtgaatggtgatcgttgccctccagaaaccgatgacggcgtcccctgtgtcttccccttcatattcaatgggaagagctacgaggagtgcatcatagagagcagggcgaagctgtggtgtagcacaactgcggactacgacagagaccacgagtggggcttctgcagacactcaaacagctaccggacatccagcatcatatttaagtgtgatgaagatgaggacattgggaggccacaagtcttcagtgaagtgcgtgggtgtgatgtgacatttgagtggaaaacaaaagttgtctgccctccaaagaagttggagtgcaaattcgtccagaaacacaaaacctacgacctgcggctgctctcctctctcaccgggtcctggtccctcgtccacaacggagtctcgtactatataaatctgtgccagaaaatatataaagggcccctgggctgctctgaaagggccagcatttgcagaaggaccacaactggtgacgtccaggtcctgggactcgttcacacgcagaagctgggtgtcataggtgacaaagttgttgtcacgtactccaaaggttatccgtgtggtggaaataagaccgcatcctccgtgatagaattgacctgtacaaagacggtgggcagacctgcattcaagaggtttgatatcgacagctgcacttactacttcagctgggactcccgggctgcctgcgccgtgaagcctcaggaggtgcagatggtgaatgggaccatcaccaaccctataaatggcaagagcttcagcctcggagatatttattttaagctgttcagagcctctggggacatgaggaccaatggggacaactacctgtatgagatccaactttcctccatcacaagctccagaaacccggcgtgctctggagccaacatatgccaggtgaagcccaacgatcagcacttcagtcggaaagttggaacctctgacaagaccaagtactaccttcaagacggcgatctcgatgtcgtgtttgcctcttcctctaagtgcggaaaggataagaccaagtctgtttcttccaccatcttcttccactgtgaccctctggtggaggacgggatccccgagttcagtcacgagactgccgactgccagtacctcttctcttggtacacctcagccgtgtgtcctctgggggtgggctttgacagcgagaatcccggggacgacgggcagatgcacaaggggctgtcagaacggagccaggcagtcggcgcggtgctcagcctgctgctggtggcgctcacctgctgcctgctggccctgttgctctacaagaaggagaggagggaaacagtgataagtaagctgaccacttgctgtaggagaagttccaacgtgtcctacaaatactcaaaggtgaataaggaagaagagacagatgagaatgaaacagagtggctgatggaagagatccagctgcctcctccacggcagggaaaggaagggcaggagaacggccatattaccaccaagtcagtgaaagccctcagctccctgcatggggatgaccaggacagtgaggatgaggttctgaccatcccagaggtgaaagttcactcgggcaggggagctggggcagagagctcccacccagtgagaaacgcacagagcaatgcccttcaggagcgtgaggacgatagggtggggctggtcaggggtgagaaggcgaggaaagggaagtccagctctgcacagcagaagacagtgagctccaccaagctggtgtccttccatgacgacagcgacgaggacctcttacacatctgactccgcagtgcctgcaggggagcacggagccgcgggacagccaagcacctccaaccaaataagacttccactcgatgatgcttctataattttgcctttaacagaaactttcaaaagggaagagtttttgtgatgggggagagggtgaaggaggtcaggccccactccttcctgattgtttacagtcattggaataaggcatggctcagatcggccacagggcggtaccttgtgcccagggttttgccccaagtcctcatttaaaagcataaggccggacgcatctcaaaacagagggctgcattcgaagaaacccttgctgctttagtcccgatagggtatttgaccccgatatattttagcattttaattctctccccctatttattgactttgacaattactcaggtttgagaaaaaggaaaaaaaaacagccaccgtttcttcctgccagcaggggtgtgatgtaccagtttgtccatcttgagatggtgaggctgtcagtgtatggggcagcttccggcgggatgttgaactggtcattaatgtgtcccctgagttggagctcattctgtctcttttctcttttgctttctgtttcttaagggcacacacacgtgcgtgcgagcacacacacacatacgtgcacagggtccccgagtgcctaggttttggagagtttgcctgttctatgcctttagtcaggaatggctgcacctttttgcatgatatcttcaagcctgggcgtacagagcacatttgtcagtatttttgccggctggtgaattcaaacaacctgcccaaagattgatttgtgtgtttgtgtgtgtgtgtgtgtgtgtgtgtgtgtgtgtgagtggagttgaggtgtcagagaaaatgaattttttccagatttggggtataggtctcatctcttcaggttctcatgataccacctttactgtgcttatttttttaagaaaaaagtgttgatcaaccattcgacctataagaagccttaatttgcacagtgtgtgacttacagaaactgcatgaaaaatcatgggccagagcctcggccctagcattgcacttggcctcatgctggagggaggctgggcgggtacagcgcggaggaggagggaggccaggcgggcatggcgtggaggaggagggaggccgggcggtcacagcatggaggaggagggaggcgctgctggtgttcttattctggcggcagcgcctttcctgccatgtttagtgaatgacttttctcgcattgtagaattgtatatagactctggtgttctattgctgagaagcaaaccgccctgcagcatccctcagcctgtaccggtttggctggcttgtttgatttcaacatgagtgtattttttaaaattgatttttctcttcatttttttttcaatcaactttactgtaatataaagtattcaacaatttcaataaaagataaattattaa

SEQ ID NO: 5017 - protein, 2065 aa, Homo sapiens
MSVINFECNKTAGNDGKGTPVFTGEVDCTYFFTWDTEYACVKEKEDLLCGATDGKKRYDLSALVRHAEPEQNWEAVDGSQTETEKKHFFINICHRVLQEGKARGCPEDAAVCAVDKNGSKNLGKFISSPMKEKGNIQLSYSDGDDCGHGKKIKTNITLVCKPGDLESAPVLRTSGEGGCFYEFEWHTAAACVLSKTEGENCTVFDSQAGFSFDLSPLTKKNGAYKVETKKYDFYINVCGPVSVSPCQPDSGACQVAKSDEKTWNLGLSNAKLSYYDGMIQLNYRGGTPYNNERHTPRATLITFLCDRDAGVGFPEYQEEDNSTYNFRWYTSYACPEEPLECVVTDPSTLEQYDLSSLAKSEGGLGGNWYAMDNSGEHVTWRKYYINVCRPLNPVPGCNRYASACQMKYEKDQGSFTEVVSISNLGMAKTGPVVEDSGSLLLEYVNGSACTTSDGRQTTYTTRIHLVCSRGRLNSHPIFSLNWECVVSFLWNTEAACPIQTTTDTDQACSIRDPNSGFVFNLNPLNSSQGYNVSGIGKIFMFNVCGTMPVCGTILGKPASGCEAETQTEELKNWKPARPVGIEKSLQLSTEGFITLTYKGPLSAKGTADAFIVRFVCNDDVYSGPLKFLHQDIDSGQGIRNTYFEFETALACVPSPVDCQVTDLAGNEYDLTGLSTVRKPWTAVDTSVDGRKRTFYLSVCNPLPYIPGCQGSAVGSCLVSEGNSWNLGVVQMSPQAAANGSLSIMYVNGDKCGNQRFSTRITFECAQISGSPAFQLQDGCEYVFIWRTVEACPVVRVEGDNCEVKDPRHGNLYDLKPLGLNDTIVSAGEYTYYFRVCGKLSSDVCPTSDKSKVVSSCQEKREPQGFHKVAGLLTQKLTYENGLLKMNFTGGDTCHKVYQRSTAIFFYCDRGTQRPVFLKETSDCSYLFEWRTQYACPPFDLTECSFKDGAGNSFDLSSLSRYSDNWEAITGTGDPEHYLINVCKSLAPQAGTEPCPPEAAACLLGGSKPVNLGRVRDGPQWRDGIIVLKYVDGDLCPDGIRKKSTTIRFTCSESQVNSRPMFISAVEDCEYTFAWPTATACPMKSNEHDDCQVTNPSTGHLFDLSSLSGRAGFTAAYSEKGLVYMSICGENENCPPGVGACFGQTRISVGKANKRLRYVDQVLQLVYKDGSPCPSKSGLSYKSVISFVCRPEARPTNRPMLISLDKQTCTLFFSWHTPLACEQATECSVRNGSSIVDLSPLIHRTGGYEAYDESEDDASDTNPDFYINICQPLNPMHGVPCPAGAAVCKVPIDGPPIDIGRVAGPPILNPIANEIYLNFESSTPCLADKHFNYTSLIAFHCKRGVSMGTPKLLRTSECDFVFEWETPVVCPDEVRMDGCTLTDEQLLYSFNLSSLSTSTFKVTRDSRTYSVGVCTFAVGPEQGGCKDGGVCLLSGTKGASFGRLQSMKLDYRHQDEAVVLSYVNGDRCPPETDDGVPCVFPFIFNGKSYEECIIESRAKLWCSTTADYDRDHEWGFCRHSNSYRTSSIIFKCDEDEDIGRPQVFSEVRGCDVTFEWKTKVVCPPKKLECKFVQKHKTYDLRLLSSLTGSWSLVHNGVSYYINLCQKIYKGPLGCSERASICRRTTTGDVQVLGLVHTQKLGVIGDKVVVTYSKGYPCGGNKTASSVIELTCTKTVGRPAFKRFDIDSCTYYFSWDSRAACAVKPQEVQMVNGTITNPINGKSFSLGDIYFKLFRASGDMRTNGDNYLYEIQLSSITSSRNPACSGANICQVKPNDQHFSRKVGTSDKTKYYLQDGDLDVVFASSSKCGKDKTKSVSSTIFFHCDPLVEDGIPEFSHETADCQYLFSWYTSAVCPLGVGFDSENPGDDGQMHKGLSERSQAVGAVLSLLLVALTCCLLALLLYKKERRETVISKLTTCCRRSSNVSYKYSKVNKEEETDENETEWLMEEIQLPPPRQGKEGQENGHITTKSVKALSSLHGDDQDSEDEVLTIPEVKVHSGRGAGAESSHPVRNAQSNALQEREDDRVGLVRGEKARKGKSSSAQQKTVSSTKLVSFHDDSDEDLLHI

SEQ ID NO: 5018 - DNA, 8777 bp, Homo sapiens
ttgataccaaaaataatgtactttataaaatcaacatctgtggaagtgtggatattgtccagtgcgggccatcaagtgctgtttgtatgcacgacttgaagacacgcacttatcattcagtgggtgactctgttttgagaagtgcaaccagatctctcctggaattcaacacaacagtgagctgtgaccagcaaggcacaaatcacagagtccagagcagcattgccttcctgtgtgggaaaaccctgggaactcctgaatttgtaactgcaacagaatgtgtgcactactttgagtggaggaccactgcagcctgcaagaaagacatatttaaagcaaataaggaggtgccatgctatgtgtttgatgaagagttgaggaagcatgatctcaatcctctgatcaagcttagtggtgcctacttggtggatgactccgatccggacacttctctattcatcaatgtttgtagagacatagacacactacgagacccaggttcacagctgcgggcctgtccccccggcactgccgcctgcctggtaagaggacaccaggcgtttgatgttggccagccccgggacggactgaagctggtgcgcaaggacaggcttgtcctgagttacgtgagggaagaggcaggaaagctagacttttgtgatggtcacagccctgcggtgactattacatttgtttgcccgtcggagcggagagagggcaccattcccaaactcacagctaaatccaactgccgctatgaaattgagtggattactgagtatgcctgccacagagattacctggaaagtaaaacttgttctctgagcggcgagcagcaggatgtctccatagacctcacaccacttgcccagagcggaggttcatcctatatttcagatggaaaagaatatttgttttatttgaatgtctgtggagaaactgaaatacagttctgtaataaaaaacaagctgcagtttgccaagtgaaaaagagcgatacctctcaagtcaaagcagcaggaagataccacaatcagaccctccgatattcggatggagacctcaccttgatatattttggaggtgatgaatgcagctcagggtttcagcggatgagcgtcataaactttgagtgcaataaaaccgcaggtaacgatgggaaaggaactcctgtattcacaggggaggttgactgcacctacttcttcacatgggacacggaatacgcctgtgttaaggagaaggaagacctcctctgcggtgccaccgacgggaagaagcgctatgacctgtccgcgctggtccgccatgcagaaccagagcagaattgggaagctgtggatggcagtcagacggaaacagagaagaagcattttttcattaatatttgtcacagagtgctgcaggaaggcaaggcacgagggtgtcccgaggacgcggcagtgtgtgcagtggataaaaatggaagtaaaaatctgggaaaatttatttcctctcccatgaaagagaaaggaaacattcaactctcttattcagatggtgatgattgtggtcatggcaagaaaattaaaactaatatcacacttgtatgcaagccaggtgatctggaaagtgcaccagtgttgagaacttctggggaaggcggttgcttttatgagtttgagtggcacacagctgcggcctgtgtgctgtctaagacagaaggggagaactgcacggtctttgactcccaggcagggttttcttttgacttatcacctctcacaaagaaaaatggtgcctataaagttgagacaaagaagtatgacttttatataaatgtgtgtggcccggtgtctgtgagcccctgtcagccagactcaggagcctgccaggtggcaaaaagtgatgagaagacttggaacttgggtctgagtaatgcgaagctttcatattatgatgggatgatccaactgaactacagaggcggcacaccctataacaatgaaagacacacaccgagagctacgctcatcacctttctctgtgatcgagacgcgggagtgggcttccctgaatatcaggaagaggataactccacctacaacttccggtggtacaccagctatgcctgcccggaggagcccctggaatgcgtagtgaccgacccctccacgctggagcagtacgacctctccagtctggcaaaatctgaaggtggccttggaggaaactggtatgccatggacaactcaggggaacatgtcacgtggaggaaatactacattaacgtgtgtcggcctctgaatccagtgccgggctgcaaccgatatgcatcggcttgccagatgaagtatgaaaaagatcagggctccttcactgaagtggtttccatcagtaacttgggaatggcaaagaccggcccggtggttgaggacagcggcagcctccttctggaatacgtgaatgggtcggcctgcaccaccagcgatggcagacagaccacatataccacgaggatccatctcgtctgctccaggggcaggctgaacagccaccccatcttttctctcaactgggagtgtgtggtcagtttcctgtggaacacagaggctgcctgtcccattcagacaacgacggatacagaccaggcttgctctataagggatcccaacagtggatttgtgtttaatcttaatccgctaaacagttcgcaaggatataacgtctctggcattgggaagatttttatgtttaatgtctgcggcacaatgcctgtctgtgggaccatcctgggaaaacctgcttctggctgtgaggcagaaacccaaactgaagagctcaagaattggaagccagcaaggccagtcggaattgagaaaagcctccagctgtccacagagggcttcatcactctgacctacaaagggcctctctctgccaaaggtaccgctgatgcttttatcgtccgctttgtttgcaatgatgatgtttactcagggcccctcaaattcctgcatcaagatatcgactctgggcaagggatccgaaacacttactttgagtttgaaaccgcgttggcctgtgttccttctccagtggactgccaagtcaccgacctggctggaaatgagtacgacctgactggcctaagcacagtcaggaaaccttggacggctgttgacacctctgtcgatgggagaaagaggactttctatttgagcgtttgcaatcctctcccttacattcctggatgccagggcagcgcagtggggtcttgcttagtgtcagaaggcaatagctggaatctgggtgtggtgcagatgagtccccaagccgcggcgaatggatctttgagcatcatgtatgtcaacggtgacaagtgtgggaaccagcgcttctccaccaggatcacgtttgagtgtgctcagatatcgggctcaccagcatttcagcttcaggatggttgtgagtacgtgtttatctggagaactgtggaagcctgtcccgttgtcagagtggaaggggacaactgtgaggtgaaagacccaaggcatggcaacttgtatgacctgaagcccctgggcctcaacgacaccatcgtgagcgctggcgaatacacttattacttccgggtctgtgggaagctttcctcagacgtctgccccacaagtgacaagtccaaggtggtctcctcatgtcaggaaaagcgggaaccgcagggatttcacaaagtggcaggtctcctgactcagaagctaacttatgaaaatggcttgttaaaaatgaacttcacggggggggacacttgccataaggtttatcagcgctccacagccatcttcttctactgtgaccgcggcacccagcggccagtatttctaaaggagacttcagattgttcctacttgtttgagtggcgaacgcagtatgcctgcccacctttcgatctgactgaatgttcattcaaagatggggctggcaactccttcgacctctcgtccctgtcaaggtacagtgacaactgggaagccatcactgggacgggggacccggagcactacctcatcaatgtctgcaagtctctggccccgcaggctggcactgagccgtgccctccagaagcagccgcgtgtctgctgggtggctccaagcccgtgaacctcggcagggtaagggacggacctcagtggagagatggcataattgtcctgaaatacgttgatggcgacttatgtccagatgggattcggaaaaagtcaaccaccatccgattcacctgcagcgagagccaagtgaactccaggcccatgttcatcagcgccgtggaggactgtgagtacacctttgcctggcccacagccacagcctgtcccatgaagagcaacgagcatgatgactgccaggtcaccaacccaagcacaggacacctgtttgatctgagctccttaagtggcagggcgggattcacagctgcttacagcgagaaggggttggtttacatgagcatctgtggggagaatgaaaactgccctcctggcgtgggggcctgctttggacagaccaggattagcgtgggcaaggccaacaagaggctgagatacgtggaccaggtcctgcagctggtgtacaaggatgggtccccttgtccctccaaatccggcctgagctataagagtgtgatcagtttcgtgtgcaggcctgaggccaggccaaccaataggcccatgctcatctccctggacaagcagacatgcactctcttcttctcctggcacacgccgctggcctgcgagcaagcgaccgaatgttccgtgaggaatggaagctctattgttgacttgtctccccttattcatcgcactggtggttatgaggcttatgatgagagtgaggatgatgcctccgataccaaccctgatttctacatcaatatttgtcagccactaaatcccatgcacggagtgccctgtcctgccggagccgctgtgtgcaaagttcctattgatggtccccccatagatatcggccgggtagcaggaccaccaatactcaatccaatagcaaatgagatttacttgaattttgaaagcagtactccttgcttagcggacaagcatttcaactacacctcgctcatcgcgtttcactgtaagagaggtgtgagcatgggaacgcctaagctgttaaggaccagcgagtgcgactttgtgttcgaatgggagactcctgtcgtctgtcctgatgaagtgaggatggatggctgtaccctgacagatgagcagctcctctacagcttcaacttgtccagcctttccacgagcacctttaaggtgactcgcgactcgcgcacctacagcgttggggtgtgcacctttgcagtcgggccagaacaaggaggctgtaaggacggaggagtctgtctgctctcaggcaccaagggggcatcctttggacggctgcaatcaatgaaactggattacaggcaccaggatgaagcggtcgttttaagttacgtgaatggtgatcgttgccctccagaaaccgatgacggcgtcccctgtgtcttccccttcatattcaatgggaagagctacgaggagtgcatcatagagagcagggcgaagctgtggtgtagcacaactgcggactacgacagagaccacgagtggggcttctgcagacactcaaacagctaccggacatccagcatcatatttaagtgtgatgaagatgaggacattgggaggccacaagtcttcagtgaagtgcgtgggtgtgatgtgacatttgagtggaaaacaaaagttgtctgccctccaaagaagttggagtgcaaattcgtccagaaacacaaaacctacgacctgcggctgctctcctctctcaccgggtcctggtccctcgtccacaacggagtctcgtactatataaatctgtgccagaaaatatataaagggcccctgggctgctctgaaagggccagcatttgcagaaggaccacaactggtgacgtccaggtcctgggactcgttcacacgcagaagctgggtgtcataggtgacaaagttgttgtcacgtactccaaaggttatccgtgtggtggaaataagaccgcatcctccgtgatagaattgacctgtacaaagacggtgggcagacctgcattcaagaggtttgatatcgacagctgcacttactacttcagctgggactcccgggctgcctgcgccgtgaagcctcaggaggtgcagatggtgaatgggaccatcaccaaccctataaatggcaagagcttcagcctcggagatatttattttaagctgttcagagcctctggggacatgaggaccaatggggacaactacctgtatgagatccaactttcctccatcacaagctccagaaacccggcgtgctctggagccaacatatgccaggtgaagcccaacgatcagcacttcagtcggaaagttggaacctctgacaagaccaagtactaccttcaagacggcgatctcgatgtcgtgtttgcctcttcctctaagtgcggaaaggataagaccaagtctgtttcttccaccatcttcttccactgtgaccctctggtggaggacgggatccccgagttcagtcacgagactgccgactgccagtacctcttctcttggtacacctcagccgtgtgtcctctgggggtgggctttgacagcgagaatcccggggacgacgggcagatgcacaaggggctgtcagaacggagccaggcagtcggcgcggtgctcagcctgctgctggtggcgctcacctgctgcctgctggccctgttgctctacaagaaggagaggagggaaacagtgataagtaagctgaccacttgctgtaggagaagttccaacgtgtcctacaaatactcaaaggtgaataaggaagaagagacagatgagaatgaaacagagtggctgatggaagagatccagctgcctcctccacggcagggaaaggaagggcaggagaacggccatattaccaccaagtcagtgaaagccctcagctccctgcatggggatgaccaggacagtgaggatgaggttctgaccatcccagaggtgaaagttcactcgggcaggggagctggggcagagagctcccacccagtgagaaacgcacagagcaatgcccttcaggagcgtgaggacgatagggtggggctggtcaggggtgagaaggcgaggaaagggaagtccagctctgcacagcagaagacagtgagctccaccaagctggtgtccttccatgacgacagcgacgaggacctcttacacatctgactccgcagtgcctgcaggggagcacggagccgcgggacagccaagcacctccaaccaaataagacttccactcgatgatgcttctataattttgcctttaacagaaactttcaaaagggaagagtttttgtgatgggggagagggtgaaggaggtcaggccccactccttcctgattgtttacagtcattggaataaggcatggctcagatcggccacagggcggtaccttgtgcccagggttttgccccaagtcctcatttaaaagcataaggccggacgcatctcaaaacagagggctgcattcgaagaaacccttgctgctttagtcccgatagggtatttgaccccgatatattttagcattttaattctctccccctatttattgactttgacaattactcaggtttgagaaaaaggaaaaaaaaacagccaccgtttcttcctgccagcaggggtgtgatgtaccagtttgtccatcttgagatggtgaggctgtcagtgtatggggcagcttccggcgggatgttgaactggtcattaatgtgtcccctgagttggagctcattctgtctcttttctcttttgctttctgtttcttaagggcacacacacgtgcgtgcgagcacacacacacatacgtgcacagggtccccgagtgcctaggttttggagagtttgcctgttctatgcctttagtcaggaatggctgcacctttttgcatgatatcttcaagcctgggcgtacagagcacatttgtcagtatttttgccggctggtgaattcaaacaacctgcccaaagattgatttgtgtgtttgtgtgtgtgtgtgtgtgtgtgtgtgtgtgtgtgagtggagttgaggtgtcagagaaaatgaattttttccagatttggggtataggtctcatctcttcaggttctcatgataccacctttactgtgcttatttttttaagaaaaaagtgttgatcaaccattcgacctataagaagccttaatttgcacagtgtgtgacttacagaaactgcatgaaaaatcatgggccagagcctcggccctagcattgcacttggcctcatgctggagggaggctgggcgggtacagcgcggaggaggagggaggccaggcgggcatggcgtggaggaggagggaggccgggcggtcacagcatggaggaggagggaggcgctgctggtgttcttattctggcggcagcgcctttcctgccatgtttagtgaatgacttttctcgcattgtagaattgtatatagactctggtgttctattgctgagaagcaaaccgccctgcagcatccctcagcctgtaccggtttggctggcttgtttgatttcaacatgagtgtattttttaaaattgatttttctcttcatttttttttcaatcaactttactgtaatataaagtattcaacaatttcaataaaagataaattattaa

SEQ ID NO: 5019 - protein, 2407 aa, Homo sapiens [sequence omitted]

SEQ ID NO: 5020 - DNA, 1561 bp, Homo sapiens
aacctacgacctgcggctgctctcctctctcaccgggtcctggtccctggtgtccttccatgacgacagcgacgaggacctcttacacatctgactccgcagtgcctgcaggggagcacggagccgcgggacagccaagcacctccaaccaaataagacttccactcgatgatgcttctataattttgcctttaacagaaactttcaaaagggaagagtttttgtgatgggggagagggtgaaggaggtcaggccccactccttcctgattgtttacagtcattggaataaggcatggctcagatcggccacagggcggtaccttgtgcccagggttttgccccaagtcctcatttaaaagcataaggccggacgcatctcaaaacagagggctgcattcgaagaaacccttgctgctttagtcccgatagggtatttgaccccgatatattttagcattttaattctctccccctatttattgactttgacaattactcaggtttgagaaaaaggaaaaaaaaacagccaccgtttcttcctgccagcaggggtgtgatgtaccagtttgtccatcttgagatggtgaggctgtcagtgtatggggcagcttccggcgggatgttgaactggtcattaatgtgtcccctgagttggagctcattctgtctcttttctcttttgctttctgtttcttaagggcacacacacgtgcgtgcgagcacacacacacatacgtgcacagggtccccgagtgcctaggttttggagagtttgcctgttctatgcctttagtcaggaatggctgcacctttttgcatgatatcttcaagcctgggcgtacagagcacatttgtcagtatttttgccggctggtgaattcaaacaacctgcccaaagattgatttgtgtgtttgtgtgtgtgtgtgtgtgtgtgtgtgtgtgtgtgagtggagttgaggtgtcagagaaaatgaattttttccagatttggggtataggtctcatctcttcaggttctcatgataccacctttactgtgcttatttttttaagaaaaaagtgttgatcaaccattcgacctataagaagccttaatttgcacagtgtgtgacttacagaaactgcatgaaaaatcatgggccagagcctcggccctagcattgcacttggcctcatgctggagggaggctgggcgggtacagcgcggaggaggagggaggccaggcgggcatggcgtggaggaggagggaggccgggcggtcacagcatggaggaggagggaggcgctgctggtgttcttattctggcggcagcgcctttcctgccatgtttagtgaatgacttttctcgcattgtagaattgtatatagactctggtgttctattgctgagaagcaaaccgccctgcagcatccctcagcctgtaccggtttggctggcttgtttgatttcaacatgagtgtattttttaaaattgatttttctcttcatttttttttcaatcaactttactgtaatataaagtattcaacaatttcaataaaagataaattattaa

SEQ ID NO: 5021 - protein, 107 aa, Homo sapiens [sequence omitted]

SEQ ID NO: 5022 - DNA, 339 bp, Homo sapiens
ttgttgactcacttaggctgatggcagctgcctctgctgggaaggaagcgtttttcccacaacatattaaatgcggcactggaggatggctggctggtccaggggccggatctggctctgttgctcacaatgattctgtttggcaagcgtttttaaaaagccttggtaagttccagatggtgaccacttgcctcatttatcctccatttgaaaaatttcaaaaactattcatttgtttgcataccaaggcagtacagaatcttctacagtggcacttcgatgttcctgtcaccatcctgttggaacggatgcctgcccaccatgatccgcagattctgg

SEQ ID NO: 5023 - protein, 105 aa, Homo sapiens
MAAASAGKEAFFPQHIKCGTGGWLAGPGAGSGSVAHNDSVWQAFLKSLGKFQMVTTCLIYPPFEKFQKLFICLHTKAVQNLLQWHFDVPVTILLERMPAHHDPQI

SEQ ID NO: 5024 - DNA, 583 bp, Homo sapiens
aaaaactattcatttgtttgcataccaaggcagtacagaatcttctacagtggcacttcgatgaaaagaagaaatgcgtgaggattgaaattggcaaccaatctttgaaagcctagtagacacccgatgccttcaacatgtcttatatgacccttgcctccagcctgtaaggctggagtgcagtggtgtgatctcagctcactgaaacctccgcctcccggattcaagcaattctcttgcctcagcctcctgagtagctgggattacagttcctgtcaccatcctgttggaacggatgcctgcccaccatgatccgcagattctggacggagactcaggagaggaagccgagacaacgacgccacagtgcagaacggagcctccctcttccgggctgaagatctcagccattccggctgcatccaggagcggcccgggagcttccccaacagtgaacacagacccagggctcctacccaaatggggacgtgaacaagccgcttcccgcgagactgggtggaagggcctctctcccaccacggcctctctccaactgctccgtgggcgcccgtgttttctcctc

SEQ ID NO: 5025 - protein, 95 aa, Homo sapiens
MPAHHDPQILDGDSGEEAETTTPQCRTEPPSSGLKISAIPAASRSGPGASPTVNTDPGLLPKWGREQAASRETGWKGLSPTTASLQLLRGRPCFL

SEQ ID NO: 5026 - DNA, 552 bp, Homo sapiens
aatatgttaagtctccagggtcatgtgaaacctgtagctgcaccatatgtaattccagcactccggcctctctccacgcactctccaaggaatcttgctgtgatgagttttaaatgcctcccatactgaatgttctccaacctctgtctccagctccaatctctggatttagagatctctggatagagttcactctatctagctccacattcctaaaaggatgagaaaacctggaggcctctaagcactttatgctgaattggtttgcacccaaaacatcatagtcctgtagaatttcacgagaactatgtgagcatagttctagtttctttgaatggcacatcactccagctgcttaaaccagggcccagaagagtcttaaatgccttctttacccttttactccatgtccatgcagtctacctgctttcagaacccagaggaaaaggatgtcctcatccccaatttacagcaaaagccatgaatttacagatgacagcttcagaattcatgtcaggatatgtgttctaatctgaataaagcattatttcc

SEQ ID NO: 5027 - protein, 33 aa, Homo sapiens
MPSLPFYSMSMQSTCFQNPEEKDVLIPNLQQKP

SEQ ID NO: 5028 - DNA, 2801 bp, Homo sapiens
ggtctatggttgcagcttttaggaggccacggcttttactcccaacaggcccactgagactaatggggccacactactgggagggggcagtgtttctcaaagcatggtctttagaccgtctgagtgagaaaccccggggcaatgatttcgctggttcccagtcagatctgccactgccgaatctgtgatgaggcccagaaagctcctgacagacggtgcctctgtgtgcagcaacaggagaccacggcggtctcacctggaaactcttccacagttgtcatttcagcagcgctccacaagtgatggagttgactcccatcagagccctcctggacatgaactcctgagtgccagaaacaagattcatttaaagatacaactgtgaacgctgctgaccacattccagcgcagtgtggatgttcaacaccgaagggaggggactcgggcttggatctgcagctagcattggatggacacagaatcctgaactatgcatcgtgctttagctgccatgaaaattgatttttttttttttcagaaaggaatgtgccaatgatgggacttaagctggtgaaaaccacgtggaacgggatgctcatgggacctgccccttggagctccaggcctccaggcctcagtgctggttttcctaagtccttattttctcccgtgtttggctgggggctggtccgacttctccctttggtggactctcagttgtcaagtgtgaagtctttgaactgcacacaagagtggggacaacgtttctatctgcaaatcaagcaagcgcttgggcgaacatcttcccaaggcagagatgaagaatgggtactctaggatgctccattttgggacaaacgtctagtggggccacatttgcatggcaacatgccatttccactttttccgtatttagaagcttcccatggagctcccgctgacaggagccactcatgtgcacactgagtggaggctcagaaggaggatttgtcgtagagttgtttttcagaggctgggagtcagggctgagggccagcgggtggctctgcacccccatccctccatcccctgtggaatgccaggagttctcttctccgtccctcatgcgtgatgggggacaaatgtctcctcaccggtgacaataatgacaggcttctgtccagaggcaggaggggggccagtatcatgcactgaagaaactttcacagcacagttgtctgagacagggaaacccacacgcagacggccaggggaccttgacctccttagcaaacaggaaacaaagtgctcttgttctcaggccggaatgaagcggctgtgcgaacacatcccaattgtacatctgatgctgactcacacagagcgtttccatttttagatttcagctacagaaggcaggaatcctttggacttggccctttatcagtggaatggacagagcagctctcggtggggtctctgttgggaatgcctgctgagacgggaccaaggacggctgcaggatgtggtgtctgtgctcagcgtcacctcctcccaggctcctgggaagcacctgagcatctcctgacaaagccaccatgagcaagaccctcagagaaggtatgaagatgagaggctggtgtgaagaggctgctgtgaagcaactatatagcatcgggcaggacataaggggaaattgttgctttcatgttcctttacccccacagtttggatttctgccacaaggatcactgtggtcttcctccctggggctcactccacctaccccacacctcccacctcccccgtcctctcttgggggacttcctgagttctcgacagagcagtttcactgtcttctctccacgcttcctggactggcccgcccatttttttctatgacccagaattccttcccaaataagagcgtcatattccttgagccccttcactagaagcaaggagatgggcaggcgttgaactgcggcttttctctagactcttccctaatccctaggttcccccaactatttagtctagagcaagcccaggaacagtgattttttttttttaacctgccatttctgttattcaagctgttttagtcagttcaggctgctgtaacaaaaatgcaatggcctgggtggttttaacaacagaaatggatttctcacagttcttgtgaggctgggacgcaggaacccccacatccaagtgccaggcagttccgtggctgggagggctccagactggtgtgtggatggcaccttctgctgtgtcctcacatggctgagagatgggtcatctctgttcttatcagggcactaatcccattcacaaggccccccatgacctaatcacctcctaaatgccccgcttcctaataccagcaccttggaaaatagggcttcaagatacaaattttgggggactcaaacattccatccatagcacccgctcatgtgctgtgatgtccagtgagcaggcggagttccagggctggtcagtgccaggtgctccttctcccacccgagaacaggggccaggttgctcctcaggcaccctgggcaactgccccttcccttccagtggggcctgacctggctaccgagcttggcagctaataggcgggcccctcagcattcacgctcctgagctgctttatcaaactaggattgttcccccaggtctaagaaaaccatccattcactgcaaagttatttattactgcggatgggctaggagttagaggaagagagtgactcaaatcacaacacctcctggacgaagctggaagggattaaaatacggcctaatttctc

SEQ ID NO: 5029 - protein, 65 aa, Homo sapiens
MRPRKLLTDGASVCSNRRPRRSHLETLPQLSFQQRSTSDGVDSHQSPPGHELLSARNKIHLKIQL

SEQ ID NO: 5030 - DNA, 554 bp, Homo sapiens
acattacagctctacaatgcaccagacggacccatctggattctttcggggctcttagccctagaaatagcatcatttcttcaaactggtgagtcctcctgtctaaaatcaggatgcagagagttgatgcacggcatggcacaggatgctgggcaaggctggcaggcccgggagagcctgtggccagcctgggtccaggaagtgggcagctgccacagaggggcctccgaggctagctgcctcctaacttcctcacggcacaccattctgccgtcctgagtcttctcaaggttggaaggtgcccagatccagggagatggtgctggctctttggtggctgtggagtgtccagacagatgagctggaatccttcagtttctctgcctctcctgtcaagttggggtagcactgcttggactcttgccccggctgcattgaccaagccttgatgttgccttgaccaagccttgatgttgccttctttgccaaaccactggccacgatgttgctggcacagcagcccaaaggcagctgcttgtccatctcagcctgac

SEQ ID NO: 5031 - protein, 50 aa, Homo sapiens
MHGMAQDAGQGWQARESLWPAWVQEVGSCHRGASEASCLLTSSRHTILPS

SEQ ID NO: 5032 - DNA, 737 bp, Homo sapiens
cgcagctggccggaacaggaccgtggaagtgtttgacctcaacgccggctgcagtgcagcggtgatagcggaagcccactcacggcctgtccatcaaatctgccaaaataaagtgtgagcgccactttgaagggcatccaacccgcggctatccatgtggaatcgctttcagtccttgtggacgattcgcggcttgtggggccgaggacagacacgcttacgtgtatgaaatgggctcaagcacgttttctcaccggctggctgggcacacagacactgtcactggagtggccttcaacccatcagcgccccagcttgccacagctaccttggatggtaaactccagctctttctagctgagtaaccactgacctgtgagctgggtccaggaatgctgtgaggaacaacttaaaagtaagaagtagtggttcatccatcagggggccagaagcagcaactgtttttcatattttgagacttgcctcagatttcccccgtttgcaagctcctcccctctgtgtgtgccatgtcagagttttatgtctttctgctcctcaaaagggatccccttcattgggaaaatggaaatggcgtccagtacttctgcacagaatttggtaaagttaaaacaaaatatctttcaataaaacataatatagtatttgtttgataattagagttggaagaaaaaagagagaatttcttttgggcagtgaaaataaagcagttaacagtc

SEQ ID NO: 5033 - protein, 44 aa, Homo sapiens
MGSSTFSHRLAGHTDTVTGVAFNPSAPQLATATLDGKLQLFLAE

SEQ ID NO: 5034 - DNA, 3596 bp, Homo sapiens
agatagcgaaaggggcgtgggcgcgaggggcggcgggctagtaaccatagcggctcgcgtgggtcggctggcaagtaaccatagcggcgagcgtggggcggagtgtggctcggtagtcctctgcgtgccctcctgggagctgggtgctgtgagtcctcccctagcgggctggtctcggcgcggagtcggcgccgaacccgagctgctgctctggggcgtgtgcctagggcgcagggctggagcgcgggggctgcgcggttgctcgcggctccgctgaggtctctaggaaagggggcgatttgagggttccgccgtgaccgcttccaacggcggacacgcgcgctctggaccagagccgttgcccgctgtctcgtcacccgaagcctcctcctgacgccgtgctagtgcgagggtctccaggggaattcggggcacaagtcgggccggagcatccgggcggccgcttgagatcggcgctttgagaactgagcgcatgtggagttcggaggaaaagggctcagattgaagatggaaaatccccaagacattttctcaagtaatggtggctgtctaagtgatatagttatagaaaaatacctggttgaatccaaggagtctgtgtctcatgttcagcttgcttgcagcatgcaggactgtgctttccctttggatggaactgaactttgtatatggaacactaaggatccttctcatcagcttctaatcctacgaggacaccatcagccaattactgctatggcttttggaaataaagtgaacccacttctaatctgctcagcatcactggattatgttataatgtggaacctggatgaatgtagagagaaagtacttcaagggctggtccctcgagggactgtcatgggctcgcttttgggaaaggtgctgtgtttacagttgagcctggatgatcatgttgttgccgtgtgtgctggaaacaaaatattcatgctggatattgagcagcgattttctgtgacatacatagaacgtcctgatgttaataaccgccacaaagtcccaccaccgaccttcctgcacacattctctcagactcaggctgttcgggccgagctgcagggccacctgggcccggtgactgcggtggagttctgtccctggcgagcaggcaccctcatctcggcgtctgaggacagaggctttaaggtctgggaccattgtacaggatcattaatatacagttcatctgtgttatcagcatatcctcttctcagtttattcattgatgcagaaagcaggcagctggtcaccgggtgtgctgacggccagctttggatcttcagtttgatggatggacaccattatcgtcgtgtggcacgggttgacctaaggaagaagacagagactttctccacaagaagggttaagtctgggctgtgcagccagccagaagaaagccagcttccctctacaagtgctctgggaaaaggagagcaggttgaagtaacatttcctgtactgagacttgcaccctgtgatctctcactcatcccaaattctgcatgtggatgtctttcttctgagaacacccgatgtgtgtggatcggaagctcagtgggcttattcgtatttaacctggcaaacctggaagtggaagctgctttgtattacaaggatttccagagcctcagcatcctgctggccggatcgtgtgccctgaggaaccgcactgcggatcaaaaggtgctgtgcttgctggcctccctctttggcgggaagattgccgtgttggagatcaacccggccgcgctagtcagggctcagcagtgccccagcatggggcagagcctctcggtgccagccagctcctgtgtcctaccgacctctccactgtatctgggaattgccaaggagaagagtaccaaggctgctagtgaacagcgacgtgctgcacggaacgtcatgaaggaccaacgcctggttttccatagtaaagttaggtcatctggttatgcgtcagcaccacatgtaactatgttttcaccaaagaccaacatcaagagtgaggggaaaggatcttcaaggagcaggagcagctgcgcacgggaggcataccccgtggagtgcgctgtgcccaccaagcccggcccccaggtcgctgccgcccccacctgcacacgtgtatgctgcatccagtactcaggagatgggcagtggctggcctgtgggttggccaaccatctgttactcgtttttgatgccagcctgactgggacacctgctgtgttttcaggtcacgacggggcagtgaatgccgtgtgctggagccaggaccggaggtggctgctctctgcggcccgggacgggaccctgcgaatgtggtcggctcgtggggcagagctcgcactgcttctgggcaaagacatgttttctaaacctatacagtctgcacagttctattatatagatgcctttatattgttatcttctggccctgaatttcagctactgaggtatcacattgacacttgcaaagatgagattaagagatataaacagaagagcaagtccaagctgatttgcaggctctccacgacgggtgcagtagacatgaccagtttatcggcagtcaacgacttttattcccacatcgtactcgcagctggccggaacaggaccgtggaagtgtttgacctcaacgccggctgcagtgcagcggtgatagcggaagcccactcacggcctgtccatcaaatctgccaaaataaaggttcatcatttacaacccaacagcctcaggcttataaccttttcctgaccacggccattggcgatgggatgagactgtgggacctgagaaccctgaggtgtgagcgccactttgaagggcatccaacccgcggctatccatgtggaatcgctttcagtccttgtggacgattcgcggcttgtggggccgaggacagacacgcttacgtgtatgaaatgggctcaagcacgttttctcaccggctggctgggcacacagacactgtcactggagtggccttcaacccatcagcgccccagatggagtctcgctctgtcgcccacgctggagtgcagtggcacgatctcggttcactgcaacctccgccttccaggttcaagcaattcttctgcctcagcctcccgagtagctgggattacagcttgccacagctaccttggatggtaaactccagctctttctagctgagtaaccactgacctgtgagctgggtccaggaatgctgtgaggaacaacttaaaagtaagaagtagtggttcatccatcagggggccagaagcagcaactgtttttcatattttgagacttgcctcagatttcccccgtttgcaagctcctcccctctgtgtgtgccatgtcagagttttatgtctttctgctcctcaaaagggatccccttcattgggaaaatggaaatggcgtccagtacttctgcacagaatttggtaaagttaaaacaaaatatctttcaataaaacataatatagtatttgtttgataattagagttggaagaaaaaagagagaatttcttttgggcagtgaaaataaagcagttaacagtc

SEQ ID NO: 5035 - protein, 895 aa, Homo sapiens
MENPQDIFSSNGGCLSDIVIEKYLVESKESVSHVQLACSMQDCAFPLDGTELCIWNTKDPSHQLLILRGHHQPITAMAFGNKVNPLLICSASLDYVIMWNLDECREKVLQGLVPRGTVMGSLLGKVLCLQLSLDDHVVAVCAGNKIFMLDIEQRFSVTYIERPDVNNRHKVPPPTFLHTFSQTQAVRAELQGHLGPVTAVEFCPWRAGTLISASEDRGFKVWDHCTGSLIYSSSVLSAYPLLSLFIDAESRQLVTGCADGQLWIFSLMDGHHYRRVARVDLRKKTETFSTRRVKSGLCSQPEESQLPSTSALGKGEQVEVTFPVLRLAPCDLSLIPNSACGCLSSENTRCVWIGSSVGLFVFNLANLEVEAALYYKDFQSLSILLAGSCALRNRTADQKVLCLLASLFGGKIAVLEINPAALVRAQQCPSMGQSLSVPASSCVLPTSPLYLGIAKEKSTKAASEQRRAARNVMKDQRLVFHSKVRSSGYASAPHVTMFSPKTNIKSEGKGSSRSRSSCAREAYPVECAVPTKPGPQVAAAPTCTRVCCIQYSGDGQWLACGLANHLLLVFDASLTGTPAVFSGHDGAVNAVCWSQDRRWLLSAARDGTLRMWSARGAELALLLGKDMFSKPIQSAQFYYIDAFILLSSGPEFQLLRYHIDTCKDEIKRYKQKSKSKLICRLSTTGAVDMTSLSAVNDFYSHIVLAAGRNRTVEVFDLNAGCSAAVIAEAHSRPVHQICQNKGSSFTTQQPQAYNLFLTTAIGDGMRLWDLRTLRCERHFEGHPTRGYPCGIAFSPCGRFAACGAEDRHAYVYEMGSSTFSHRLAGHTDTVTGVAFNPSAPQMESRSVAHAGVQWHDLGSLQPPPSRFKQFFCLSLPSSWDYSLPQLPWMVNSSSF

SEQ ID NO: 5036 - DNA, 3474 bp, Homo sapiens
agatagcgaaaggggcgtgggcgcgaggggcggcgggctagtaaccatagcggctcgcgtgggtcggctggcaagtaaccatagcggcgagcgtggggcggagtgtggctcggtagtcctctgcgtgccctcctgggagctgggtgctgtgagtcctcccctagcgggctggtctcggcgcggagtcggcgccgaacccgagctgctgctctggggcgtgtgcctagggcgcagggctggagcgcgggggctgcgcggttgctcgcggctccgctgaggtctctaggaaagggggcgatttgagggttccgccgtgaccgcttccaacggcggacacgcgcgctctggaccagagccgttgcccgctgtctcgtcacccgaagcctcctcctgacgccgtgctagtgcgagggtctccaggggaattcggggcacaagtcgggccggagcatccgggcggccgcttgagatcggcgctttgagaactgagcgcatgtggagttcggaggaaaagggctcagattgaagatggaaaatccccaagacattttctcaagtaatggtggctgtctaagtgatatagttatagaaaaatacctggttgaatccaaggagtctgtgtctcatgttcagcttgcttgcagcatgcaggactgtgctttccctttggatggaactgaactttgtatatggaacactaaggatccttctcatcagcttctaatcctacgaggacaccatcagccaattactgctatggcttttggaaataaagtgaacccacttctaatctgctcagcatcactggattatgttataatgtggaacctggatgaatgtagagagaaagtacttcaagggctggtccctcgagggactgtcatgggctcgcttttgggaaaggtgctgtgtttacagttgagcctggatgatcatgttgttgccgtgtgtgctggaaacaaaatattcatgctggatattgagcagcgattttctgtgacatacatagaacgtcctgatgttaataaccgccacaaagtcccaccaccgaccttcctgcacacattctctcagactcaggctgttcgggccgagctgcagggccacctgggcccggtgactgcggtggagttctgtccctggcgagcaggcaccctcatctcggcgtctgaggacagaggctttaaggtctgggaccattgtacaggatcattaatatacagttcatctgtgttatcagcatatcctcttctcagtttattcattgatgcagaaagcaggcagctggtcaccgggtgtgctgacggccagctttggatcttcagtttgatggatggacaccattatcgtcgtgtggcacgggttgacctaaggaagaagacagagactttctccacaagaagggttaagtctgggctgtgcagccagccagaagaaagccagcttccctctacaagtgctctgggaaaaggagagcaggttgaagtaacatttcctgtactgagacttgcaccctgtgatctctcactcatcccaaattctgcatgtggatgtctttcttctgagaacacccgatgtgtgtggatcggaagctcagtgggcttattcgtatttaacctggcaaacctggaagtggaagctgctttgtattacaaggatttccagagcctcagcatcctgctggccggatcgtgtgccctgaggaaccgcactgcggatcaaaaggtgctgtgcttgctggcctccctctttggcgggaagattgccgtgttggagatcaacccggccgcgctagtcagggctcagcagtgccccagcatggggcagagcctctcggtgccagccagctcctgtgtcctaccgacctctccactgtatctgggaattgccaaggagaagagtaccaaggctgctagtgaacagcgacgtgctgcacggaacgtcatgaaggaccaacgcctggttttccatagtaaagttaggtcatctggttatgcgtcagcaccacatgtaactatgttttcaccaaagaccaacatcaagagtgaggggaaaggatcttcaaggagcaggagcagctgcgcacgggaggcataccccgtggagtgcgctgtgcccaccaagcccggcccccaggtcgctgccgcccccacctgcacacgtgtatgctgcatccagtactcaggagatgggcagtggctggcctgtgggttggccaaccatctgttactcgtttttgatgccagcctgactgggacacctgctgtgttttcaggtcacgacggggcagtgaatgccgtgtgctggagccaggaccggaggtggctgctctctgcggcccgggacgggaccctgcgaatgtggtcggctcgtggggcagagctcgcactgcttctgggcaaagacatgttttctaaacctatacagtctgcacagttctattatatagatgcctttatattgttatcttctggccctgaatttcagctactgaggtatcacattgacacttgcaaagatgagattaagagatataaacagaagagcaagtccaagctgatttgcaggctctccacgacgggtgcagtagacatgaccagtttatcggcagtcaacgacttttattcccacatcgtactcgcagctggccggaacaggaccgtggaagtgtttgacctcaacgccggctgcagtgcagcggtgatagcggaagcccactcacggcctgtccatcaaatctgccaaaataaaggttcatcatttacaacccaacagcctcaggcttataaccttttcctgaccacggccattggcgatgggatgagactgtgggacctgagaaccctgaggtgtgagcgccactttgaagggcatccaacccgcggctatccatgtggaatcgctttcagtccttgtggacgattcgcggcttgtggggccgaggacagacacgcttacgtgtatgaaatgggctcaagcacgttttctcaccggctggctgggcacacagacactgtcactggagtggccttcaacccatcagcgccccagcttgccacagctaccttggatggtaaactccagctctttctagctgagtaaccactgacctgtgagctgggtccaggaatgctgtgaggaacaacttaaaagtaagaagtagtggttcatccatcagggggccagaagcagcaactgtttttcatattttgagacttgcctcagatttcccccgtttgcaagctcctcccctctgtgtgtgccatgtcagagttttatgtctttctgctcctcaaaagggatccccttcattgggaaaatggaaatggcgtccagtacttctgcacagaatttggtaaagttaaaacaaaatatctttcaataaaacataatatagtatttgtttgataattagagttggaagaaaaaagagagaatttcttttgggcagtgaaaataaagcagttaacagtc

SEQ ID NO: 5037 - protein, 857 aa, Homo sapiens; identical to SEQ ID NO: 659

SEQ ID NO: 5038 - DNA, 3513 bp, Homo sapiens
tctgatagtgaatagtactgttagcttcacctgttgcaataatggcaacgttgttacctcttctaaagaatcctgtgtttatccaaaggtctgggaccattgtacaggatcattaatatacagttcatctgtgttatcagcatatcctcttctcagtttattcattgatgcagaaagcaggcagctggtcaccgggtgtgctgacggccagctttggatcttcagtttgatggatggacaccattatcgtcgtgtggcacgggttgacctaaggaagaagacagagactttctccacaagaagggttaagtctgggctgtgcagccagccagatgccacatgcacccacccagcaaccttgtcctcacctggtctctggctgtccagagttgcttcctgttgacgacagctctcctcagaagaaagccagcttccctctacaagtgctctgggaaaaggagagcaggttgaagtaacatttcctgtactgagacttgcaccctgtgatctctcactcatcccaaattctgcatgtggatgtctttcttctgagaacacccgatgtgtgtggatcggaagctcagtgggcttattcgtatttaacctggcaaacctggaagtggaagctgctttgtattacaaggatttccagagcctcagcatcctgctggccggatcgtgtgccctgaggaaccgcactgcggatcaaaaggtgctgtgcttgctggcctccctctttggcgggaagattgccgtgttggagatcaacccggccgcgctagtcagggctcagcagtgccccagcatggggcagagcctctcggtgccagccagctcctgtgtcctaccgacctctccactgtatctgggaattgccaaggagaagagtaccaaggctgctagtgaacagcgacgtgctgcacggaacgtcatgaaggaccaacgcctggttttccatagtaaagttaggtcatctggttatgcgtcagcaccacatgtaactatgttttcaccaaagaccaacatcaagagtgaggggaaaggatcttcaaggagcaggagcagctgcgcacgggaggcataccccgtggagtgcgctgtgcccaccaagcccggcccccaggtcgctgccgcccccacctgcacacgtgtatgctgcatccagtactcaggagatgggcagtggctggcctgtgggttggccaaccatctgttactcgtttttgatgccagcctgactgggacacctgctgtgttttcaggtcacgacggggcagtgaatgccgtgtgctggagccaggaccggaggtggctgctctctgcggcccgggacgggaccctgcgaatgtggtcggctcgtggggcagagctcgcactgcttctgatataaacagaagagcaagtccaagctgatttgcaggctctccacgacgggtgcagtagacatgaccagtttatcggcagtcaacgacttttattcccacatcgtactcgcagctggccggaacaggaccgtggaagtgtttgacctcaacgccggctgcagtgcagcggtgatagcggaagcccactcacggcctgtccatcaaatctgccaaaataaaggttcatcatttacaacccaacagcctcaggcttataaccttttcctgaccacggccattggcgatgggatgagactgtgggacctgagaaccctgaggtgtgagcgccactttgaagggcatccaacccgcggctatccatgtggaatcgctttcagtccttgtggacgattcgcggcttgtggggccgaggacagacacgcttacgtgtatgaaatgggctcaagcacgttttctcaccggctggctgggcacacagacactgtcactggagtggccttcaacccatcagcgccccaggtaaggaaactgaggcataaagaagttaaaatgcctgaacaaaagcacacagtgggtaagtggacacgcaaggcttcgcacctcattgatctgacttcagattccatcttcttggcatggtgcccacctacgcaccacagagctgtataagggcagaagagaggagtgtgttctgctgccaccagcaagcactgggaatcatcttgaagaaaagcggggtgagctgtacggagcctttcggggcagattcaagagcagaaagccgtgtctttcttactatggacactcgggaactggagaaaggtttccttctcaaatttattgactagaactcagttccaaatcaacatttcaaaaaagtttcttatttctgtgagaggcaacatatattatatttctactaatgtggcattaatgcttgtttttttcttttttagtccctgagtggtttcaaatgtgtgttttcatgtacaatttatagttctgaagagtgtgtcatttccagatatttcctgactgtctcatcaatgcccacatcattaaagttaatttcatgcctaaggaatctacactaccttccatttggaaaatgttctgcagattctagcaaagtcaacagccaaaccgtgaatgtaaaggctgccgtacagactacagaagtaggcagcttgccattgccacgctacctactttacattcaagtgatttatataagagccaaaaaaatgtgctccacatagtattgatctttcactgccatgcagggatgagctgtccagatgataaattaagacaatgagaacataagggattggcttcaagatttgtggttgccgacggaatttcttcagcagaaagagaaggaaactgaactacggaactggtaggatattattatttttactgtaaacgatccaagcctgtcaggcctgtaacttccaagtgcaatgtattatgatctacagtgtaaaacaaaagattctgaatttgagtcagtaatagctggtttattccaggattcaaatgtaagtaacttactctcaccaacagtagtcaaaatgagaagcctgctatgctgtggatttatggctcatggactctggatgagttctgcatttatcttcgtggagtgacgaataattgaattggaaaatcatggcatccagaatggaactgcataaaaatctgctggagtgtttccgaaaaaatgaagacctctgggcccttatcccagactttctatttcagtggtccatggaagagcctgcaagcttggcttttccatctcaggacttagctgcagggtctcagggcacactgcagagactcgtcatcctgttgcctggaggtgtgcactggctatttgcagatgagccgccatcccgatgactgcccaatcctcggctgcctgtgctccgggtctccattcatttgaccagcaagacccacatccagcagcaaggactccaccgggatgggagcctggtgcttattctcgaactcagcaatccagcagtgcacctggctctgtttccagcctggccaatgatattctaagcatgaattattacatattactaattattaaaaattaaatgtaatatcttga

SEQ ID NO: 5039 - protein, 202 aa, Homo sapiens [sequence omitted]

SEQ ID NO: 5040 - DNA, 416 bp, Homo sapiens
gaactaggattttctacagtatgacccggtgaactaggcttttctacagtgagactcatacgaactaggattttctacagtgtgactcctgtgaactaggcttttctatagtgtgactcctgtgaactaggcttttctacagtgtgactcctacgaattaggcttttctacagtgtgagtcctatgaactaggatttcctacagtgggactcctgcgaactaggcttttctacagcgtgactcgtgtgaactaggattttctacagtgtgactcgtatgaactaggattttctacagtgtgactcatatgaactaggcttttccacagtgtgactcctgtgaactaggcttttcgacagtgtgactcctgtgaactagggttttccacagtgtgactcctgtgaactaggcttttc

SEQ ID NO: 5041 - protein, 30 aa, Homo sapiens
AFLQCESYELGFPTVGLLRTRLFYSVTRVN

SEQ ID NO: 5042 - DNA, 720 bp, Homo sapiens
aaaaaaaaaaagaaaactcggagctctgccaatgctatttggaagaaggtttttcgtgctgttgcttctatcttgttgaaaacgaaatagttgatagtttattttaattgaaacactatttcataatagaatgtacattataaaacagcgcttttattaagaatatttttttcctacaaggataagaatacacttgacagttttcattttcagatactgttatgtccacagctgcaggaatcagtcatttggaactgtctttaaagtgtgtgtcactgaggcatttccatcgtatcgtcgtttgcgctcctagtttcatggggcttgtttctgtttcagctcctgtgtcctaccgacctctccactgtatctgggaattgccaaggagaagagtaccaaggctgctagtgaacagcgactgtaactatgttttcaccaaagaccaacatcaagagtgaggggaaaggatcttcaaggagcaggagcagctgcgcacgggaggcataccccgtggagtgcgctgtgcccaccaagcccggcccccaggtcgctgccgcccccacctgcacacgtgtatgctgcatccagtactcaggtgcgccacgtcctgcgggagctgggtagcatttcattgtaagagtctttgattctgcccactgtaaacatttttctattgtatcataattgtaaatatatttttaaaaaccttggttacttgaa

SEQ ID NO: 5043 - protein, 78 aa, Homo sapiens
MSTAAGISHLELSLKCVSLRHFHRIVVCAPSFMGLVSVSAPVSYRPLHCIWELPRRRVPRLLVNSDCNYVFTKDQHQE

SEQ ID NO: 5044 - DNA, 3641 bp, Homo sapiens
ggcataatgtactcagtattctaagttgtatttgttgatggcgatatgtcgtattactaaagaaagtcttccagagttaaatgtctgtttgtaagttaagtcaccatatatatacatgtttattttttctgcatgtatattaagggatatttgtcttatttagatggagtgctgtaaaattcaagaacagtgcccagcacttcgtgcctggagttccctggggatattctcagggcgatgactgaccattaggaacccccgatgctctcactactccattcctcagtcatgctgttcaagcctgatttccatataaacgggaagccctgtgtgtctccagcttgtgacgctgacttctggggtgctgtcttggctgtcggaggttttagggacttgaggaggaaagggtaactcatgagcgcctattgccgcaccgtcttgtcttgtaggaagccctaggtggagaacagatgctgagggattgggaaggcagagcagtacattctgagttacaggcggggagcctcagggcagatgcatggggcagccggtggggagacaggattcctgaggagacgccagcttcctaattcgctcagggttagctccagtcagtgtcggcttttaacactgctgagactgtgcctgtcgcctgagctttcctcttagctcagacacctgacttttcacccttggtttatatacagagaattccagcttgaacagaggaataatttgggctttattttaatagcagcgattttctgtgacatacatagaacgtcctgatgttaataaccgccacaaagtcccaccaccgaccttcctgcacacattctctcagactcaggctgttcgggccgagctgcagggccacctgggcccggtgactgcggtggagttctgtccctggcgagcaggcaccctcatctcggcgtctgaggacagaggctttaaggtgagggatggacgctggatggcgttcccgcgtggcacgtgctgtggaaagaactgtggtgacgggagctgtgcggttgcttcacggccacggccgcctgagtgatgttgtttctacctcacttctgcaaggcgcccgctatcctgatttccacagaaacgccaagcccggatgttttgccggggccgctggctgggcttggattcctgacaggacggttctgcggccccggatttcccacaactgcattcagggcctgggagcgcccaggcacgaattcttctccacggcattcccaggcccagagcagaagagccagtcccagggtgtggagggttcagtcggcacaaaatgaggctctagaagaaaatggaatgcgaattcagtttttatccagctgacatcagtgtgcgcctgacagtgtagacctgaccagcgagtgtgcacctgacctgacagggtgtagactgctacagtttccgcttggtgcctctatcttggcagcgttgaccaagtgcctgggaactgtttttcaccttgtttcatttttgtttccaattcttcaaatccaccagggttttatttatggaagtgatgttatttttttctttttgattctgacatattttatggtgttactacatttttattatttttgtgctcattttattgttttctgttttagataaccatttgtgttgactaatctgatagtgaatagtactgttagcttcacctgttgcaataatggcaacgttgttacctcttctaaagaatcctgtgtttatccaaaggtctgggaccattgtacaggatcattaatatacagttcatctgtgttatcagcatatcctcttctcagtttattcattgatgcagaaagcaggcagctggtcaccgggtgtgctgacggccaggtgagacagccacagagttaagttccagttcccagacatgcctgaacgtgagcttgtacacaaaggtctttgtcttcatgctactttgtattttcctgcgatttgaaaaaacctgtccacctcagtgctgagaacgtgaccttctgtgggtctcagcgtcactgtgggttcaatatggtcctgggccccccacgtgaccctgaaaacctgctgagaagagggctgtgagcagacgtcccccgctcccacgggtggctgcccgcgccccggagaggcgccctggacggctcctgtgtggcatcccccgtgcccgcacgctgcccgcgccccggagaggcgccctggacggctcctgtgtggcatcccccgtgcccgcacgctgcccgcgccccggagaggcgccctggacggctcctgtgtggcatcccccgtgcttcttgtgctcccctttcctgtcatctttacacactgttgaaaaacctgaagatgttggcctttttcaaaacattttttagctttggatcttcagtttgatggatggacaccattatcgtcgtgtggcacgggttgacctaaggaagaagacagagactttctccacaagaagggttaagtctgggctgtgcagccagccagaagaaagccagcttccctctacaagtgctctgggaaaaggagagcaggttgaagtaacatttcctgtactgagacttgcaccctgtgatctctcactcatcccaaattctgcatgtggatgtctttcttctgagaacacccgatgtgtgtggatcggaagctcagtgggcttattcgtatttaacctggcaaacctggaagtggaagctgctttgtattacaaggatttccagagcctcagcatcctgctggccggatcgtgtgccctgaggaaccgcactgcggatcaaaaggtgctgtgcttgctggcctccctctttggcgggaagattgccgtgttggagatcaacccggccgcgctagtcagggctcagcagtgccccagcatggggcagagcctctcggtgccagccagctcctgtgtcctaccgacctctccactgtatctgggaattgccaaggagaagagtaccaaggctgctagtgaacagcgacgtggtcagtacagggtgctgtgagatctaagaatacaaggctgatgcgttctcattgtggttagggctgctgcattgctttgcgaattcttatgttaaaatatgcattccgtacttccttccatccttctgtccttcatgtctctgcctctcgtgcgtgttccatgtccgctgtggtggggaacttgctgggtgcttcgcctcctgaattggccatcactcatgggattcagcaacgtgcccaagactgaccgctgttcctctggtgcctgttgcagtgggggtgcagagtggaccttcagcaattactgattgtgagaacatttttttccccttttttctctgctgaggaatttgaaagcagatcccgagcgtgtgattgtactcctgcacacttgagtgtgcatttctggaacatgtatgtttttacctagccaccatgacgttatatcaaaaccagtcattttttggaaccttgtattagcaaggccataataaattattcttgattgccttgacaatatttcctattggtttgttctgagcagcagccaaacaaatccacatgttgcatctttcaaatatgtataaattaactttcactttaagatggtaaacgtcattatgttccctttc

SEQ ID NO: 5045 - protein, 206 aa, Homo sapiens [sequence omitted]

SEQ ID NO: 5046 - DNA, 3267 bp, Homo sapiens
gaagttgcattgctcccaggtagcgtcatgctgggtgttaccttagtgctttcctcgatgcgtgatctgagtgactccatggtgcatacacatcatcctgggtgttacctttgtgctttcctcgacgcgtgatccgagtgactccgtggtgcacacgcgtcatgctgggtgttaccttagtgctttccttgacgcgtgatctgaatgctccgcggtgcacacgcatcatgctgggtgttaccttagtgctttccttgacacgtgatctgagtactccgcggtgcacacgcgtcatgctgggtgttaccctagtgctttcctcgacacgtgatccgaatgctccgcggtgcacgcgcgtcatgctgggtgttaccttagtgctttccttgacacgtgatctgagtactccgcggtgcacacgcgtcatgctgggtgttaccctagtgctttcctcgacacgtgatccgaatgctccgcggtgcatgcgcgtcatgctgggtgttaccttagtgctttcctcgacgcgtgatccgagtgactccgtggtgcacacgcgtcatgctgggtgttaccttagtgctttcctcgacgcgtgatccgagtgactccacggtgcacattcactgcagcatctctgtgtggcagtcctcagcctttaaacttgacggatgcatttaagttcacttcttagattctcaataattctgtccctagaagaaagccagcttccctctacaagtgctctgggaaaaggagagcaggttgaagtaacatttcctgtactgagacttgcaccctgtgatctctcactcatcccaaattctgcatgtggatggtaagtatcaaaaactttgcctatgccacataaaggaaacctcttaaattccttagatgaacattaggttcattttctaagaatgactgagataaaaccaaattattttggtctctgattattagtaacttcattcttgggattgcatgttttaaatcttaaagttggtaaacttgggcaatgatacgtaagtgtctttaataaaaggaattggatgatttttaagtttattaccaaagtctaggcagatctttgcctctgtgatacaactttttctttagaaagaggaaatggtgattggaatggcctagactttcccatctaccgctgtgctatacattacacatttaaagttaaccccagactaattttatttatttctgtgctcagtagaaatattattacatatttggcaacataaggaagtactgtttaactgtgattcaagaatatattacaattatgtttacttctcctccccaaaatgcttgagattagggggcaaccttgctttgaatggccttggccgttgcttgtctttgtctctgtgcagagctgcccctggagcagaatattccctgcttggtccaaaccacagagagtaagcagggtgggcatggaggctggacacggtgctcccggtgggtgcatggacctgaggcattttgaggcttccctggcttacctcgagcagagggagccctcagagctaagccagagccacatgacccattctgttgacgatggtcgttgggtgaaccgtggactggtgctggtggatgcccaggaggagcccagggtgctgcctggggcggagctggagaggggaggtctggaaagcaggttccagctgggggcctctgccaagtccatgtccagcctccctggagatggcttctcagtgtattaacagaccccgttggcattggtattaactctgccgcctcgggccagctactttcctcctggagttggttccttattcacagaggtgggcagcttgtgtggccttcaagtctagtcactcggaggctacctgagcagtggccttggcccaggcactggcactgaccttttctgtaaccttagaagaaaatagaaaccacagaggtcagagcgagcgtcttcacagacattagcaggtgcccaggggatcaccacaaatgcgttggtggcacagatgtggccagcctggcacagatgtggttctcactggcaagaacctgccccggcccacgctctccactcctgcggagagctcacagccaggccagggggcgcacgtggggcccaacgcccacgctccccactcctgcggagagctcacagccaggccaaggggcgcacgtggggcccaacgcccacgctccccactcctgcggagagctcacagccaggccagggggcgcacgtggggcccaacgcccacactccccactcctgcggagagctcacagccaggccagggggcgcacgtggggcccaaccttcaggaataagattattgtgtattcttttctttttttccttaaatcagtctttcttctgagaacacccgatgtgtgtggatcggaagctcagtgggcttattcgtatttaacctggcaaacctggaagtggaagctgctttgtattacaaggatttccagagcctcagcatcctgctggccggatcgtgtgccctgaggaaccgcactgcggatcaaaaggtgctgtgcttgctggcctccctctttggcgggaagattgccgtgttggagatcaacccggccgcgctagtcagggctcagcagtgccccagcatggggcagagcctctcggtgccagccagctcctgtgtcctaccgacctctccactgtatctgggaattgccaaggagaagagtaccaaggctgctagtgaacagcgacgtggtcagtacagggtgctgtgagatctaagaatacaaggctgatgcgttctcattgtggttagggctgctgcattgctttgcgaattcttatgttaaaatatgcattccgtacttccttccatccttctgtccttcatgtctctgcctctcgtgcgtgttccatgtccgctgtggtggggaacttgctgggtgcttcgcctcctgaattggccatcactcatgggattcagcaacgtgcccaagactgaccgctgttcctctggtgcctgttgcagtgggggtgcagagtggaccttcagcaattactgattgtgagaacatttttttccccttttttctctgctgaggaatttgaaagcagatcccgagcgtgtgattgtactcctgcacacttgagtgtgcatttctggaacatgtatgtttttacctagccaccatgacgttatatcaaaaccagtcattttttggaaccttgtattagcaaggccataataaattattcttgattgccttgacaat

SEQ ID NO: 5047 - protein, 161 aa, Homo sapiens
MWFSLARTCPGPRSPLLRRAHSQARGRTWGPTPTLPTPAESSQPGQGAHVGPNAHAPHSCGELTARPGGARGAQRPHSPLLRRAHSQARGRTWGPTFRNKIIVYSFLFFLKSVFLLRTPDVCGSEAQWAYSYLTWQTWKWKLLCITRISRASASCWPDRVP

SEQ ID NO: 5048 - DNA, 1357 bp, Homo sapiens
attaattatatggaattactgttcggttgccaagaacaatgatacacttgatctttgatttcatttatagtttaattaggatatgtagtatttttcaatattcatttatctaatgctcctaaattactgacagtttagagtaagttttaaatgaaatgacatcctaggcaacaatttttttttaaggaaacaagacatccatttacttgctgttttcatcactaagtccataattttattatttctggctgactcaggaatccttctgctccaagtgcaacgtcgattaaacggcagtgctgccctccctctaggctataaagcagccggagctgggccgtggtttaagcccaccaggccttctgtcgggaggtgggatgggattcctcgggacccatctgtggtggactcaccgggcagccttttggggtgatgtccccagccttcattgtgtttatggggttttcaacatttgtattcatgtgcaagttttactttttggtgaagaaattattttggaatagttcaaacttgactaacagaaatactgtaagtaaatattacgtgtaaagagataagtaaaactgacagttctcgggttaattggtaccaggcacttacaaagctaaattttccgatgttcctttcaccagcatatcctcttctcagtttattcattgatgcagaaagcaggcagctggtctcctgcgcattgcagatgccacatgcacccacccagcaaccttgtcctcacctggtctctggctgtccagagttgcttcctgttgacgacagctctcctcagaagagtaccaaggctgctagtgaacagcgacgtggtcagtacagggtgctgtgagatctaagaatacaaggctgatgcgttctcattgtggttagggctgctgcattgctttgcgaattcttatgttaaaatatgcattccgtacttccttccatccttctgtccttcatgtctctgcctctcgtgcgtgttccatgtccgctgtggtggggaacttgctgggtgcttcgcctcctgaattggccatcactcatgggattcagcaacgtgcccaagactgaccgctgttcctctggtgcctgttgcagtgggggtgcagagtggaccttcagcaattactgattgtgagaacatttttttccccttttttctctgctgaggaatttgaaagcagatcccgagcgtgtgattgtactcctgcacacttgagtgtgcatttctggaacatgtatgtttttacctagccaccatgacgttatatcaaaaccagtcattttttggaaccttgtattagcaaggccataataaattattcttgattgccttgacaat

SEQ ID NO: 5049 - protein, 73 aa, Homo sapiens
MFLSPAYPLLSLFIDAESRQLVSCALQMPHAPTQQPCPHLVSGCPELLPVDDSSPQKSTKAASEQRRGQYRVL

SEQ ID NO: 5050 - DNA, 223 bp, Homo sapiens
tggagggcccgtcctgtgacgtgtctgccctccctgctccacctctggtgttgctgcttctgcgtcaggacccttgctgcagcgccatgtctgcatcttctttgcttttgtagctttggatcttcagtttgatggatggacaccatgacgttatatcaaaaccagtcattttttggaaccttgtattagcaaggccataataaattattcttgattgccttga

SEQ ID NO: 5051 - protein, 42 aa, Homo sapiens
RVCPPCSTSGVAASASGPLLQRHVCIFFAFVALDLQFDGWTP

SEQ ID NO: 5052 - DNA, 418 bp, Homo sapiens
ctcacgctgggagctgtagaccggagctgttcctattcggccatcttggctcctcgatcctgaatcatgtaaaaggcactggggatacagcaatgagaaaatgaagaataagaacaataattactcatgcaattagaacagtatcacttgctattactgctgagagtatccctaatcatctatttactgaactgttactaagattctactttggactatgctttgtattgggcacagatgctacaatggcagacaaggtctaaaccctactgggaagaaggtatgtggcctaatgtaaggtttccaggcctgaatatcctgagaaacccataagatttattaaattgtaatatttacagttctacccaaggtatttgtattaaaagaaaataaaaatgtaaaaaaaaattccagatga

SEQ ID NO: 5053 - protein, 31 aa, Homo sapiens
MLQWQTRSKPYWEEGMWPNVRFPGLNILRNP

SEQ ID NO: 5054 - DNA, 2807 bp, Homo sapiens
gcactctgggtaaagccagctgccatgtcataaggagatcaagcagctccacagaaaagtcagcatggcaaggagctaaggctttctgccgatagcctctgagggactgaggcctccagccaacagccacgcaaatgagccatcatggaatcagatcagcccaagttaaaccttcagcttcttggtgatggcttacctgaatcatcatgacagactcagtcagagtcacctggccctgaatccttgacccacagaaactgtgagctaataaatgtgtgttgttttgagctgctaaacaaaaagatctcagtgaccagctgctggaggtggtcggcttggaaggagccatggagatggggcaaatatacacaggcctgaaaagtgctggccggcggctggctcagtgctcctgcgtggtcatcaggacgagcaagtctctgccaatgcaaattgatggggagccatggatgcagaccccatgcacaataaaaattacacacaagaaccaagccccaatgctgatgggcccgcctccaaaaaccggtttattctgctccctcgtcaaaaggacaagaaaccgaagcaaggaataatcctgtgttgtttcactcttagaaattgaattagcataattgggccatggaacacatatgctggaaatctttgaaccatttcaagtctcctgctcatgcaaaatcatggaagtggtttaacagtttttgttactaagctaatgtaaaattcagctattagaaaatttattgtctcagtttttataggcatctttgcatgaagaaagcagaagtttacctgaagtgatactgcatatttttggtgcatgcattcccatagatttttacatctcccacccaactcttccccaatttccttttactaacctgtgagaaaaacccgtgaaacatgaaaaaggaaataccatgggaaacgtgattctcagtgtgattccaattattacgaagcactaatcagtaacgctacaatgatcataattgcagattgctatacgtttcccttttagaatcagtgtatcagtgacctatgacttgaggagaaacttttaattcgaagattttattaaatagttgactacaataccttgctatatatacatagtttttcttcaacatcttaactcttctgagtggaaataaaaatatcaggcataaggttttctcatgctgaaaaatagaacgcggtttttattttgcttagttttctttttaattccagaaataagtgaaaacatgttacttgacagtcaagtgtggtaatatggcaagccttgttcctttctgcatgagaatctaggagagaattcataaccacaccaataacgaaatagaagttttaaactatgtgcctaatcaatgtgtttcccaccaaagattcagaaaacaatgcttgagagaaatgggttaatgcataattaattaagcattgtggagcaaatttagggttcctgtgattaattttgtgatgactaaaatgctggaaagcgagtgagttgcccattaattatgattaaaattctcacctttcacagacagacaataagccagacaacacaatcaaagctcaatagatgatttcttgcttttttcagtcatttataaatataggtgtaatttttcatggatcagttaagtacacttgaaggaagtaaatgattgtatcagtttatttctagtataaatgggtacctgtaataatactgagctcttggaagcgaatcatgcatgcaattagctccctcctcctcacctactccactcccatctttatgacatttcaaatgtttatttggaaacaacagcctagatcactgttgaaggtgttcatggcatagttggagtctctgactgtttaaagaaatcacagaacagtacttttcttttagtgtttcattaagcctatgatgtaaaatgaaatgcttctgagcagtcttgtaatattgttcattcatattgacctgcatctcatcattgcatgttttatgttttcaaacatgccataaggaaaacgagtgcctgaactgcatgatttattagtttctctccactctgcattaaagtgctaatgatttatcggttctattttgttattgattcattcatctttctttgaataacaaatagcatttagtgattctgttgaacacaatcctgtgcatggatttatggatttcaagtgaaattgctataattttagttctttggtttgaaaactcaactgaatgctgttatatcaaatagctgctctcaagcaatgtgctataatggaagattacgtacaaagtgtattcttttagtgttcctggaacattggacggtaaatatcaatcaacaataagcttaattactttaaaaataaaagcttttgaataaaattaagacataatttagcattcccaggaaaattatgattacaattgcaaatttagtacagcaatcacttgcgctggtataaaataaaaaagttgtttggcagaagagtaatccagaccaaaagaaagaaagaaatctcaaaacagtaacaagtacattactgacataatgttacgtaacacacacattgattttttgtatctatggttgcaggtaataaatattttcacatgaattgacaaaattttctacaatgggcaggcaggctttgtgtcaaaaacatattttgaagccacaaattattttatgttcgctacaacatacaattatgtcttggctaccttttatagtatatagtttgaaggcagcaacagtttgtgaatcattcttaacaatctgtac

SEQ ID NO: 5055 - protein, 81 aa, Homo sapiens
MEMGQIYTGLKSAGRRLAQCSCVVIRTSKSLPMQIDGEPWMQTPCTIKITHKNQAPMLMGPPPKTGLFCSLVKRTRNRSKE

SEQ ID NO: 5056 - DNA, 5051 bp, Homo sapiens
ttccaatgggccgggtgttctggaagggggtggcagtggggaggaggatgctgtgagcagagttcttgaagctccactcctctggggaagccgagctgtgtgggagccttcttactgtgccgggagcgtgtgaattggaaaggatcctgagaactggctagtcccagttcctctccggaaaagcagtggctctcgcttcagagatgcgctcagctttcgcctgcatcacactgcattctttaacacattattgaaattacaagcatccaaagcagtttcatgtggacagattgcatattttgaaagcctgaggtattttatcatgaaacatgccatgtggaatctttgaagcatagacctctgcgcaacacctgaataaagaatcttttacctggtatgtgacagagcttctcaccaccaccatgacaaaccaggaaaaatgggcccacctcagcccttcggaattttcccaacttcagaaatatgctgagtattctacaaagaaattaaaggatgttcttgaagaattccatggtaatggtgtgcttgcaaagtataatcctgaagggaaacaagacattcttaaccaaacaatagattttgaaggtttcaaactattcatgaagacattcctggaagccgagcttcctgatgatttcactgcacaccttttcatgtcatttagcaacaagtttcctcattctagtccaatggtaaaaagtaagcctgctctcctatcaggcggtctgagaatgaataaaggtgccatcacccctccccggactacttctcctgcaaatacgtgttccccagaagtaatccatctgaaggacattgtctgttacctgtctctgcttgaaagaggaagacctgaggataagcttgagtttatgtttcgcctttatgacacggatgggaatggcttcctggacagctcggagctagaaaatatcatcagtcagatgatgcatgttgcagaataccttgagtgggatgtcactgaacttaatccaatcctccatgaaatgatggaagaaattgactatgatcatgatggaaccgtgtctctggaggaatggattcaaggaggaatgacaacgattccacttcttgtgctcctgggcttagaaaataacgtgaaggatgatggacagcacgtgtggcgactgaagcactttaacaaacctgcctattgcaacctttgcctgaacatgctgattggcgtggggaagcagggcctctgctgttccttctgcaagtacacagtccatgagcgctgtgtggctcgagcacctccctcttgcatcaagacctatgtgaagtccaaaaggaacactgatgtcatgcaccattactgggttgaaggtaactgcccaaccaagtgtgataagtgccacaaaactgttaaatgttaccagggcctgacaggactgcattgtgtttggtgtcagatcacactgcataataaatgtgcttctcatctaaaacctgaatgtgactgtggacctttgaaggaccatattttaccacccacaacaatctgtccagtggtactgcagactctgcccacttcaggagtttcagttcctgaggaaagacaatcaacagtgaaaaaggaaaagagtggttcccagcagccaaacaaagtgattgacaagaataaaatgcaaagagccaactctgttactgtagatggacaaggcctgcaggtcactcctgtgcctggtactcacccacttttagtttttgtgaaccccaaaagtggtggaaaacaaggagaacgaatttacagaaaattccagtatctattaaatcctcgtcaggtttacagtctttctggaaatggaccaatgccagggttaaactttttccgtgatgttcctgacttcagagtgttagcctgtggtggagatggaaccgtgggctgggttttggattgcatagaaaaggccaatgtaggcaagcatcctccagttgcgattctgcctcttgggactggcaatgatctagcaagatgcctgcgatggggaggaggttacgaaggtgagaatctgatgaaaattctaaaagacattgaaaacagcacagaaatcatgttggacaggtggaagtttgaagtcatacctaatgacaaagatgagaaaggagacccagtgccttacagtatcatcaataattacttttccattggcgtggatgcctccattgcacacagattccacatcatgagagaaaaacacccagagaaattcaacagtagaatgaagaacaaattttggtattttgagtttggcacatctgaaactttctcagccacctgcaagaagctacatgaatctgtagaaatagaatgtgatggagtacagatagatttaataaacatctctctggaaggaattgctattttgaatataccaagcatgcatggaggatccaatctttggggagagtctaagaaaagacgaagccatcgacgaatagagaaaaaagggtctgacaaaaggaccaccgtcacagatgccaaagagttgaagtttgcaagtcaagatctcagtgaccagctgctggaggtggtcggcttggaaggagccatggagatggggcaaatatacacaggcctgaaaagtgctggccggcggctggctcagtgctcctgcgtggtcatcaggacgagcaagtctctgccaatgcaaattgatggggagccatggatgcagaccccatgcacaataaaaattacacacaagaaccaagccccaatgctgatgggcccgcctccaaaaaccggtttattctgctccctcgtcaaaaggacaagaaaccgaagcaaggaataatcctgtgttgtttcactcttagaaattgaattagcataattgggccatggaacacatatgctggaaatctttgaaccatttcaagtctcctgctcatgcaaaatcatggaagtggtttaacagtttttgttactaagctaatgtaaaattcagctattagaaaatttattgtctcagtttttataggcatctttgcatgaagaaagcagaagtttacctgaagtgatactgcatatttttggtgcatgcattcccatagatttttacatctcccacccaactcttccccaatttccttttactaacctgtgagaaaaacccgtgaaacatgaaaaaggaaataccatgggaaacgtgattctcagtgtgattccaattattacgaagcactaatcagtaacgctacaatgatcataattgcagattgctatacgtttcccttttagaatcagtgtatcagtgacctatgacttgaggagaaacttttaattcgaagattttattaaatagttgactacaataccttgctatatatacatagtttttcttcaacatcttaactcttctgagtggaaataaaaatatcaggcataaggttttctcatgctgaaaaatagaacgcggtttttattttgcttagttttctttttaattccagaaataagtgaaaacatgttacttgacagtcaagtgtggtaatatggcaagccttgttcctttctgcatgagaatctaggagagaattcataaccacaccaataacgaaatagaagttttaaactatgtgcctaatcaatgtgtttcccaccaaagattcagaaaacaatgcttgagagaaatgggttaatgcataattaattaagcattgtggagcaaatttagggttcctgtgattaattttgtgatgactaaaatgctggaaagcgagtgagttgcccattaattatgattaaaattctcacctttcacagacagacaataagccagacaacacaatcaaagctcaatagatgatttcttgcttttttcagtcatttataaatataggtgtaatttttcatggatcagttaagtacacttgaaggaagtaaatgattgtatcagtttatttctagtataaatgggtacctgtaataatactgagctcttggaagcgaatcatgcatgcaattagctccctcctcctcacctactccactcccatctttatgacatttcaaatgtttatttggaaacaacagcctagatcactgttgaaggtgttcatggcatagttggagtctctgactgtttaaagaaatcacagaacagtacttttcttttagtgtttcattaagcctatgatgtaaaatgaaatgcttctgagcagtcttgtaatattgttcattcatattgacctgcatctcatcattgcatgttttatgttttcaaacatgccataaggaaaacgagtgcctgaactgcatgatttattagtttctctccactctgcattaaagtgctaatgatttatcggttctattttgttattgattcattcatctttctttgaataacaaatagcatttagtgattctgttgaacacaatcctgtgcatggatttatggatttcaagtgaaattgctataattttagttctttggtttgaaaactcaactgaatgctgttatatcaaatagctgctctcaagcaatgtgctataatggaagattacgtacaaagtgtattcttttagtgttcctggaacattggacggtaaatatcaatcaacaataagcttaattactttaaaaataaaagcttttgaataaaattaagacataatttagcattcccaggaaaattatgattacaattgcaaatttagtacagcaatcacttgcgctggtataaaataaaaaagttgtttggcagaagagtaatccagaccaaaagaaagaaagaaatctcaaaacagtaacaagtacattactgacataatgttacgtaacacacacattgattttttgtatctatggttgcaggtaataaatattttcacatgaattgacaaaattttctacaatgggcaggcaggctttgtgtcaaaaacatattttgaagccacaaattattttatgttcgctacaacatacaattatgtcttggctaccttttatagtatatagtttgaaggcagcaacagtttgtgaatcattcttaacaatctgtac

SEQ ID NO: 5057 - protein, 804 aa, Homo sapiens [sequence omitted]

SEQ ID NO: 5058 - DNA, 5344 bp, Homo sapiens
agtcacctgctccgaggttaccaagccggaatgcagcaagagcgtctgcagctgctacaattggtagaagtggcttcggcagatggttgctgaacaatgacccaccaaggactacagttgtagaagggagaggggagacgggtatcatatttcctccctgagatgtatagtgagtggtagtaattgcagtgaatccagctcactgtctcaacagcctctcacctgcaccgtctcctcccctgtcttataactggaccagcagttaaacagctgtatagccttgtctccctgtctcattttcccctgagctccatcagcaagagtagcaatagcagctggagaagcggcagccagagataggcagggctggtgcttgcagccgcgcaaatcgcctcctcctcaacacacacacacacacacacacacacacacacacacacacactgcacagacttccaatatcaacgcgtcttgacataaatcaaggactaagagagactgaagaagagcgttagtcatggacaacagttctttaacacattattgaaattacaagcatccaaagcagtttcatgtggacagattgcatattttgaaagcctgaggtattttatcatgaaacatgccatgtggaatctttgaagcatagacctctgcgcaacacctgaataaagaatcttttacctggtatgtgacagagcttctcaccaccaccatgacaaaccaggaaaaatgggcccacctcagcccttcggaattttcccaacttcagaaatatgctgagtattctacaaagaaattaaaggatgttcttgaagaattccatggtaatggtgtgcttgcaaagtataatcctgaagggaaacaagacattcttaaccaaacaatagattttgaaggtttcaaactattcatgaagacattcctggaagccgagcttcctgatgatttcactgcacaccttttcatgtcatttagcaacaagtttcctcattctagtccaatggtaaaaagtaagcctgctctcctatcaggcggtctgagaatgaataaaggtgccatcacccctccccggactacttctcctgcaaatacgtgttccccagaagtaatccatctgaaggacattgtctgttacctgtctctgcttgaaagaggaagacctgaggataagcttgagtttatgtttcgcctttatgacacggatgggaatggcttcctggacagctcggagctagaaaatatcatcagtcagatgatgcatgttgcagaataccttgagtgggatgtcactgaacttaatccaatcctccatgaaatgatggaagaaattgactatgatcatgatggaaccgtgtctctggaggaatggattcaaggaggaatgacaacgattccacttcttgtgctcctgggcttagaaaataacgtgaaggatgatggacagcacgtgtggcgactgaagcactttaacaaacctgcctattgcaacctttgcctgaacatgctgattggcgtggggaagcagggcctctgctgttccttctgcaagtacacagtccatgagcgctgtgtggctcgagcacctccctcttgcatcaagacctatgtgaagtccaaaaggaacactgatgtcatgcaccattactgggttgaaggtaactgcccaaccaagtgtgataagtgccacaaaactgttaaatgttaccagggcctgacaggactgcattgtgtttggtgtcagatcacactgcataataaatgtgcttctcatctaaaacctgaatgtgactgtggacctttgaaggaccatattttaccacccacaacaatctgtccagtggtactgcagactctgcccacttcaggagtttcagttcctgaggaaagacaatcaacagtgaaaaaggaaaagagtggttcccagcagccaaacaaagtgattgacaagaataaaatgcaaagagccaactctgttactgtagatggacaaggcctgcaggtcactcctgtgcctggtactcacccacttttagtttttgtgaaccccaaaagtggtggaaaacaaggagaacgaatttacagaaaattccagtatctattaaatcctcgtcaggtttacagtctttctggaaatggaccaatgccagggttaaactttttccgtgatgttcctgacttcagagtgttagcctgtggtggagatggaaccgtgggctgggttttggattgcatagaaaaggccaatgtaggcaagcatcctccagttgcgattctgcctcttgggactggcaatgatctagcaagatgcctgcgatggggaggaggttacgaaggtgagaatctgatgaaaattctaaaagacattgaaaacagcacagaaatcatgttggacaggtggaagtttgaagtcatacctaatgacaaagatgagaaaggagacccagtgccttacagtatcatcaataattacttttccattggcgtggatgcctccattgcacacagattccacatcatgagagaaaaacacccagagaaattcaacagtagaatgaagaacaaattttggtattttgagtttggcacatctgaaactttctcagccacctgcaagaagctacatgaatctgtagaaatagaatgtgatggagtacagatagatttaataaacatctctctggaaggaattgctattttgaatataccaagcatgcatggaggatccaatctttggggagagtctaagaaaagacgaagccatcgacgaatagagaaaaaagggtctgacaaaaggaccaccgtcacagatgccaaagagttgaagtttgcaagtcaagatctcagtgaccagctgctggaggtggtcggcttggaaggagccatggagatggggcaaatatacacaggcctgaaaagtgctggccggcggctggctcagtgctcctgcgtggtcatcaggacgagcaagtctctgccaatgcaaattgatggggagccatggatgcagaccccatgcacaataaaaattacacacaagaaccaagccccaatgctgatgggcccgcctccaaaaaccggtttattctgctccctcgtcaaaaggacaagaaaccgaagcaaggaataatcctgtgttgtttcactcttagaaattgaattagcataattgggccatggaacacatatgctggaaatctttgaaccatttcaagtctcctgctcatgcaaaatcatggaagtggtttaacagtttttgttactaagctaatgtaaaattcagctattagaaaatttattgtctcagtttttataggcatctttgcatgaagaaagcagaagtttacctgaagtgatactgcatatttttggtgcatgcattcccatagatttttacatctcccacccaactcttccccaatttccttttactaacctgtgagaaaaacccgtgaaacatgaaaaaggaaataccatgggaaacgtgattctcagtgtgattccaattattacgaagcactaatcagtaacgctacaatgatcataattgcagattgctatacgtttcccttttagaatcagtgtatcagtgacctatgacttgaggagaaacttttaattcgaagattttattaaatagttgactacaataccttgctatatatacatagtttttcttcaacatcttaactcttctgagtggaaataaaaatatcaggcataaggttttctcatgctgaaaaatagaacgcggtttttattttgcttagttttctttttaattccagaaataagtgaaaacatgttacttgacagtcaagtgtggtaatatggcaagccttgttcctttctgcatgagaatctaggagagaattcataaccacaccaataacgaaatagaagttttaaactatgtgcctaatcaatgtgtttcccaccaaagattcagaaaacaatgcttgagagaaatgggttaatgcataattaattaagcattgtggagcaaatttagggttcctgtgattaattttgtgatgactaaaatgctggaaagcgagtgagttgcccattaattatgattaaaattctcacctttcacagacagacaataagccagacaacacaatcaaagctcaatagatgatttcttgcttttttcagtcatttataaatataggtgtaatttttcatggatcagttaagtacacttgaaggaagtaaatgattgtatcagtttatttctagtataaatgggtacctgtaataatactgagctcttggaagcgaatcatgcatgcaattagctccctcctcctcacctactccactcccatctttatgacatttcaaatgtttatttggaaacaacagcctagatcactgttgaaggtgttcatggcatagttggagtctctgactgtttaaagaaatcacagaacagtacttttcttttagtgtttcattaagcctatgatgtaaaatgaaatgcttctgagcagtcttgtaatattgttcattcatattgacctgcatctcatcattgcatgttttatgttttcaaacatgccataaggaaaacgagtgcctgaactgcatgatttattagtttctctccactctgcattaaagtgctaatgatttatcggttctattttgttattgattcattcatctttctttgaataacaaatagcatttagtgattctgttgaacacaatcctgtgcatggatttatggatttcaagtgaaattgctataattttagttctttggtttgaaaactcaactgaatgctgttatatcaaatagctgctctcaagcaatgtgctataatggaagattacgtacaaagtgtattcttttagtgttcctggaacattggacggtaaatatcaatcaacaataagcttaattactttaaaaataaaagcttttgaataaaattaagacataatttagcattcccaggaaaattatgattacaattgcaaatttagtacagcaatcacttgcgctggtataaaataaaaaagttgtttggcagaagagtaatccagaccaaaagaaagaaagaaatctcaaaacagtaacaagtacattactgacataatgttacgtaacacacacattgattttttgtatctatggttgcaggtaataaatattttcacatgaattgacaaaattttctacaatgggcaggcaggctttgtgtcaaaaacatattttgaagccacaaattattttatgttcgctacaacatacaattatgtcttggctaccttttatagtatatagtttgaaggcagcaacagtttgtgaatcattcttaacaatctgtac

SEQ ID NO: 5059 - protein, 804 aa, Homo sapiens [sequence omitted]

SEQ ID NO: 5060 - DNA, 4898 bp, Homo sapiens
acataaattagtaccttactggctagggaatgttgaatcacagttggatgaagaaacaattcatgttaatgtttctctaaagttctttaacacattattgaaattacaagcatccaaagcagtttcatgtggacagattgcatattttgaaagcctgaggtattttatcatgaaacatgccatgtggaatctttgaagcatagacctctgcgcaacacctgaataaagaatcttttacctggtatgtgacagagcttctcaccaccaccatgacaaaccaggaaaaatgggcccacctcagcccttcggaattttcccaacttcagaaatatgctgagtattctacaaagaaattaaaggatgttcttgaagaattccatggtaatggtgtgcttgcaaagtataatcctgaagggaaacaagacattcttaaccaaacaatagattttgaaggtttcaaactattcatgaagacattcctggaagccgagcttcctgatgatttcactgcacaccttttcatgtcatttagcaacaagtttcctcattctagtccaatggtaaaaagtaagcctgctctcctatcaggcggtctgagaatgaataaaggtgccatcacccctccccggactacttctcctgcaaatacgtgttccccagaagtaatccatctgaaggacattgtctgttacctgtctctgcttgaaagaggaagacctgaggataagcttgagtttatgtttcgcctttatgacacggatgggaatggcttcctggacagctcggagctagaaaatatcatcagtcagatgatgcatgttgcagaataccttgagtgggatgtcactgaacttaatccaatcctccatgaaatgatggaagaaattgactatgatcatgatggaaccgtgtctctggaggaatggattcaaggaggaatgacaacgattccacttcttgtgctcctgggcttagaaaataacgtgaaggatgatggacagcacgtgtggcgactgaagcactttaacaaacctgcctattgcaacctttgcctgaacatgctgattggcgtggggaagcagggcctctgctgttccttctgcaagtacacagtccatgagcgctgtgtggctcgagcacctccctcttgcatcaagacctatgtgaagtccaaaaggaacactgatgtcatgcaccattactgggttgaaggtaactgcccaaccaagtgtgataagtgccacaaaactgttaaatgttaccagggcctgacaggactgcattgtgtttggtgtcagatcacactgcataataaatgtgcttctcatctaaaacctgaatgtgactgtggacctttgaaggaccatattttaccacccacaacaatctgtccagtggtactgcagactctgcccacttcaggagtttcagttcctgaggaaagacaatcaacagtgaaaaaggaaaagagtggttcccagcagccaaacaaagtgattgacaagaataaaatgcaaagagccaactctgttactgtagatggacaaggcctgcaggtcactcctgtgcctggtactcacccacttttagtttttgtgaaccccaaaagtggtggaaaacaaggagaacgaatttacagaaaattccagtatctattaaatcctcgtcaggtttacagtctttctggaaatggaccaatgccagggttaaactttttccgtgatgttcctgacttcagagtgttagcctgtggtggagatggaaccgtgggctgggttttggattgcatagaaaaggccaatgtaggcaagcatcctccagttgcgattctgcctcttgggactggcaatgatctagcaagatgcctgcgatggggaggaggttacgaaggtgagaatctgatgaaaattctaaaagacattgaaaacagcacagaaatcatgttggacaggtggaagtttgaagtcatacctaatgacaaagatgagaaaggagacccagtgccttacagtatcatcaataattacttttccattggcgtggatgcctccattgcacacagattccacatcatgagagaaaaacacccagagaaattcaacagtagaatgaagaacaaattttggtattttgagtttggcacatctgaaactttctcagccacctgcaagaagctacatgaatctgtagaaatagaatgtgatggagtacagatagatttaataaacatctctctggaaggaattgctattttgaatataccaagcatgcatggaggatccaatctttggggagagtctaagaaaagacgaagccatcgacgaatagagaaaaaagggtctgacaaaaggaccaccgtcacagatgccaaagagttgaagtttgcaagtcaagatctcagtgaccagctgctggaggtggtcggcttggaaggagccatggagatggggcaaatatacacaggcctgaaaagtgctggccggcggctggctcagtgctcctgcgtggtcatcaggacgagcaagtctctgccaatgcaaattgatggggagccatggatgcagaccccatgcacaataaaaattacacacaagaaccaagccccaatgctgatgggcccgcctccaaaaaccggtttattctgctccctcgtcaaaaggacaagaaaccgaagcaaggaataatcctgtgttgtttcactcttagaaattgaattagcataattgggccatggaacacatatgctggaaatctttgaaccatttcaagtctcctgctcatgcaaaatcatggaagtggtttaacagtttttgttactaagctaatgtaaaattcagctattagaaaatttattgtctcagtttttataggcatctttgcatgaagaaagcagaagtttacctgaagtgatactgcatatttttggtgcatgcattcccatagatttttacatctcccacccaactcttccccaatttccttttactaacctgtgagaaaaacccgtgaaacatgaaaaaggaaataccatgggaaacgtgattctcagtgtgattccaattattacgaagcactaatcagtaacgctacaatgatcataattgcagattgctatacgtttcccttttagaatcagtgtatcagtgacctatgacttgaggagaaacttttaattcgaagattttattaaatagttgactacaataccttgctatatatacatagtttttcttcaacatcttaactcttctgagtggaaataaaaatatcaggcataaggttttctcatgctgaaaaatagaacgcggtttttattttgcttagttttctttttaattccagaaataagtgaaaacatgttacttgacagtcaagtgtggtaatatggcaagccttgttcctttctgcatgagaatctaggagagaattcataaccacaccaataacgaaatagaagttttaaactatgtgcctaatcaatgtgtttcccaccaaagattcagaaaacaatgcttgagagaaatgggttaatgcataattaattaagcattgtggagcaaatttagggttcctgtgattaattttgtgatgactaaaatgctggaaagcgagtgagttgcccattaattatgattaaaattctcacctttcacagacagacaataagccagacaacacaatcaaagctcaatagatgatttcttgcttttttcagtcatttataaatataggtgtaatttttcatggatcagttaagtacacttgaaggaagtaaatgattgtatcagtttatttctagtataaatgggtacctgtaataatactgagctcttggaagcgaatcatgcatgcaattagctccctcctcctcacctactccactcccatctttatgacatttcaaatgtttatttggaaacaacagcctagatcactgttgaaggtgttcatggcatagttggagtctctgactgtttaaagaaatcacagaacagtacttttcttttagtgtttcattaagcctatgatgtaaaatgaaatgcttctgagcagtcttgtaatattgttcattcatattgacctgcatctcatcattgcatgttttatgttttcaaacatgccataaggaaaacgagtgcctgaactgcatgatttattagtttctctccactctgcattaaagtgctaatgatttatcggttctattttgttattgattcattcatctttctttgaataacaaatagcatttagtgattctgttgaacacaatcctgtgcatggatttatggatttcaagtgaaattgctataattttagttctttggtttgaaaactcaactgaatgctgttatatcaaatagctgctctcaagcaatgtgctataatggaagattacgtacaaagtgtattcttttagtgttcctggaacattggacggtaaatatcaatcaacaataagcttaattactttaaaaataaaagcttttgaataaaattaagacataatttagcattcccaggaaaattatgattacaattgcaaatttagtacagcaatcacttgcgctggtataaaataaaaaagttgtttggcagaagagtaatccagaccaaaagaaagaaagaaatctcaaaacagtaacaagtacattactgacataatgttacgtaacacacacattgattttttgtatctatggttgcaggtaataaatattttcacatgaattgacaaaattttctacaatgggcaggcaggctttgtgtcaaaaacatattttgaagccacaaattattttatgttcgctacaacatacaattatgtcttggctaccttttatagtatatagtttgaaggcagcaacagtttgtgaatcattcttaacaatctgtac

SEQ ID NO: 5061 - protein, 804 aa, Homo sapiens [sequence omitted]

SEQ ID NO: 5062 - DNA, 3576 bp, Homo sapiens
ttccaatgggccgggtgttctggaagggggtggcagtggggaggaggatgctgtgagcagagttcttgaagctccactcctctggggaagccgagctgtgtgggagccttcttactgtgccgggagcgtgtgaattggaaaggatcctgagaactggctagtcccagttcctctccggaaaagcagtggctctcgcttcagagatgcgctcagctttcgcctgcatcacactgcattctttaacacattattgaaattacaagcatccaaagcagtttcatgtggacagattgcatattttgaaagcctgaggtattttatcatgaaacatgccatgtggaatctttgaagcatagacctctgcgcaacacctgaataaagaatcttttacctggtatgtgacagagcttctcaccaccaccatgacaaaccaggaaaaatgggcccacctcagcccttcggaattttcccaacttcagaaatatgctgagtattctacaaagaaattaaaggatgttcttgaagaattccatggtaatggtgtgcttgcaaagtataatcctgaagggaaacaagacattcttaaccaaacaatagattttgaaggtttcaaactattcatgaagacattcctggaagccgagcttcctgatgatttcactgcacaccttttcatgtcatttagcaacaagtttcctcattctagtccaatggtaaaaagtaagcctgctctcctatcaggcggtctgagaatgaataaaggtgccatcacccctccccggactacttctcctgcaaatacgtgttccccagaagtaatccatctgaaggacattgtctgttacctgtctctgcttgaaagaggaagacctgaggataagcttgagtttatgtttcgcctttatgacacggatgggaatggcttcctggacagctcggagctagaaaatatcatcagtcagatgatgcatgttgcagaataccttgagtgggatgtcactgaacttaatccaatcctccatgaaatgatggaagaaattgactatgatcatgatggaaccgtgtctctggaggaatggattcaaggaggaatgacaacgattccacttcttgtgctcctgggcttagaaaataacgtgaaggatgatggacagcacgtgtggcgactgaagcactttaacaaacctgcctattgcaacctttgcctgaacatgctgattggcgtggggaagcagggcctctgctgttccttctgcaagtacacagtccatgagcgctgtgtggctcgagcacctccctcttgcatcaagacctatgtgaagtccaaaaggaacactgatgtcatgcaccattactgggttgaaggtaactgcccaaccaagtgtgataagtgccacaaaactgttaaatgttaccagggcctgacaggactgcattgtgtttggtgtcagatcacactgcataataaatgtgcttctcatctaaaacctgaatgtgactgtggacctttgaaggaccatattttaccacccacaacaatctgtccagtggtactgcagactctgcccacttcaggagtttcagttcctgaggaaagacaatcaacagtgaaaaaggaaaagagtggttcccagcagccaaacaaagtgattgacaagaataaaatgcaaagagccaactctgttactgtagatggacaaggcctgcaggtcactcctgtgcctggtactcacccacttttagtttttgtgaaccccaaaagtggtggaaaacaaggagaacgaatttacagaaaattccagtatctattaaatcctcgtcaggtttacagtctttctggaaatggaccaatgccagggttaaactttttccgtgatgttcctgacttcagagtgttagcctgtggtggagatggaaccgtgggctgggttttggattgcatagaaaaggccaatgtaggcaagcatcctccagttgcgattctgcctcttgggactggcaatgatctagcaagatgcctgcgatggggaggaggttacgaaggtgagaatctgatgaaaattctaaaagacattgaaaacagcacagaaatcatgttggacaggtggaagtttgaagtcatacctaatgacaaagatgagaaaggagacccagtgccttacagtatcatcaataattacttttccattggcgtggatgcctccattgcacacagattccacatcatgagagaaaaacacccagagaaattcaacagtagaatgaagaacaaattttggtattttgagtttggcacatctgaaactttctcagccacctgcaagaagctacatgaatctgtagaaatagaatgtgatggagtacagatagatttaataaacatctctctggaaggaattgctattttgaatataccaagcatgcatggaggatccaatctttggggagagtctaagaaaagacgaagccatcgacgaatagagaaaaaagggtctgacaaaaggaccaccgtcacagatgccaaagagttgaagtttgcaagtcaagatctcagtgaccagctgctggaggtggtcggcttggaaggagccatggagatggggcaaatatacacaggcctgaaaagtgctggccggcggctggctcagtgctcctgcgtggtcatcaggacgagcaagtctctgccaatgcaaattgatggggagccatggatgcagaccccatgcacagtgagtacagagtagttgatatgctatgtcaatctcagttttgctttcctctttgactaaataaccacaataactgatttttttctttatttcttttcaacctatcagcaaatagtctttttgttgttgttgttatgtgtgtgtcagagccactacatttaggttgtagacattatatacccttggcaatgatttagctcttgaatgtttgtgttagcctaagtataaatagatcttttaaatagatcaattataaaccatagatcaattataaactatggagctaaacaaaatattaataaaagtttatctgaaacttttttgtttatttcagagcacattattagaatattatttgcaagaaatgcagacctaagcttatatgtgaacttatttctcagcttttctatgcctccatttggggatttgagggctttcttctccataagaaaaaaatttctctccagtttctaccataattaattgtgttttccagaatgaggtattatttaaggcagacactgcccctctcaaaaaaaaatcagttttcatttgcatagtgaatattttattgcatttcaaaaacatgctaggaactgcttttggcactgggagtagacacatgaacaagaccaacagtgtaatttccttcaagttacttacattcctataatagaggaccgaataaataaacaactacatgataaatataacttcagactgtgagagttattaaaaaataaggtgaaatgatgataagaagctggattaggtgtggagaataaatactacttgagataagggagacctctttgaaaggacatagccaaaagcttagtataaaatt

SEQ ID NO: 5063 - protein, 773 aa, Homo sapiens; identical to SEQ ID NO: 663

SEQ ID NO: 5064 - DNA, 3869 bp, Homo sapiens
agtcacctgctccgaggttaccaagccggaatgcagcaagagcgtctgcagctgctacaattggtagaagtggcttcggcagatggttgctgaacaatgacccaccaaggactacagttgtagaagggagaggggagacgggtatcatatttcctccctgagatgtatagtgagtggtagtaattgcagtgaatccagctcactgtctcaacagcctctcacctgcaccgtctcctcccctgtcttataactggaccagcagttaaacagctgtatagccttgtctccctgtctcattttcccctgagctccatcagcaagagtagcaatagcagctggagaagcggcagccagagataggcagggctggtgcttgcagccgcgcaaatcgcctcctcctcaacacacacacacacacacacacacacacacacacacacacactgcacagacttccaatatcaacgcgtcttgacataaatcaaggactaagagagactgaagaagagcgttagtcatggacaacagttctttaacacattattgaaattacaagcatccaaagcagtttcatgtggacagattgcatattttgaaagcctgaggtattttatcatgaaacatgccatgtggaatctttgaagcatagacctctgcgcaacacctgaataaagaatcttttacctggtatgtgacagagcttctcaccaccaccatgacaaaccaggaaaaatgggcccacctcagcccttcggaattttcccaacttcagaaatatgctgagtattctacaaagaaattaaaggatgttcttgaagaattccatggtaatggtgtgcttgcaaagtataatcctgaagggaaacaagacattcttaaccaaacaatagattttgaaggtttcaaactattcatgaagacattcctggaagccgagcttcctgatgatttcactgcacaccttttcatgtcatttagcaacaagtttcctcattctagtccaatggtaaaaagtaagcctgctctcctatcaggcggtctgagaatgaataaaggtgccatcacccctccccggactacttctcctgcaaatacgtgttccccagaagtaatccatctgaaggacattgtctgttacctgtctctgcttgaaagaggaagacctgaggataagcttgagtttatgtttcgcctttatgacacggatgggaatggcttcctggacagctcggagctagaaaatatcatcagtcagatgatgcatgttgcagaataccttgagtgggatgtcactgaacttaatccaatcctccatgaaatgatggaagaaattgactatgatcatgatggaaccgtgtctctggaggaatggattcaaggaggaatgacaacgattccacttcttgtgctcctgggcttagaaaataacgtgaaggatgatggacagcacgtgtggcgactgaagcactttaacaaacctgcctattgcaacctttgcctgaacatgctgattggcgtggggaagcagggcctctgctgttccttctgcaagtacacagtccatgagcgctgtgtggctcgagcacctccctcttgcatcaagacctatgtgaagtccaaaaggaacactgatgtcatgcaccattactgggttgaaggtaactgcccaaccaagtgtgataagtgccacaaaactgttaaatgttaccagggcctgacaggactgcattgtgtttggtgtcagatcacactgcataataaatgtgcttctcatctaaaacctgaatgtgactgtggacctttgaaggaccatattttaccacccacaacaatctgtccagtggtactgcagactctgcccacttcaggagtttcagttcctgaggaaagacaatcaacagtgaaaaaggaaaagagtggttcccagcagccaaacaaagtgattgacaagaataaaatgcaaagagccaactctgttactgtagatggacaaggcctgcaggtcactcctgtgcctggtactcacccacttttagtttttgtgaaccccaaaagtggtggaaaacaaggagaacgaatttacagaaaattccagtatctattaaatcctcgtcaggtttacagtctttctggaaatggaccaatgccagggttaaactttttccgtgatgttcctgacttcagagtgttagcctgtggtggagatggaaccgtgggctgggttttggattgcatagaaaaggccaatgtaggcaagcatcctccagttgcgattctgcctcttgggactggcaatgatctagcaagatgcctgcgatggggaggaggttacgaaggtgagaatctgatgaaaattctaaaagacattgaaaacagcacagaaatcatgttggacaggtggaagtttgaagtcatacctaatgacaaagatgagaaaggagacccagtgccttacagtatcatcaataattacttttccattggcgtggatgcctccattgcacacagattccacatcatgagagaaaaacacccagagaaattcaacagtagaatgaagaacaaattttggtattttgagtttggcacatctgaaactttctcagccacctgcaagaagctacatgaatctgtagaaatagaatgtgatggagtacagatagatttaataaacatctctctggaaggaattgctattttgaatataccaagcatgcatggaggatccaatctttggggagagtctaagaaaagacgaagccatcgacgaatagagaaaaaagggtctgacaaaaggaccaccgtcacagatgccaaagagttgaagtttgcaagtcaagatctcagtgaccagctgctggaggtggtcggcttggaaggagccatggagatggggcaaatatacacaggcctgaaaagtgctggccggcggctggctcagtgctcctgcgtggtcatcaggacgagcaagtctctgccaatgcaaattgatggggagccatggatgcagaccccatgcacagtgagtacagagtagttgatatgctatgtcaatctcagttttgctttcctctttgactaaataaccacaataactgatttttttctttatttcttttcaacctatcagcaaatagtctttttgttgttgttgttatgtgtgtgtcagagccactacatttaggttgtagacattatatacccttggcaatgatttagctcttgaatgtttgtgttagcctaagtataaatagatcttttaaatagatcaattataaaccatagatcaattataaactatggagctaaacaaaatattaataaaagtttatctgaaacttttttgtttatttcagagcacattattagaatattatttgcaagaaatgcagacctaagcttatatgtgaacttatttctcagcttttctatgcctccatttggggatttgagggctttcttctccataagaaaaaaatttctctccagtttctaccataattaattgtgttttccagaatgaggtattatttaaggcagacactgcccctctcaaaaaaaaatcagttttcatttgcatagtgaatattttattgcatttcaaaaacatgctaggaactgcttttggcactgggagtagacacatgaacaagaccaacagtgtaatttccttcaagttacttacattcctataatagaggaccgaataaataaacaactacatgataaatataacttcagactgtgagagttattaaaaaataaggtgaaatgatgataagaagctggattaggtgtggagaataaatactacttgagataagggagacctctttgaaaggacatagccaaaagcttagtataaaatt

SEQ ID NO: 5065 - protein, 773 aa, Homo sapiens; identical to SEQ ID NO: 663

SEQ ID NO: 5066 - DNA, 3423 bp, Homo sapiens
acataaattagtaccttactggctagggaatgttgaatcacagttggatgaagaaacaattcatgttaatgtttctctaaagttctttaacacattattgaaattacaagcatccaaagcagtttcatgtggacagattgcatattttgaaagcctgaggtattttatcatgaaacatgccatgtggaatctttgaagcatagacctctgcgcaacacctgaataaagaatcttttacctggtatgtgacagagcttctcaccaccaccatgacaaaccaggaaaaatgggcccacctcagcccttcggaattttcccaacttcagaaatatgctgagtattctacaaagaaattaaaggatgttcttgaagaattccatggtaatggtgtgcttgcaaagtataatcctgaagggaaacaagacattcttaaccaaacaatagattttgaaggtttcaaactattcatgaagacattcctggaagccgagcttcctgatgatttcactgcacaccttttcatgtcatttagcaacaagtttcctcattctagtccaatggtaaaaagtaagcctgctctcctatcaggcggtctgagaatgaataaaggtgccatcacccctccccggactacttctcctgcaaatacgtgttccccagaagtaatccatctgaaggacattgtctgttacctgtctctgcttgaaagaggaagacctgaggataagcttgagtttatgtttcgcctttatgacacggatgggaatggcttcctggacagctcggagctagaaaatatcatcagtcagatgatgcatgttgcagaataccttgagtgggatgtcactgaacttaatccaatcctccatgaaatgatggaagaaattgactatgatcatgatggaaccgtgtctctggaggaatggattcaaggaggaatgacaacgattccacttcttgtgctcctgggcttagaaaataacgtgaaggatgatggacagcacgtgtggcgactgaagcactttaacaaacctgcctattgcaacctttgcctgaacatgctgattggcgtggggaagcagggcctctgctgttccttctgcaagtacacagtccatgagcgctgtgtggctcgagcacctccctcttgcatcaagacctatgtgaagtccaaaaggaacactgatgtcatgcaccattactgggttgaaggtaactgcccaaccaagtgtgataagtgccacaaaactgttaaatgttaccagggcctgacaggactgcattgtgtttggtgtcagatcacactgcataataaatgtgcttctcatctaaaacctgaatgtgactgtggacctttgaaggaccatattttaccacccacaacaatctgtccagtggtactgcagactctgcccacttcaggagtttcagttcctgaggaaagacaatcaacagtgaaaaaggaaaagagtggttcccagcagccaaacaaagtgattgacaagaataaaatgcaaagagccaactctgttactgtagatggacaaggcctgcaggtcactcctgtgcctggtactcacccacttttagtttttgtgaaccccaaaagtggtggaaaacaaggagaacgaatttacagaaaattccagtatctattaaatcctcgtcaggtttacagtctttctggaaatggaccaatgccagggttaaactttttccgtgatgttcctgacttcagagtgttagcctgtggtggagatggaaccgtgggctgggttttggattgcatagaaaaggccaatgtaggcaagcatcctccagttgcgattctgcctcttgggactggcaatgatctagcaagatgcctgcgatggggaggaggttacgaaggtgagaatctgatgaaaattctaaaagacattgaaaacagcacagaaatcatgttggacaggtggaagtttgaagtcatacctaatgacaaagatgagaaaggagacccagtgccttacagtatcatcaataattacttttccattggcgtggatgcctccattgcacacagattccacatcatgagagaaaaacacccagagaaattcaacagtagaatgaagaacaaattttggtattttgagtttggcacatctgaaactttctcagccacctgcaagaagctacatgaatctgtagaaatagaatgtgatggagtacagatagatttaataaacatctctctggaaggaattgctattttgaatataccaagcatgcatggaggatccaatctttggggagagtctaagaaaagacgaagccatcgacgaatagagaaaaaagggtctgacaaaaggaccaccgtcacagatgccaaagagttgaagtttgcaagtcaagatctcagtgaccagctgctggaggtggtcggcttggaaggagccatggagatggggcaaatatacacaggcctgaaaagtgctggccggcggctggctcagtgctcctgcgtggtcatcaggacgagcaagtctctgccaatgcaaattgatggggagccatggatgcagaccccatgcacagtgagtacagagtagttgatatgctatgtcaatctcagttttgctttcctctttgactaaataaccacaataactgatttttttctttatttcttttcaacctatcagcaaatagtctttttgttgttgttgttatgtgtgtgtcagagccactacatttaggttgtagacattatatacccttggcaatgatttagctcttgaatgtttgtgttagcctaagtataaatagatcttttaaatagatcaattataaaccatagatcaattataaactatggagctaaacaaaatattaataaaagtttatctgaaacttttttgtttatttcagagcacattattagaatattatttgcaagaaatgcagacctaagcttatatgtgaacttatttctcagcttttctatgcctccatttggggatttgagggctttcttctccataagaaaaaaatttctctccagtttctaccataattaattgtgttttccagaatgaggtattatttaaggcagacactgcccctctcaaaaaaaaatcagttttcatttgcatagtgaatattttattgcatttcaaaaacatgctaggaactgcttttggcactgggagtagacacatgaacaagaccaacagtgtaatttccttcaagttacttacattcctataatagaggaccgaataaataaacaactacatgataaatataacttcagactgtgagagttattaaaaaataaggtgaaatgatgataagaagctggattaggtgtggagaataaatactacttgagataagggagacctctttgaaaggacatagccaaaagcttagtataaaatt

SEQ ID NO: 5067 - protein, 773 aa, Homo sapiens; identical to SEQ ID NO: 663

SEQ ID NO: 5068 - DNA, 678 bp, Homo sapiens
atgggtgttggcttggtacttgaagccatgaaagctagcctggagcttggggtctaccaggataggcctagacccaagctccacgcatctgtggggacgttccaggtaccgccccacaatgctacctcctctttaaaagaagtcgttcagctggggcgggctggcgctgcgtggcgcgcacctgagcggccggggctccccgagccacggggggcgcgagagggcgaggcagcggcctggcttctccccagcaccgttctctgtcacggccgccgcctgaccatcaccccgcgcctcgcgtgggcatgtctcgcttcagaaatcccaagtcgtcttaggttccctggtccttcccctgggggggaaaaaaaacgctggtgcagcccagagcccttttccgctccaccccgggatgtcctcgctgccctcccgcctcccgcgcgtccttcccagcgcgtcggccgcgcgcccaggtgttcccgcgtccgtaatcccctccggcccgcgcctcccggcccgccctgcgggtctccagcgcctgggcccgcgctctcgccgcgggtccttcctcctatccccacccagccccgcccagcctccgcggcgctggggctcccggccgagcctctcctcccacctccgtcccctacttccctccccaagaagtgctatttttag

SEQ ID NO: 5069 - protein, 225 aa, Homo sapiens
MGVGLVLEAMKASLELGVYQDRPRPKLHASVGTFQVPPHNATSSLKEVVQLGRAGAAWRAPERPGLPEPRGAREGEAAAWLLPSTVLCHGRRLTITPRLAWACLASEIPSRLRFPGPSPGGEKKRWCSPEPFSAPPRDVLAALPPPARPSQRVGRAPRCSRVRNPLRPAPPGPPCGSPAPGPALSPRVLPPIPTQPRPASAALGLPAEPLLPPPSPTSLPKKCYF

SEQ ID NO: 5070 - DNA, 1265 bp, Homo sapiens
atgggtgttggcttggtacttgaagccatgaaagctagcctggagcttggggtctaccaggataggcctagacccaagctccacgcatctgtggggacgttccaggtaccgccccacaatgctacctcctctttaaaagaagtcgttcagctggggcgggctggcgctgcgtggcgcgcacctgagcggccggggctccccgagccacggggggcgcgagagggcgaggcagcggcctggcttctccccagcaccccgcggtctcctcctctagcgcccgccgcggccggtaaatctcggctggaggagcagcggcggcccccgagtcaactttcattccctttttgcttctgcctcaccattctcttctcctcctcgaaagatggctgtttggagaagggggagaagttaagaggtcgccagcgcggagcgaaggagggcgcgatagcctcagcaggagcgggcggaggtttctcctctgccaacccctcctggaccattgtcagcagttgaacgacaaaggctgtgaatctgcatcctagtcttagcagtccctctgattctcatgatgagctcacctgcacagcctgatatgacagctgcatagattcaacctactatgaaaagccaaaacatggaatattacactaattaaacggttacacaacagaacatggaatgtgcgacacttcatcttgggatgcaaatttttgtgctaaaaaaaactgagaaaaacaaaaagaaaaacatgtatttctgaggaacttgtttttatatctggcataaatgagaaaaagctaattaaaactattaattatcagaaaattgaagataaagttgaagagcctataccaaccaaagttgaataaatggcaaaatataatatagatgagttactctgaaataattttttatttcctactatctaacttaccaaacttcctgattttaattacataacaattttttggttattttaatattcatttggtacttatttccttttttattgttatagtattagatgaaatcataacatcaatttgctcctttgtaaaagaggatgttgagttagaagtgttctaaggtggctttcagcaataggctgccataccaattggaaaaatctagcatggtataaaagaatatttaagcagtaattatgactggaaaacatcagagtggaaatgaagtatggctgagaaacctttttgcttttagctttttttggagttcattacaataaaatgaaattatagaaactt

SEQ ID NO: 5071 - protein, 170 aa, Homo sapiens
MGVGLVLEAMKASLELGVYQDRPRPKLHASVGTFQVPPHNATSSLKEVVQLGRAGAAWRAPERPGLPEPRGAREGEAAAWLLPSTPRSPPLAPAAAGKSRLEEQRRPPSQLSFPFCFCLTILFSSSKDGCLEKGEKLRGRQRGAKEGAIASAGAGGGFSSANPSWTIVSS

SEQ ID NO: 5072 - DNA, 1346 bp, Homo sapiens
atgggtgttggcttggtacttgaagccatgaaagctagcctggagcttggggtctaccaggataggcctagacccaagctccacgcatctgtggggacgttccaggtaccgccccacaatgctacctcctctttaaaagaagtcgttcagctggggcgggctggcgctgcgtggcgcgcacctgagcggccggggctccccgagccacggggggcgcgagagggcgaggcagcggcctggcttctccccagcaccccgcggtctcctcctctagcgcccgccgcggccggtaaatctcggctggaggagcagcggcggcccccgagtcaactttcattccctttttgcttctgcctcaccattctcttctcctcctcgaaagatggctgtttggagaagggggagaagttaagaggtcgccagcgcggagcgaaggagggcgcgatagcctcagcaggagcgggcggaggtttctcctctgccaacccctcctggaccattgtcagcagttgaacgacaaaggctgtgaatctgcatcctagtcttagcagtccctctgattctcatgatgagctcacctgcacagcctgaaatgaggtcttactgtgttgcccaggctggtatcaaactccagtgatcaagtggtcctcctacctcagcctcccaaacagatatgacagctgcatagattcaacctactatgaaaagccaaaacatggaatattacactaattaaacggttacacaacagaacatggaatgtgcgacacttcatcttgggatgcaaatttttgtgctaaaaaaaactgagaaaaacaaaaagaaaaacatgtatttctgaggaacttgtttttatatctggcataaatgagaaaaagctaattaaaactattaattatcagaaaattgaagataaagttgaagagcctataccaaccaaagttgaataaatggcaaaatataatatagatgagttactctgaaataattttttatttcctactatctaacttaccaaacttcctgattttaattacataacaattttttggttattttaatattcatttggtacttatttccttttttattgttatagtattagatgaaatcataacatcaatttgctcctttgtaaaagaggatgttgagttagaagtgttctaaggtggctttcagcaataggctgccataccaattggaaaaatctagcatggtataaaagaatatttaagcagtaattatgactggaaaacatcagagtggaaatgaagtatggctgagaaacctttttgcttttagctttttttggagttcattacaataaaatgaaattatagaaactt

SEQ ID NO: 5073 - protein, 170 aa, Homo sapiens; identical to SEQ ID NO: 5071

SEQ ID NO: 5074 - DNA, 4723 bp, Homo sapiens
atgggtgttggcttggtacttgaagccatgaaagctagcctggagcttggggtctaccaggataggcctagacccaagctccacgcatctgtggggacgttccaggtaccgccccacaatgctacctcctctttaaaagaagtcgttcagctggggcgggctggcgctgcgtggcgcgcacctgagcggccggggctccccgagccacggggggcgcgagagggcgaggcagcggcctggcttctccccagcaccccgcggtctcctcctctagcgcccgccgcggccggtaaatctcggctggaggagcagcggcggcccccgagtcaactttcattccctttttgcttctgcctcaccattctcttctcctcctcgaaagatggctgtttggagaagggggagaagttaagaggtcgccagcgcggagcgaaggagggcgcgatagcctcagcaggagcgggcggaggtttctcctctgccaacccctcctggaccattgtcagcagttgaacgacaaaggctgtgaatctgcatcctagtcttagcagtccctctgattctcatgatgagctcacctgcacagcctgatggggtggctggacgagagcagctcttggctcagcaaagaatgcacagtatgatcagctcagtggatgtgaagtcagaagttcctgtgggcctggagcccatctcacctttagacctaaggacagacctcaggatgatgatgcccgtggtggaccctgttgtccgtgagaagcaattgcagcaggaattacttcttatccagcagcagcaacaaatccagaagcagcttctgatagcagagtttcagaaacagcatgagaacttgacacggcagcaccaggctcagcttcaggagcatatcaagttgcaacaggaacttctagccataaaacagcaacaagaactcctagaaaaggagcagaaactggagcagcagaggcaagaacaggaagtagagaggcatcgcagagaacagcagcttcctcctctcagaggcaaagatagaggacgagaaagggcagtggcaagtacagaagtaaagcagaagcttcaagagttcctactgagtaaatcagcaacgaaagacactccaactaatggaaaaaatcattccgtgagccgccatcccaagctctggtacacggctgcccaccacacatcattggatcaaagctctccaccccttagtggaacatctccatcctacaagtacacattaccaggagcacaagatgcaaaggatgatttcccccttcgaaaaactgcctctgagcccaacttgaaggtgcggtccaggttaaaacagaaagtggcagagaggagaagcagccccttactcaggcggaaggatggaaatgttgtcacttcattcaagaagcgaatgtttgaggtgacagaatcctcagtcagtagcagttctccaggctctggtcccagttcaccaaacaatgggccaactggaagtgttactgaaaatgagacttcggttttgccccctacccctcatgccgagcaaatggtttcacagcaacgcattctaattcatgaagattccatgaacctgctaagtctttatacctctccttctttgcccaacattaccttggggcttcccgcagtgccatcccagctcaatgcttcgaattcactcaaagaaaagcagaagtgtgagacgcagacgcttaggcaaggtgttcctctgcctgggcagtatggaggcagcatcccggcatcttccagccaccctcatgttactttagagggaaagccacccaacagcagccaccaggctctcctgcagcatttattattgaaagaacaaatgcgacagcaaaagcttcttgtagctggtggagttcccttacatcctcagtctcccttggcaacaaaagagagaatttcacctggcattagaggtacccacaaattgccccgtcacagacccctgaaccgaacccagtctgcacctttgcctcagagcacgttggctcagctggtcattcaacagcaacaccagcaattcttggagaagcagaagcaataccagcagcagatccacatgaacaaactgctttcgaaatctattgaacaactgaagcaaccaggcagtcaccttgaggaagcagaggaagagcttcagggggaccaggcgatgcaggaagacagagcgccctctagtggcaacagcactaggagcgacagcagtgcttgtgtggatgacacactgggacaagttggggctgtgaaggtcaaggaggaaccagtggacagtgatgaagatgctcagatccaggaaatggaatctggggagcaggctgcttttatgcaacaggtaataggcaaagatttagctccaggatttgtaattaaagtcattatctgaacatgaaatgcattgcaggtttggtaaatggatatgatttcctatcagtttatatttctctatgatttgagttcagtgtttaaggattctacctaatgcagatatatgtatatatctatatagaggtctttctatatactgatctctatatagatatcaatgtttcattgaaaatccactggtaaggaaatacctgttatactaaaattatgatacataatatctgagcagttaataggctttaaatttatcccaaagcctgctacaccaattacttctaaagaaaacaaattcactgttattttgagtttatgtgttgagatcagtgactgctggatagtctcccagtctgatcaatgaagcattcgattagtttttgattttttgcaacatctagaatttaattttcacatcactgtacataatgtatcatactatagtcttgaacactgttaaaggtagtctgccccttccttcctctctctttttttagttaagtagaaatgttctggtcaccatgccagtagtcctaggttattgtgtaggttgcaattgaacatattaggaatacaggtggttttaaatatatagatgcaaattgcagcactactttaaatattagattatgtctcacatagcactgctcattttacttttattttgtgtaatttgatgacactgtctatcaaaaaagagcaaatgaagcagatgcaaatgttagtgagaagtaatgtgcagcattatggtccaatcagatacaatattgtgtctacaattgcaaaaaacacagtaacaggatgaatattatctgatatcaagtcaaaatcagtttgaaaagaaggtgtatcatattttatattgtcactagaatctcttaagtataattccataatgacatgggcatataccgtaacattctggcaaataacaattagaaaagataggtttaacaaaaaaatttacttgtatataatgcaccttcaggaggactatgtcctttgatgctataaaatacaaacaactttgaaggcaacagaagacactgtttattcaagtcagttctttgtcaggttcctgctgttctcctacagaaaagtgattctgtgagggtgaacaggaaatgccttgtggaaacaggaagtccaagtgattcatgtactgaggaatgtaggaaaaaaaatctgaggatagtgctttactctttctgtttttaaagggcactctatgaattgatttattgtctaagaaaataacaccacaagtagggaaattgttacggaagcttttcactggaacatttccttcatattcccttttgatatgtttaccttgttttataggtttacttttgttaagctagttaaaggttcgttgtattaagacccctttaatatggataatccaaattgacctagaatctttgtgaggttttttctattaaaatatttatatttctaaatccgaggtatttcaaggtgtagtatcctatttcaaaggagatatagcagttttgccaaatgtagacattgttcaactgtatgttattggcacgtgttgtttacattttgctgtgacatttaaaaatatttctttaaaaatgttactgctaaagatacattatccttttttaaaaagtctccattcaaattaaattaacataactagaagttagaaagtttaaaagttttccacataatgaaagtccttctgataatttgacaaatagctataataggaacactccctatcaccaacatattttggttagtatattccttcatattaaaatgactttttgtcagttgttttgcattaaaaatatggcatgcctaagataaaattgtatattttttccatctcataaatattcattttcttcaaagtcttttttcaatctcataaaaaagggatagtgcatcttttaaaatacattttatttggggaggaacatgtggctgagcagacttttgtataatattacttcaaagatatgtaatcacaaacaaaaaaaactattttttataatgtcatttgagagagtttcatcagtacagttggtggacgttaattgtttgaatttgatagtctttgaatttaatcaagaaactacctggaaccagtgaaaaggaaagctggacttaaataatcttagaattaattgataaatgtctcttttaaaatctactgtatttattataatttacacccttgaaggtgatctcttgttttgtgttgtaaatatattgtttgtatgtttcccttcttgccttctgttataagtctcttcctttctcaaataaagtttttttt

SEQ ID NO: 5075 - protein, 615 aa, Homo sapiens
MMSSPAQPDGVAGREQLLAQQRMHSMISSVDVKSEVPVGLEPISPLDLRTDLRMMMPVVDPVVREKQLQQELLLIQQQQQIQKQLLIAEFQKQHENLTRQHQAQLQEHIKLQQELLAIKQQQELLEKEQKLEQQRQEQEVERHRREQQLPPLRGKDRGRERAVASTEVKQKLQEFLLSKSATKDTPTNGKNHSVSRHPKLWYTAAHHTSLDQSSPPLSGTSPSYKYTLPGAQDAKDDFPLRKTASEPNLKVRSRLKQKVAERRSSPLLRRKDGNVVTSFKKRMFEVTESSVSSSSPGSGPSSPNNGPTGSVTENETSVLPPTPHAEQMVSQQRILIHEDSMNLLSLYTSPSLPNITLGLPAVPSQLNASNSLKEKQKCETQTLRQGVPLPGQYGGSIPASSSHPHVTLEGKPPNSSHQALLQHLLLKEQMRQQKLLVAGGVPLHPQSPLATKERISPGIRGTHKLPRHRPLNRTQSAPLPQSTLAQLVIQQQHQQFLEKQKQYQQQIHMNKLLSKSIEQLKQPGSHLEEAEEELQGDQAMQEDRAPSSGNSTRSDSSACVDDTLGQVGAVKVKEEPVDSDEDAQIQEMESGEQAAFMQQVIGKDLAPGFVIKVII

SEQ ID NO: 5076 - DNA, 4591 bp, Homo sapiens
atgggtgttggcttggtacttgaagccatgaaagctagcctggagcttggggtctaccaggataggcctagacccaagctccacgcatctgtggggacgttccaggtaccgccccacaatgctacctcctctttaaaagaagtcgttcagctggggcgggctggcgctgcgtggcgcgcacctgagcggccggggctccccgagccacggggggcgcgagagggcgaggcagcggcctggcttctccccagcaccccgcggtctcctcctctagcgcccgccgcggccggtaaatctcggctggaggagcagcggcggcccccgagtcaactttcattccctttttgcttctgcctcaccattctcttctcctcctcgaaagatggctgtttggagaagggggagaagttaagaggtcgccagcgcggagcgaaggagggcgcgatagcctcagcaggagcgggcggaggtttctcctctgccaacccctcctggaccattgtcagcagttgaacgacaaaggctgtgaatctgcatcctagtcttagcagtccctctgattctcatgatgagctcacctgcacagcctgatggggtggctggacgagagcagctcttggctcagcaaagaatgcacagtatgatcagctcagtggatgtgaagtcagaagttcctgtgggcctggagcccatctcacctttagacctaaggacagacctcaggatgatgatgcccgtggtggaccctgttgtccgtgagaagcaattgcagcaggaattacttcttatccagcagcagcaacaaatccagaagcagcttctgatagcagagtttcagaaacagcatgagaacttgacacggcagcaccaggctcagcttcaggagcatatcaagttgcaacaggaacttctagccataaaacagcaacaagaactcctagaaaaggagcagaaactggagcagcagaggcaagaacaggaagtagagaggcatcgcagagaacagcagcttcctcctctcagaggcaaagatagaggacgagaaagggcagtggcaagtacagaagtaaagcagaagcttcaagagttcctactgagtaaatcagcaacgaaagacactccaactaatggaaaaaatcattccgtgagccgccatcccaagctctggtacacggctgcccaccacacatcattggatcaaagctctccaccccttagtggaacatctccatcctacaagtacacattaccaggagcacaagatgcaaaggatgatttcccccttcgaaaaactgaatcctcagtcagtagcagttctccaggctctggtcccagttcaccaaacaatgggccaactggaagtgttactgaaaatgagacttcggttttgccccctacccctcatgccgagcaaatggtttcacagcaacgcattctaattcatgaagattccatgaacctgctaagtctttatacctctccttctttgcccaacattaccttggggcttcccgcagtgccatcccagctcaatgcttcgaattcactcaaagaaaagcagaagtgtgagacgcagacgcttaggcaaggtgttcctctgcctgggcagtatggaggcagcatcccggcatcttccagccaccctcatgttactttagagggaaagccacccaacagcagccaccaggctctcctgcagcatttattattgaaagaacaaatgcgacagcaaaagcttcttgtagctggtggagttcccttacatcctcagtctcccttggcaacaaaagagagaatttcacctggcattagaggtacccacaaattgccccgtcacagacccctgaaccgaacccagtctgcacctttgcctcagagcacgttggctcagctggtcattcaacagcaacaccagcaattcttggagaagcagaagcaataccagcagcagatccacatgaacaaactgctttcgaaatctattgaacaactgaagcaaccaggcagtcaccttgaggaagcagaggaagagcttcagggggaccaggcgatgcaggaagacagagcgccctctagtggcaacagcactaggagcgacagcagtgcttgtgtggatgacacactgggacaagttggggctgtgaaggtcaaggaggaaccagtggacagtgatgaagatgctcagatccaggaaatggaatctggggagcaggctgcttttatgcaacaggtaataggcaaagatttagctccaggatttgtaattaaagtcattatctgaacatgaaatgcattgcaggtttggtaaatggatatgatttcctatcagtttatatttctctatgatttgagttcagtgtttaaggattctacctaatgcagatatatgtatatatctatatagaggtctttctatatactgatctctatatagatatcaatgtttcattgaaaatccactggtaaggaaatacctgttatactaaaattatgatacataatatctgagcagttaataggctttaaatttatcccaaagcctgctacaccaattacttctaaagaaaacaaattcactgttattttgagtttatgtgttgagatcagtgactgctggatagtctcccagtctgatcaatgaagcattcgattagtttttgattttttgcaacatctagaatttaattttcacatcactgtacataatgtatcatactatagtcttgaacactgttaaaggtagtctgccccttccttcctctctctttttttagttaagtagaaatgttctggtcaccatgccagtagtcctaggttattgtgtaggttgcaattgaacatattaggaatacaggtggttttaaatatatagatgcaaattgcagcactactttaaatattagattatgtctcacatagcactgctcattttacttttattttgtgtaatttgatgacactgtctatcaaaaaagagcaaatgaagcagatgcaaatgttagtgagaagtaatgtgcagcattatggtccaatcagatacaatattgtgtctacaattgcaaaaaacacagtaacaggatgaatattatctgatatcaagtcaaaatcagtttgaaaagaaggtgtatcatattttatattgtcactagaatctcttaagtataattccataatgacatgggcatataccgtaacattctggcaaataacaattagaaaagataggtttaacaaaaaaatttacttgtatataatgcaccttcaggaggactatgtcctttgatgctataaaatacaaacaactttgaaggcaacagaagacactgtttattcaagtcagttctttgtcaggttcctgctgttctcctacagaaaagtgattctgtgagggtgaacaggaaatgccttgtggaaacaggaagtccaagtgattcatgtactgaggaatgtaggaaaaaaaatctgaggatagtgctttactctttctgtttttaaagggcactctatgaattgatttattgtctaagaaaataacaccacaagtagggaaattgttacggaagcttttcactggaacatttccttcatattcccttttgatatgtttaccttgttttataggtttacttttgttaagctagttaaaggttcgttgtattaagacccctttaatatggataatccaaattgacctagaatctttgtgaggttttttctattaaaatatttatatttctaaatccgaggtatttcaaggtgtagtatcctatttcaaaggagatatagcagttttgccaaatgtagacattgttcaactgtatgttattggcacgtgttgtttacattttgctgtgacatttaaaaatatttctttaaaaatgttactgctaaagatacattatccttttttaaaaagtctccattcaaattaaattaacataactagaagttagaaagtttaaaagttttccacataatgaaagtccttctgataatttgacaaatagctataataggaacactccctatcaccaacatattttggttagtatattccttcatattaaaatgactttttgtcagttgttttgcattaaaaatatggcatgcctaagataaaattgtatattttttccatctcataaatattcattttcttcaaagtcttttttcaatctcataaaaaagggatagtgcatcttttaaaatacattttatttggggaggaacatgtggctgagcagacttttgtataatattacttcaaagatatgtaatcacaaacaaaaaaaactattttttataatgtcatttgagagagtttcatcagtacagttggtggacgttaattgtttgaatttgatagtctttgaatttaatcaagaaactacctggaaccagtgaaaaggaaagctggacttaaataatcttagaattaattgataaatgtctcttttaaaatctactgtatttattataatttacacccttgaaggtgatctcttgttttgtgttgtaaatatattgtttgtatgtttcccttcttgccttctgttataagtctcttcctttctcaaataaagtttttttt

SEQ ID NO: 5077 - protein, 571 aa, Homo sapiens
MMSSPAQPDGVAGREQLLAQQRMHSMISSVDVKSEVPVGLEPISPLDLRTDLRMMMPVVDPVVREKQLQQELLLIQQQQQIQKQLLIAEFQKQHENLTRQHQAQLQEHIKLQQELLAIKQQQELLEKEQKLEQQRQEQEVERHRREQQLPPLRGKDRGRERAVASTEVKQKLQEFLLSKSATKDTPTNGKNHSVSRHPKLWYTAAHHTSLDQSSPPLSGTSPSYKYTLPGAQDAKDDFPLRKTESSVSSSSPGSGPSSPNNGPTGSVTENETSVLPPTPHAEQMVSQQRILIHEDSMNLLSLYTSPSLPNITLGLPAVPSQLNASNSLKEKQKCETQTLRQGVPLPGQYGGSIPASSSHPHVTLEGKPPNSSHQALLQHLLLKEQMRQQKLLVAGGVPLHPQSPLATKERISPGIRGTHKLPRHRPLNRTQSAPLPQSTLAQLVIQQQHQQFLEKQKQYQQQIHMNKLLSKSIEQLKQPGSHLEEAEEELQGDQAMQEDRAPSSGNSTRSDSSACVDDTLGQVGAVKVKEEPVDSDEDAQIQEMESGEQAAFMQQVIGKDLAPGFVIKVII

SEQ ID NO: 5078 - DNA, 4740 bp, Homo sapiens
atgggtgttggcttggtacttgaagccatgaaagctagcctggagcttggggtctaccaggataggcctagacccaagctccacgcatctgtggggacgttccaggtaccgccccacaatgctacctcctctttaaaagaagtcgttcagctggggcgggctggcgctgcgtggcgcgcacctgagcggccggggctccccgagccacggggggcgcgagagggcgaggcagcggcctggcttctccccagcaccccgcggtctcctcctctagcgcccgccgcggccggtaaatctcggctggaggagcagcggcggcccccgagtcaactttcattccctttttgcttctgcctcaccattctcttctcctcctcgaaagatggctgtttggagaagggggagaagttaagaggtcgccagcgcggagcgaaggagggcgcgatagcctcagcaggagcgggcggaggtttctcctctgccaacccctcctggaccattgtcagcagttgaacgacaaaggctgtgaatctgcatcctagtcttagcagtccctctgattctcatgatgagctcacctgcacagcctgatggggtggctggacgagagcagctcttggctcagcaaagaatgcacagtatgatcagctcagtggatgtgaagtcagaagttcctgtgggcctggagcccatctcacctttagacctaaggacagacctcaggatgatgatgcccgtggtggaccctgttgtccgtgagaagcaattgcagcaggaattacttcttatccagcagcagcaacaaatccagaagcagcttctgatagcagagtttcagaaacagcatgagaacttgacacggcagcaccaggctcagcttcaggagcatatcaagttgcaacaggaacttctagccataaaacagcaacaagaactcctagaaaaggagcagaaactggagcagcagaggcaagaacaggaagtagagaggcatcgcagagaacagcagcttcctcctctcagaggcaaagatagaggacgagaaagggcagtggcaagtacagaagtaaagcagaagcttcaagagttcctactgagtaaatcagcaacgaaagacactccaactaatggaaaaaatcattccgtgagccgccatcccaagctctggtacacggctgcccaccacacatcattggatcaaagctctccaccccttagtggaacatctccatcctacaagtacacattaccaggagcacaagatgcaaaggatgatttcccccttcgaaaaactgcctctgagcccaacttgaaggtgcggtccaggttaaaacagaaagtggcagagaggagaagcagccccttactcaggcggaaggatggaaatgttgtcacttcattcaagaagcgaatgtttgaggtgacagaatcctcagtcagtagcagttctccaggctctggtcccagttcaccaaacaatgggccaactggaagtgttactgaaaatgagacttcggttttgccccctacccctcatgccgagcaaatggtttcacagcaacgcattctaattcatgaagattccatgaacctgctaagtctttatacctctccttctttgcccaacattaccttggggcttcccgcagtgccatcccagctcaatgcttcgaattcactcaaagaaaagcagaagtgtgagacgcagacgcttaggcaaggtgttcctctgcctgggcagtatggaggcagcatcccggcatcttccagccaccctcatgttactttagagggaaagccacccaacagcagccaccaggctctcctgcagcatttattattgaaagaacaaatgcgacagcaaaagcttcttgtagctggtggagttcccttacatcctcagtctcccttggcaacaaaagagagaatttcacctggcattagaggtacccacaaattgccccgtcacagacccctgaaccgaacccagtctgcacctttgcctcagagcacgttggctcagctggtcattcaacagcaacaccagcaattcttggagaagcagaagcaataccagcagcagatccacatgaacaaactgctttcgaaatctattgaacaactgaagcaaccaggcagtcaccttgaggaagcagaggaagagcttcagggggaccaggcgatgcaggaagacagagcgccctctagtggcaacagcactaggagcgacagcagtgcttgtgtggatgacacactgggacaagttggggctgtgaaggtcaaggaggaaccagtggacagtgatgaagatgctcagatccaggaaatggaatctggggagcaggctgcttttatgcaacaggtaataggcaaagatttagctccaggatttgtaattaaagtcattatctgaacatgaaatgcattgcaggtttggtaaatggatatgatttcctatcagtttatatttctctatgatttgagttcagtgtttaaggattctacctaatgcagatatatgtatatatctatatagaggtctttctatatactgatctctatatagatatcaatgtttcattgaaaatccactggtaaggaaatacctgttatactaaaattatgatacataatatctgagcagttaataggctttaaatttatcccaaagcctgctacaccaattacttctaaagaaaacaaattcactgttattttgagtttatgtgttgagatcagtgactgctggatagtctcccagtctgatcaatgaagcattcgattagtttttgattttttgcaacatctagaatttaattttcacatcactgtacataatgtatcatactatagtcttgaacactgttaaaggtagtctgccccttccttcctctctctttttttagttaagtagaaatgttctggtcaccatgccagtagtcctaggttattgtgtaggttgcaattgaacatattaggaatacaggtggttttaaatatatagatgcaaattgcagcactactttaaatattagattatgtctcacatagcactgctcattttacttttattttgtgtaatttgatgacactgtctatcaaaaaagagcaaatgaagcagatgcaaatgttagtgagaagtaatgtgcagcattatggtccaatcagatacaatattgtgtctacaattgcaaaaaacacagtaacaggatgaatattatctgatatcaagtcaaaatcagtttgaaaagaaggtgtatcatattttatattgtcactagaatctcttaagtataattccataatgacatgggcatataccgtaacattctggcaaataacaattagaaaagataggtttaacaaaaaaatttacttgtatataatgcaccttcaggaggactatgtcctttgatgctataaaatacaaacaactttgaaggcaacagaagacactgtttattcaagtcagttctttgtcaggttcctgctgttctcctacagaaaagtgattctgtgagggtgaacaggaaatgccttgtggaaacaggaagtccaagtgattcatgtactgaggaatgtaggaaaaaaaatctgaggatagtgctttactctttctgtttttaaagggcactctatgaattgatttattgtctaagaaaataacaccacaagtagggaaattgttacggaagcttttcactggaacatttccttcatattcccttttgatatgtttaccttgttttataggtttacttttgttaagctagttaaaggttcgttgtattaagacccctttaatatggataatccaaattgacctagaatctttgtgaggttttttctattaaaatatttatatttctaaatccgaggtatttcaaggtgtagtatcctatttcaaaggagatatagcagttttgccaaatgtagacattgttcaactgtatgttattggcacgtgttgtttacattttgctgtgacatttaaaaatatttctttaaaaatgttactgctaaagatacattatccttttttaaaaagtctccattcaaattaaattaacataactagaagttagaaagtttaaaagttttccacataatgaaagtccttctgataatttgacaaatagctataataggaacactccctatcaccaacatattttggttagtatattccttcatattaaaatgactttttgtcagttgttttgcattaaaaatatggcatgcctaagataaaattgtatattttttccatctcataaatattcattttcttcaaagtcttttttcaatctcataaaaaagggatagtgcatcttttaaaatacattttatttggggaggaacatgtggctgagcagacttttgtataatattacttcaaagatatgtaatcacaaacaaaaaaaactattttttataatgtcatttgagagagtttcatcagtacagttggtggacgttaattgtttgaatttgatagtctttgaatttaatcaagaaactacctggaaccagtgaaaaggaaagctggacttaaataatcttagaattaattgataaatgtctcttttaaaatctactgtatttattataatttacacccttgaaggtgatctcttgttttgtgttgtaaatatattgtttgtatgtttcccttcttgccttctgttataagtctcttcctttctcaaataaagttttttttaaaagatcccctttcat

SEQ ID NO: 5079 - protein, 615 aa, Homo sapiens; identical to SEQ ID NO: 5075

SEQ ID NO: 5080 - DNA, 4608 bp, Homo sapiens
atgggtgttggcttggtacttgaagccatgaaagctagcctggagcttggggtctaccaggataggcctagacccaagctccacgcatctgtggggacgttccaggtaccgccccacaatgctacctcctctttaaaagaagtcgttcagctggggcgggctggcgctgcgtggcgcgcacctgagcggccggggctccccgagccacggggggcgcgagagggcgaggcagcggcctggcttctccccagcaccccgcggtctcctcctctagcgcccgccgcggccggtaaatctcggctggaggagcagcggcggcccccgagtcaactttcattccctttttgcttctgcctcaccattctcttctcctcctcgaaagatggctgtttggagaagggggagaagttaagaggtcgccagcgcggagcgaaggagggcgcgatagcctcagcaggagcgggcggaggtttctcctctgccaacccctcctggaccattgtcagcagttgaacgacaaaggctgtgaatctgcatcctagtcttagcagtccctctgattctcatgatgagctcacctgcacagcctgatggggtggctggacgagagcagctcttggctcagcaaagaatgcacagtatgatcagctcagtggatgtgaagtcagaagttcctgtgggcctggagcccatctcacctttagacctaaggacagacctcaggatgatgatgcccgtggtggaccctgttgtccgtgagaagcaattgcagcaggaattacttcttatccagcagcagcaacaaatccagaagcagcttctgatagcagagtttcagaaacagcatgagaacttgacacggcagcaccaggctcagcttcaggagcatatcaagttgcaacaggaacttctagccataaaacagcaacaagaactcctagaaaaggagcagaaactggagcagcagaggcaagaacaggaagtagagaggcatcgcagagaacagcagcttcctcctctcagaggcaaagatagaggacgagaaagggcagtggcaagtacagaagtaaagcagaagcttcaagagttcctactgagtaaatcagcaacgaaagacactccaactaatggaaaaaatcattccgtgagccgccatcccaagctctggtacacggctgcccaccacacatcattggatcaaagctctccaccccttagtggaacatctccatcctacaagtacacattaccaggagcacaagatgcaaaggatgatttcccccttcgaaaaactgaatcctcagtcagtagcagttctccaggctctggtcccagttcaccaaacaatgggccaactggaagtgttactgaaaatgagacttcggttttgccccctacccctcatgccgagcaaatggtttcacagcaacgcattctaattcatgaagattccatgaacctgctaagtctttatacctctccttctttgcccaacattaccttggggcttcccgcagtgccatcccagctcaatgcttcgaattcactcaaagaaaagcagaagtgtgagacgcagacgcttaggcaaggtgttcctctgcctgggcagtatggaggcagcatcccggcatcttccagccaccctcatgttactttagagggaaagccacccaacagcagccaccaggctctcctgcagcatttattattgaaagaacaaatgcgacagcaaaagcttcttgtagctggtggagttcccttacatcctcagtctcccttggcaacaaaagagagaatttcacctggcattagaggtacccacaaattgccccgtcacagacccctgaaccgaacccagtctgcacctttgcctcagagcacgttggctcagctggtcattcaacagcaacaccagcaattcttggagaagcagaagcaataccagcagcagatccacatgaacaaactgctttcgaaatctattgaacaactgaagcaaccaggcagtcaccttgaggaagcagaggaagagcttcagggggaccaggcgatgcaggaagacagagcgccctctagtggcaacagcactaggagcgacagcagtgcttgtgtggatgacacactgggacaagttggggctgtgaaggtcaaggaggaaccagtggacagtgatgaagatgctcagatccaggaaatggaatctggggagcaggctgcttttatgcaacaggtaataggcaaagatttagctccaggatttgtaattaaagtcattatctgaacatgaaatgcattgcaggtttggtaaatggatatgatttcctatcagtttatatttctctatgatttgagttcagtgtttaaggattctacctaatgcagatatatgtatatatctatatagaggtctttctatatactgatctctatatagatatcaatgtttcattgaaaatccactggtaaggaaatacctgttatactaaaattatgatacataatatctgagcagttaataggctttaaatttatcccaaagcctgctacaccaattacttctaaagaaaacaaattcactgttattttgagtttatgtgttgagatcagtgactgctggatagtctcccagtctgatcaatgaagcattcgattagtttttgattttttgcaacatctagaatttaattttcacatcactgtacataatgtatcatactatagtcttgaacactgttaaaggtagtctgccccttccttcctctctctttttttagttaagtagaaatgttctggtcaccatgccagtagtcctaggttattgtgtaggttgcaattgaacatattaggaatacaggtggttttaaatatatagatgcaaattgcagcactactttaaatattagattatgtctcacatagcactgctcattttacttttattttgtgtaatttgatgacactgtctatcaaaaaagagcaaatgaagcagatgcaaatgttagtgagaagtaatgtgcagcattatggtccaatcagatacaatattgtgtctacaattgcaaaaaacacagtaacaggatgaatattatctgatatcaagtcaaaatcagtttgaaaagaaggtgtatcatattttatattgtcactagaatctcttaagtataattccataatgacatgggcatataccgtaacattctggcaaataacaattagaaaagataggtttaacaaaaaaatttacttgtatataatgcaccttcaggaggactatgtcctttgatgctataaaatacaaacaactttgaaggcaacagaagacactgtttattcaagtcagttctttgtcaggttcctgctgttctcctacagaaaagtgattctgtgagggtgaacaggaaatgccttgtggaaacaggaagtccaagtgattcatgtactgaggaatgtaggaaaaaaaatctgaggatagtgctttactctttctgtttttaaagggcactctatgaattgatttattgtctaagaaaataacaccacaagtagggaaattgttacggaagcttttcactggaacatttccttcatattcccttttgatatgtttaccttgttttataggtttacttttgttaagctagttaaaggttcgttgtattaagacccctttaatatggataatccaaattgacctagaatctttgtgaggttttttctattaaaatatttatatttctaaatccgaggtatttcaaggtgtagtatcctatttcaaaggagatatagcagttttgccaaatgtagacattgttcaactgtatgttattggcacgtgttgtttacattttgctgtgacatttaaaaatatttctttaaaaatgttactgctaaagatacattatccttttttaaaaagtctccattcaaattaaattaacataactagaagttagaaagtttaaaagttttccacataatgaaagtccttctgataatttgacaaatagctataataggaacactccctatcaccaacatattttggttagtatattccttcatattaaaatgactttttgtcagttgttttgcattaaaaatatggcatgcctaagataaaattgtatattttttccatctcataaatattcattttcttcaaagtcttttttcaatctcataaaaaagggatagtgcatcttttaaaatacattttatttggggaggaacatgtggctgagcagacttttgtataatattacttcaaagatatgtaatcacaaacaaaaaaaactattttttataatgtcatttgagagagtttcatcagtacagttggtggacgttaattgtttgaatttgatagtctttgaatttaatcaagaaactacctggaaccagtgaaaaggaaagctggacttaaataatcttagaattaattgataaatgtctcttttaaaatctactgtatttattataatttacacccttgaaggtgatctcttgttttgtgttgtaaatatattgtttgtatgtttcccttcttgccttctgttataagtctcttcctttctcaaataaagttttttttaaaagatcccctttcat

SEQ ID NO: 5081 - protein, 571 aa, Homo sapiens; identical to SEQ ID NO: 5077

SEQ ID NO: 5082 - DNA, 2305 bp, Homo sapiens
atgggtgttggcttggtacttgaagccatgaaagctagcctggagcttggggtctaccaggataggcctagacccaagctccacgcatctgtggggacgttccaggtaccgccccacaatgctacctcctctttaaaagaagtcgttcagctggggcgggctggcgctgcgtggcgcgcacctgagcggccggggctccccgagccacggggggcgcgagagggcgaggcagcggcctggcttctccccagcaccccgcggtctcctcctctagcgcccgccgcggccggtaaatctcggctggaggagcagcggcggcccccgagtcaactttcattccctttttgcttctgcctcaccattctcttctcctcctcgaaagatggctgtttggagaagggggagaagttaagaggtcgccagcgcggagcgaaggagggcgcgatagcctcagcaggagcgggcggaggtttctcctctgccaacccctcctggaccattgtcagcagttgaacgacaaaggctgtgaatctgcatcctagtcttagcagtccctctgattctcatgatgagctcacctgcacagcctgatggggtggctggacgagagcagctcttggctcagcaaagaatgcacagtatgatcagctcagtggatgtgaagtcagaagttcctgtgggcctggagcccatctcacctttagacctaaggacagacctcaggatgatgatgcccgtggtggaccctgttgtccgtgagaagcaattgcagcaggaattacttcttatccagcagcagcaacaaatccagaagcagcttctgatagcagagtttcagaaacagcatgagaacttgacacggcagcaccaggctcagcttcaggagcatatcaagttgcaacaggaacttctagccataaaacagcaacaagaactcctagaaaaggagcagaaactggagcagcagaggcaagaacaggaagtagagaggcatcgcagagaacagcagcttcctcctctcagaggcaaagatagaggacgagaaagggcagtggcaagtacagaagtaaagcagaagcttcaagagttcctactgagtaaatcagcaacgaaagacactccaactaatggaaaaaatcattccgtgagccgccatcccaagctctggtacacggctgcccaccacacatcattggatcaaagctctccaccccttagtggaacatctccatcctacaagtacacattaccaggagcacaagatgcaaaggatgatttcccccttcgaaaaactgcctctgagcccaacttgaaggtgcggtccaggttaaaacagaaagtggcagagaggagaagcagccccttactcaggcggaaggatggaaatgttgtcacttcattcaagaagcgaatgtttgaggtgacagaatcctcagtcagtagcagttctccaggctctggtcccagttcaccaaacaatgggccaactggaagtgttactgaaaatgagacttcggttttgccccctacccctcatgccgagcaaatggtttcacagcaacgcattctaattcatgaagattccatgaacctgctaagtctttatacctctccttctttgcccaacattaccttggggcttcccgcagtgccatcccagctcaatgcttcgaattcactcaaagaaaagcagaagtgtgagacgcagacgcttaggcaaggtgttcctctgcctgggcagtatggaggcagcatcccggcatcttccagccaccctcatgttactttagagggaaagccacccaacagcagccaccaggctctcctgcagcatttattattgaaagaacaaatgcgacagcaaaagcttcttgtagctggtggagttcccttacatcctcagtctcccttggcaacaaaagagagaatttcacctggcattagaggtacccacaaattgccccgtcacagacccctgaaccgaacccagtctgcacctttgcctcagagcacgttggctcagctggtcattcaacagcaacaccagcaattcttggagaagcagaagcaataccagcagcagatccacatgaacaaacctttcctggaacccacgcacacacgtgcgctctctgtgcgccaagctccgctggctgcggttggcatggatggattagagaaacaccgtctcgtctccaggactcactcttcccctgctgcctctgttttacctcacccagcaatggaccgccccctccagcctggctctgcaactggaattgcctatgaccccttgatgctgaaa

SEQ ID NO: 5083 - protein, 579 aa, Homo sapiens
MMSSPAQPDGVAGREQLLAQQRMHSMISSVDVKSEVPVGLEPISPLDLRTDLRMMMPVVDPVVREKQLQQELLLIQQQQQIQKQLLIAEFQKQHENLTRQHQAQLQEHIKLQQELLAIKQQQELLEKEQKLEQQRQEQEVERHRREQQLPPLRGKDRGRERAVASTEVKQKLQEFLLSKSATKDTPTNGKNHSVSRHPKLWYTAAHHTSLDQSSPPLSGTSPSYKYTLPGAQDAKDDFPLRKTASEPNLKVRSRLKQKVAERRSSPLLRRKDGNVVTSFKKRMFEVTESSVSSSSPGSGPSSPNNGPTGSVTENETSVLPPTPHAEQMVSQQRILIHEDSMNLLSLYTSPSLPNITLGLPAVPSQLNASNSLKEKQKCETQTLRQGVPLPGQYGGSIPASSSHPHVTLEGKPPNSSHQALLQHLLLKEQMRQQKLLVAGGVPLHPQSPLATKERISPGIRGTHKLPRHRPLNRTQSAPLPQSTLAQLVIQQQHQQFLEKQKQYQQQIHMNKPFLEPTHTRALSVRQAPLAAVGMDGLEKHRLVSRTHSSPAASVLPHPAMDRPLQPGSATGIAYDPLML

SEQ ID NO: 5084 - DNA, 3280 bp, Homo sapiens
atgggtgttggcttggtacttgaagccatgaaagctagcctggagcttggggtctaccaggataggcctagacccaagctccacgcatctgtggggacgttccaggtaccgccccacaatgctacctcctctttaaaagaagtcgttcagctggggcgggctggcgctgcgtggcgcgcacctgagcggccggggctccccgagccacggggggcgcgagagggcgaggcagcggcctggcttctccccagcaccccgcggtctcctcctctagcgcccgccgcggccggtaaatctcggctggaggagcagcggcggcccccgagtcaactttcattccctttttgcttctgcctcaccattctcttctcctcctcgaaagatggctgtttggagaagggggagaagttaagaggtcgccagcgcggagcgaaggagggcgcgatagcctcagcaggagcgggcggaggtttctcctctgccaacccctcctggaccattgtcagcagttgaacgacaaaggctgtgaatctgcatcctagtcttagcagtccctctgattctcatgatgagctcacctgcacagcctgatggggtggctggacgagagcagctcttggctcagcaaagaatgcacagtatgatcagctcagtggatgtgaagtcagaagttcctgtgggcctggagcccatctcacctttagacctaaggacagacctcaggatgatgatgcccgtggtggaccctgttgtccgtgagaagcaattgcagcaggaattacttcttatccagcagcagcaacaaatccagaagcagcttctgatagcagagtttcagaaacagcatgagaacttgacacggcagcaccaggctcagcttcaggagcatatcaagttgcaacaggaacttctagccataaaacagcaacaagaactcctagaaaaggagcagaaactggagcagcagaggcaagaacaggaagtagagaggcatcgcagagaacagcagcttcctcctctcagaggcaaagatagaggacgagaaagggcagtggcaagtacagaagtaaagcagaagcttcaagagttcctactgagtaaatcagcaacgaaagacactccaactaatggaaaaaatcattccgtgagccgccatcccaagctctggtacacggctgcccaccacacatcattggatcaaagctctccaccccttagtggaacatctccatcctacaagtacacattaccaggagcacaagatgcaaaggatgatttcccccttcgaaaaactgcctctgagcccaacttgaaggtgcggtccaggttaaaacagaaagtggcagagaggagaagcagccccttactcaggcggaaggatggaaatgttgtcacttcattcaagaagcgaatgtttgaggtgacagaatcctcagtcagtagcagttctccaggctctggtcccagttcaccaaacaatgggccaactggaagtgttactgaaaatgagacttcggttttgccccctacccctcatgccgagcaaatggtttcacagcaacgcattctaattcatgaagattccatgaacctgctaagtctttatacctctccttctttgcccaacattaccttggggcttcccgcagtgccatcccagctcaatgcttcgaattcactcaaagaaaagcagaagtgtgagacgcagacgcttaggcaaggtgttcctctgcctgggcagtatggaggcagcatcccggcatcttccagccaccctcatgttactttagagggaaagccacccaacagcagccaccaggctctcctgcagcatttattattgaaagaacaaatgcgacagcaaaagcttcttgtagctggtggagttcccttacatcctcagtctcccttggcaacaaaagagagaatttcacctggcattagaggtacccacaaattgccccgtcacagacccctgaaccgaacccagtctgcacctttgcctcagagcacgttggctcagctggtcattcaacagcaacaccagcaattcttggagaagcagaagcaataccagcagcagatccacatgaacaaactgctttcgaaatctattgaacaactgaagcaaccaggcagtcaccttgaggaagcagaggaagagcttcagggggaccaggcgatgcaggaagacagagcgccctctagtggcaacagcactaggagcgacagcagtgcttgtgtggatgacacactgggacaagttggggctgtgaaggtcaaggaggaaccagtggacagtgatgaagatgctcagatccaggaaatggaatctggggagcaggctgcttttatgcaacagcctttcctggaacccacgcacacacgtgcgctctctgtgcgccaagctccgctggctgcggttggcatggatggattagagaaacaccgtctcgtctccaggactcactcttcccctgctgcctctgttttacctcacccagcaatggaccgccccctccagcctggctctgcaactggaattgcctatgaccccttgatgctgaaacaccagtgcgtttgtggcaattccaccacccaccctgagcatgctggacgaatacagagtatctggtcacgactgcaagaaactgggctgctaaataaatgtgagcgaattcaaggtcgaaaagccagcctggaggaaatacagcttgttcattctgaacatcactcactgttgtatggcaccaaccccctggacggacagaagctggaccccaggatactcctaggtgatgactctcaaaagtttttttcctcattaccttgtggtggacttggggtggacagtgacaccatttggaatgagctacactcgtccggtgctgcacgcatggctgttggctgtgtcatcgagctggcttccaaagtggcctcaggagagctgaagaatgggtttgctgttgtgaggccccctggccatcacgctgaagaatccacagccatggggttctgcttttttaattcagttgcaattaccgccaaatacttgagagaccaactaaatataagcaagatattgattgtagatctggatgttcaccatggaaacggtacccagcaggccttttatgctgaccccagcatcctgtacatttcactccatcgctatgatgaagggaactttttccctggcagtggagccccaaatgaggttcggtttatttctttagagccccacttttatttgtatctttcaggtaattgcattgcatga

SEQ ID NO: 5085 - protein, 904 aa, Homo sapiens
MMSSPAQPDGVAGREQLLAQQRMHSMISSVDVKSEVPVGLEPISPLDLRTDLRMMMPVVDPVVREKQLQQELLLIQQQQQIQKQLLIAEFQKQHENLTRQHQAQLQEHIKLQQELLAIKQQQELLEKEQKLEQQRQEQEVERHRREQQLPPLRGKDRGRERAVASTEVKQKLQEFLLSKSATKDTPTNGKNHSVSRHPKLWYTAAHHTSLDQSSPPLSGTSPSYKYTLPGAQDAKDDFPLRKTASEPNLKVRSRLKQKVAERRSSPLLRRKDGNVVTSFKKRMFEVTESSVSSSSPGSGPSSPNNGPTGSVTENETSVLPPTPHAEQMVSQQRILIHEDSMNLLSLYTSPSLPNITLGLPAVPSQLNASNSLKEKQKCETQTLRQGVPLPGQYGGSIPASSSHPHVTLEGKPPNSSHQALLQHLLLKEQMRQQKLLVAGGVPLHPQSPLATKERISPGIRGTHKLPRHRPLNRTQSAPLPQSTLAQLVIQQQHQQFLEKQKQYQQQIHMNKLLSKSIEQLKQPGSHLEEAEEELQGDQAMQEDRAPSSGNSTRSDSSACVDDTLGQVGAVKVKEEPVDSDEDAQIQEMESGEQAAFMQQPFLEPTHTRALSVRQAPLAAVGMDGLEKHRLVSRTHSSPAASVLPHPAMDRPLQPGSATGIAYDPLMLKHQCVCGNSTTHPEHAGRIQSIWSRLQETGLLNKCERIQGRKASLEEIQLVHSEHHSLLYGTNPLDGQKLDPRILLGDDSQKFFSSLPCGGLGVDSDTIWNELHSSGAARMAVGCVIELASKVASGELKNGFAVVRPPGHHAEESTAMGFCFFNSVAITAKYLRDQLNISKILIVDLDVHHGNGTQQAFYADPSILYISLHRYDEGNFFPGSGAPNEVRFISLEPHFYLYLSGNCIA

SEQ ID NO: 5086 - DNA, 5081 bp, Homo sapiens
atgggtgttggcttggtacttgaagccatgaaagctagcctggagcttggggtctaccaggataggcctagacccaagctccacgcatctgtggggacgttccaggtaccgccccacaatgctacctcctctttaaaagaagtcgttcagctggggcgggctggcgctgcgtggcgcgcacctgagcggccggggctccccgagccacggggggcgcgagagggcgaggcagcggcctggcttctccccagcaccccgcggtctcctcctctagcgcccgccgcggccggtaaatctcggctggaggagcagcggcggcccccgagtcaactttcattccctttttgcttctgcctcaccattctcttctcctcctcgaaagatggctgtttggagaagggggagaagttaagaggtcgccagcgcggagcgaaggagggcgcgatagcctcagcaggagcgggcggaggtttctcctctgccaacccctcctggaccattgtcagcagttgaacgacaaaggctgtgaatctgcatcctagtcttagcagtccctctgattctcatgatgagctcacctgcacagcctgatggggtggctggacgagagcagctcttggctcagcaaagaatgcacagtatgatcagctcagtggatgtgaagtcagaagttcctgtgggcctggagcccatctcacctttagacctaaggacagacctcaggatgatgatgcccgtggtggaccctgttgtccgtgagaagcaattgcagcaggaattacttcttatccagcagcagcaacaaatccagaagcagcttctgatagcagagtttcagaaacagcatgagaacttgacacggcagcaccaggctcagcttcaggagcatatcaagttgcaacaggaacttctagccataaaacagcaacaagaactcctagaaaaggagcagaaactggagcagcagaggcaagaacaggaagtagagaggcatcgcagagaacagcagcttcctcctctcagaggcaaagatagaggacgagaaagggcagtggcaagtacagaagtaaagcagaagcttcaagagttcctactgagtaaatcagcaacgaaagacactccaactaatggaaaaaatcattccgtgagccgccatcccaagctctggtacacggctgcccaccacacatcattggatcaaagctctccaccccttagtggaacatctccatcctacaagtacacattaccaggagcacaagatgcaaaggatgatttcccccttcgaaaaactgcctctgagcccaacttgaaggtgcggtccaggttaaaacagaaagtggcagagaggagaagcagccccttactcaggcggaaggatggaaatgttgtcacttcattcaagaagcgaatgtttgaggtgacagaatcctcagtcagtagcagttctccaggctctggtcccagttcaccaaacaatgggccaactggaagtgttactgaaaatgagacttcggttttgccccctacccctcatgccgagcaaatggtttcacagcaacgcattctaattcatgaagattccatgaacctgctaagtctttatacctctccttctttgcccaacattaccttggggcttcccgcagtgccatcccagctcaatgcttcgaattcactcaaagaaaagcagaagtgtgagacgcagacgcttaggcaaggtgttcctctgcctgggcagtatggaggcagcatcccggcatcttccagccaccctcatgttactttagagggaaagccacccaacagcagccaccaggctctcctgcagcatttattattgaaagaacaaatgcgacagcaaaagcttcttgtagctggtggagttcccttacatcctcagtctcccttggcaacaaaagagagaatttcacctggcattagaggtacccacaaattgccccgtcacagacccctgaaccgaacccagtctgcacctttgcctcagagcacgttggctcagctggtcattcaacagcaacaccagcaattcttggagaagcagaagcaataccagcagcagatccacatgaacaaactgctttcgaaatctattgaacaactgaagcaaccaggcagtcaccttgaggaagcagaggaagagcttcagggggaccaggcgatgcaggaagacagagcgccctctagtggcaacagcactaggagcgacagcagtgcttgtgtggatgacacactgggacaagttggggctgtgaaggtcaaggaggaaccagtggacagtgatgaagatgctcagatccaggaaatggaatctggggagcaggctgcttttatgcaacagcctttcctggaacccacgcacacacgtgcgctctctgtgcgccaagctccgctggctgcggttggcatggatggattagagaaacaccgtctcgtctccaggactcactcttcccctgctgcctctgttttacctcacccagcaatggaccgccccctccagcctggctctgcaactggaattgcctatgaccccttgatgctgaaacaccagtgcgtttgtggcaattccaccacccaccctgagcatgctggacgaatacagagtatctggtcacgactgcaagaaactgggctgctaaataaatgtgagcgaattcaaggtcgaaaagccagcctggaggaaatacagcttgttcattctgaacatcactcactgttgtatggcaccaaccccctggacggacagaagctggaccccaggatactcctaggtgatgactctcaaaagtttttttcctcattaccttgtggtggacttggggtggacagtgacaccatttggaatgagctacactcgtccggtgctgcacgcatggctgttggctgtgtcatcgagctggcttccaaagtggcctcaggagagctgaagaatgggtttgctgttgtgaggccccctggccatcacgctgaagaatccacagccatggggttctgcttttttaattcagttgcaattaccgccaaatacttgagagaccaactaaatataagcaagatattgattgtagatctggatgttcaccatggaaacggtacccagcaggccttttatgctgaccccagcatcctgtacatttcactccatcgctatgatgaagggaactttttccctggcagtggagccccaaatgaggttggaacaggccttggagaagggtacaatataaatattgcctggacaggtggccttgatcctcccatgggagatgttgagtaccttgaagcattcaggaccatcgtgaagcctgtggccaaagagtttgatccagacatggtcttagtatctgctggatttgatgcattggaaggccacacccctcctctaggagggtacaaagtgacggcaaaatgttttggtcatttgacgaagcaattgatgacattggctgatggacgtgtggtgttggctctagaaggaggacatgatctcacagccatctgtgatgcatcagaagcctgtgtaaatgcccttctaggaaatgagctggagccacttgcagaagatattctccaccaaagcccgaatatgaatgctgttatttctttacagaagatcattgaaattcaaagcaagtattggaagtcagtaaggatggtggctgtgccaaggggctgtgctctggctggtgctcagttgcaagaggagacagagaccgtttctgccctggcctccctaacagtggatgtggaacagccctttgctcaggaagacagcagaactgctggtgagcctatggaagaggagccagccttgtgaagtgccaagtccccctctgatatttcctgtgtgtgacatcattgtgtatccccccaccccagtaccctcagacatgtcttgtctgctgcctgggtggcacagattcaatggaacataaacactgggcacaaaattctgaacagcagcttcacttgttctttggatggacttgaaagggcattaaagattccttaaacgtaaccgctgtgattctagagttacagtaaaccacgattggaagaaactgcttccagcatgcttttaatatgctgggtgacccactcctagacaccaagtttgaactagaaacattcagtacagcactagatattgttaatttcagaagctatgacagccagtgaaattttgggcaaaacctgagacatagtcattcctgacattctgatcagctttttttggggtaatttgtttttcaaacagtcttaacttgtttacaagatttgcttttagctatgaacggatcgtaattccacccagaatgtaatgtttcttgtttgtttgttttgttttgttagggtttttttctcaactttaacacacagttcaactgttcctagtaaaagttcaagatggaggaactagcatgaggcttttttcagtatctcgaagtccaaatgccaaaggaacctcacacactgtttgtaatggtgcaatattttatatcacttttttttaaacatccccaacatctttgtgttctcacacacaggcaatttgcaatgttgcaattgtgttggagaatgaagtccccccacctcccagccacacacacatcctttgttctcatgacagtaggtctgagcaaatgttccaccaagcattttcagtgtctttgaaaagcacgtaacttttcaaaggtggtcttaatttgttgcatatctatcaaggacttattcactcacctttccttttctgccctctatcaattgatttcttcttacctttcatcattcattccttcctttagaaaaactgaagattacccataatctcctcttattacttgagggccttgactatttagtttattttgtttactttacaggttaacacagttgttttgtctgattgcattttattaactgtgaagccgttgaaatgaatatcacttaagcaacgttgctaaatttctatgtgtttgaaatgtgttaatgaaggcactgcttatttgtagtcaccttgaactgacttaacctagaagctgtgccttcttgtgaaa

SEQ ID NO: 5087 - protein, 1091 aa, Homo sapiens
MMSSPAQPDGVAGREQLLAQQRMHSMISSVDVKSEVPVGLEPISPLDLRTDLRMMMPVVDPVVREKQLQQELLLIQQQQQIQKQLLIAEFQKQHENLTRQHQAQLQEHIKLQQELLAIKQQQELLEKEQKLEQQRQEQEVERHRREQQLPPLRGKDRGRERAVASTEVKQKLQEFLLSKSATKDTPTNGKNHSVSRHPKLWYTAAHHTSLDQSSPPLSGTSPSYKYTLPGAQDAKDDFPLRKTASEPNLKVRSRLKQKVAERRSSPLLRRKDGNVVTSFKKRMFEVTESSVSSSSPGSGPSSPNNGPTGSVTENETSVLPPTPHAEQMVSQQRILIHEDSMNLLSLYTSPSLPNITLGLPAVPSQLNASNSLKEKQKCETQTLRQGVPLPGQYGGSIPASSSHPHVTLEGKPPNSSHQALLQHLLLKEQMRQQKLLVAGGVPLHPQSPLATKERISPGIRGTHKLPRHRPLNRTQSAPLPQSTLAQLVIQQQHQQFLEKQKQYQQQIHMNKLLSKSIEQLKQPGSHLEEAEEELQGDQAMQEDRAPSSGNSTRSDSSACVDDTLGQVGAVKVKEEPVDSDEDAQIQEMESGEQAAFMQQPFLEPTHTRALSVRQAPLAAVGMDGLEKHRLVSRTHSSPAASVLPHPAMDRPLQPGSATGIAYDPLMLKHQCVCGNSTTHPEHAGRIQSIWSRLQETGLLNKCERIQGRKASLEEIQLVHSEHHSLLYGTNPLDGQKLDPRILLGDDSQKFFSSLPCGGLGVDSDTIWNELHSSGAARMAVGCVIELASKVASGELKNGFAVVRPPGHHAEESTAMGFCFFNSVAITAKYLRDQLNISKILIVDLDVHHGNGTQQAFYADPSILYISLHRYDEGNFFPGSGAPNEVGTGLGEGYNINIAWTGGLDPPMGDVEYLEAFRTIVKPVAKEFDPDMVLVSAGFDALEGHTPPLGGYKVTAKCFGHLTKQLMTLADGRVVLALEGGHDLTAICDASEACVNALLGNELEPLAEDILHQSPNMNAVISLQKIIEIQSKYWKSVRMVAVPRGCALAGAQLQEETETVSALASLTVDVEQPFAQEDSRTAGEPMEEEPAL

SEQ ID NO: 5088 - DNA, 4949 bp, Homo sapiens
atgggtgttggcttggtacttgaagccatgaaagctagcctggagcttggggtctaccaggataggcctagacccaagctccacgcatctgtggggacgttccaggtaccgccccacaatgctacctcctctttaaaagaagtcgttcagctggggcgggctggcgctgcgtggcgcgcacctgagcggccggggctccccgagccacggggggcgcgagagggcgaggcagcggcctggcttctccccagcaccccgcggtctcctcctctagcgcccgccgcggccggtaaatctcggctggaggagcagcggcggcccccgagtcaactttcattccctttttgcttctgcctcaccattctcttctcctcctcgaaagatggctgtttggagaagggggagaagttaagaggtcgccagcgcggagcgaaggagggcgcgatagcctcagcaggagcgggcggaggtttctcctctgccaacccctcctggaccattgtcagcagttgaacgacaaaggctgtgaatctgcatcctagtcttagcagtccctctgattctcatgatgagctcacctgcacagcctgatggggtggctggacgagagcagctcttggctcagcaaagaatgcacagtatgatcagctcagtggatgtgaagtcagaagttcctgtgggcctggagcccatctcacctttagacctaaggacagacctcaggatgatgatgcccgtggtggaccctgttgtccgtgagaagcaattgcagcaggaattacttcttatccagcagcagcaacaaatccagaagcagcttctgatagcagagtttcagaaacagcatgagaacttgacacggcagcaccaggctcagcttcaggagcatatcaagttgcaacaggaacttctagccataaaacagcaacaagaactcctagaaaaggagcagaaactggagcagcagaggcaagaacaggaagtagagaggcatcgcagagaacagcagcttcctcctctcagaggcaaagatagaggacgagaaagggcagtggcaagtacagaagtaaagcagaagcttcaagagttcctactgagtaaatcagcaacgaaagacactccaactaatggaaaaaatcattccgtgagccgccatcccaagctctggtacacggctgcccaccacacatcattggatcaaagctctccaccccttagtggaacatctccatcctacaagtacacattaccaggagcacaagatgcaaaggatgatttcccccttcgaaaaactgaatcctcagtcagtagcagttctccaggctctggtcccagttcaccaaacaatgggccaactggaagtgttactgaaaatgagacttcggttttgccccctacccctcatgccgagcaaatggtttcacagcaacgcattctaattcatgaagattccatgaacctgctaagtctttatacctctccttctttgcccaacattaccttggggcttcccgcagtgccatcccagctcaatgcttcgaattcactcaaagaaaagcagaagtgtgagacgcagacgcttaggcaaggtgttcctctgcctgggcagtatggaggcagcatcccggcatcttccagccaccctcatgttactttagagggaaagccacccaacagcagccaccaggctctcctgcagcatttattattgaaagaacaaatgcgacagcaaaagcttcttgtagctggtggagttcccttacatcctcagtctcccttggcaacaaaagagagaatttcacctggcattagaggtacccacaaattgccccgtcacagacccctgaaccgaacccagtctgcacctttgcctcagagcacgttggctcagctggtcattcaacagcaacaccagcaattcttggagaagcagaagcaataccagcagcagatccacatgaacaaactgctttcgaaatctattgaacaactgaagcaaccaggcagtcaccttgaggaagcagaggaagagcttcagggggaccaggcgatgcaggaagacagagcgccctctagtggcaacagcactaggagcgacagcagtgcttgtgtggatgacacactgggacaagttggggctgtgaaggtcaaggaggaaccagtggacagtgatgaagatgctcagatccaggaaatggaatctggggagcaggctgcttttatgcaacagcctttcctggaacccacgcacacacgtgcgctctctgtgcgccaagctccgctggctgcggttggcatggatggattagagaaacaccgtctcgtctccaggactcactcttcccctgctgcctctgttttacctcacccagcaatggaccgccccctccagcctggctctgcaactggaattgcctatgaccccttgatgctgaaacaccagtgcgtttgtggcaattccaccacccaccctgagcatgctggacgaatacagagtatctggtcacgactgcaagaaactgggctgctaaataaatgtgagcgaattcaaggtcgaaaagccagcctggaggaaatacagcttgttcattctgaacatcactcactgttgtatggcaccaaccccctggacggacagaagctggaccccaggatactcctaggtgatgactctcaaaagtttttttcctcattaccttgtggtggacttggggtggacagtgacaccatttggaatgagctacactcgtccggtgctgcacgcatggctgttggctgtgtcatcgagctggcttccaaagtggcctcaggagagctgaagaatgggtttgctgttgtgaggccccctggccatcacgctgaagaatccacagccatggggttctgcttttttaattcagttgcaattaccgccaaatacttgagagaccaactaaatataagcaagatattgattgtagatctggatgttcaccatggaaacggtacccagcaggccttttatgctgaccccagcatcctgtacatttcactccatcgctatgatgaagggaactttttccctggcagtggagccccaaatgaggttggaacaggccttggagaagggtacaatataaatattgcctggacaggtggccttgatcctcccatgggagatgttgagtaccttgaagcattcaggaccatcgtgaagcctgtggccaaagagtttgatccagacatggtcttagtatctgctggatttgatgcattggaaggccacacccctcctctaggagggtacaaagtgacggcaaaatgttttggtcatttgacgaagcaattgatgacattggctgatggacgtgtggtgttggctctagaaggaggacatgatctcacagccatctgtgatgcatcagaagcctgtgtaaatgcccttctaggaaatgagctggagccacttgcagaagatattctccaccaaagcccgaatatgaatgctgttatttctttacagaagatcattgaaattcaaagcaagtattggaagtcagtaaggatggtggctgtgccaaggggctgtgctctggctggtgctcagttgcaagaggagacagagaccgtttctgccctggcctccctaacagtggatgtggaacagccctttgctcaggaagacagcagaactgctggtgagcctatggaagaggagccagccttgtgaagtgccaagtccccctctgatatttcctgtgtgtgacatcattgtgtatccccccaccccagtaccctcagacatgtcttgtctgctgcctgggtggcacagattcaatggaacataaacactgggcacaaaattctgaacagcagcttcacttgttctttggatggacttgaaagggcattaaagattccttaaacgtaaccgctgtgattctagagttacagtaaaccacgattggaagaaactgcttccagcatgcttttaatatgctgggtgacccactcctagacaccaagtttgaactagaaacattcagtacagcactagatattgttaatttcagaagctatgacagccagtgaaattttgggcaaaacctgagacatagtcattcctgacattctgatcagctttttttggggtaatttgtttttcaaacagtcttaacttgtttacaagatttgcttttagctatgaacggatcgtaattccacccagaatgtaatgtttcttgtttgtttgttttgttttgttagggtttttttctcaactttaacacacagttcaactgttcctagtaaaagttcaagatggaggaactagcatgaggcttttttcagtatctcgaagtccaaatgccaaaggaacctcacacactgtttgtaatggtgcaatattttatatcacttttttttaaacatccccaacatctttgtgttctcacacacaggcaatttgcaatgttgcaattgtgttggagaatgaagtccccccacctcccagccacacacacatcctttgttctcatgacagtaggtctgagcaaatgttccaccaagcattttcagtgtctttgaaaagcacgtaacttttcaaaggtggtcttaatttgttgcatatctatcaaggacttattcactcacctttccttttctgccctctatcaattgatttcttcttacctttcatcattcattccttcctttagaaaaactgaagattacccataatctcctcttattacttgagggccttgactatttagtttattttgtttactttacaggttaacacagttgttttgtctgattgcattttattaactgtgaagccgttgaaatgaatatcacttaagcaacgttgctaaatttctatgtgtttgaaatgtgttaatgaaggcactgcttatttgtagtcaccttgaactgacttaacctagaagctgtgccttcttgtgaaa

SEQ ID NO: 5089 - protein, 1047 aa, Homo sapiens
MMSSPAQPDGVAGREQLLAQQRMHSMISSVDVKSEVPVGLEPISPLDLRTDLRMMMPVVDPVVREKQLQQELLLIQQQQQIQKQLLIAEFQKQHENLTRQHQAQLQEHIKLQQELLAIKQQQELLEKEQKLEQQRQEQEVERHRREQQLPPLRGKDRGRERAVASTEVKQKLQEFLLSKSATKDTPTNGKNHSVSRHPKLWYTAAHHTSLDQSSPPLSGTSPSYKYTLPGAQDAKDDFPLRKTESSVSSSSPGSGPSSPNNGPTGSVTENETSVLPPTPHAEQMVSQQRILIHEDSMNLLSLYTSPSLPNITLGLPAVPSQLNASNSLKEKQKCETQTLRQGVPLPGQYGGSIPASSSHPHVTLEGKPPNSSHQALLQHLLLKEQMRQQKLLVAGGVPLHPQSPLATKERISPGIRGTHKLPRHRPLNRTQSAPLPQSTLAQLVIQQQHQQFLEKQKQYQQQIHMNKLLSKSIEQLKQPGSHLEEAEEELQGDQAMQEDRAPSSGNSTRSDSSACVDDTLGQVGAVKVKEEPVDSDEDAQIQEMESGEQAAFMQQPFLEPTHTRALSVRQAPLAAVGMDGLEKHRLVSRTHSSPAASVLPHPAMDRPLQPGSATGIAYDPLMLKHQCVCGNSTTHPEHAGRIQSIWSRLQETGLLNKCERIQGRKASLEEIQLVHSEHHSLLYGTNPLDGQKLDPRILLGDDSQKFFSSLPCGGLGVDSDTIWNELHSSGAARMAVGCVIELASKVASGELKNGFAVVRPPGHHAEESTAMGFCFFNSVAITAKYLRDQLNISKILIVDLDVHHGNGTQQAFYADPSILYISLHRYDEGNFFPGSGAPNEVGTGLGEGYNINIAWTGGLDPPMGDVEYLEAFRTIVKPVAKEFDPDMVLVSAGFDALEGHTPPLGGYKVTAKCFGHLTKQLMTLADGRVVLALEGGHDLTAICDASEACVNALLGNELEPLAEDILHQSPNMNAVISLQKIIEIQSKYWKSVRMVAVPRGCALAGAQLQEETETVSALASLTVDVEQPFAQEDSRTAGEPMEEEPAL

SEQ ID NO: 5090 - DNA, 553 bp, Homo sapiens
aatgagaggtgctggtgtcaggcctgtgtgtctgtgatgtgacagagcgggactgagctctctccagatccgaggcgcggttgtcaggagaggtggcctgcaacggagagctgaggatgcagttcctgtgatgtggacttggagaattctctagtttctcctctgccaacccctcctggaccattgtcagcagttgaacgacaaaggctgtgaatctgcatcctagtcttagcagtccctctgattctcatgatgagctcacctgcacagcctggtcagtctggttgcttcttaaactgttaatagacttcatgtgaaagatgttgctttgtgttgtttcaaaccaagtaatttaatttatgaaggaacttttttttttttggacaaagattgcttaatgtaacaaattttgaattttgcattcgatagctaattctctattgcttaacccagtttgcttcctggacaactgatttgatttgcattgtagtctgagcatgggactttaattcttctgcttccaaggtaacattcagattgaactttatgaagt

SEQ ID NO: 5091 - protein, 32 aa, Homo sapiens
GCSSCDVDLENSLVSPLPTPPGPLSAVERQRL

SEQ ID NO: 5092 - DNA, 982 bp, Homo sapiens
cttgagataattttgaggataattttgacagtggaaatgttttatgatatgaggaatataaaaatagatcatttaattcacagaatagttgaaggacacagcaaggtttctcctctgccaacccctcctggaccattgtcagcagttgaacgacaaaggctgtgaatctgcatcctagtcttagcagtccctctgattctcatgatgagctcacctgcacagcctgaaatgaggtcttactgtgttgcccaggctggtatcaaactccagtgatcaagtggtcctcctacctcagcctcccaaacagatatgacagctgcatagattcaacctactatgaaaagccaaaacatggaatattacactaattaaacggttacacaacagaacatggaatgtgcgacacttcatcttgggatgcaaatttttgtgctaaaaaaaactgagaaaaacaaaaagaaaaacatgtatttctgaggaacttgtttttatatctggcataaatgagaaaaagctaattaaaactattaattatcagaaaattgaagataaagttgaagagcctataccaaccaaagttgaataaatggcaaaatataatatagatgagttactctgaaataattttttatttcctactatctaacttaccaaacttcctgattttaattacataacaattttttggttattttaatattcatttggtacttatttccttttttattgttatagtattagatgaaatcataacatcaatttgctcctttgtaaaagaggatgttgagttagaagtgttctaaggtggctttcagcaataggctgccataccaattggaaaaatctagcatggtataaaagaatatttaagcagtaattatgactggaaaacatcagagtggaaatgaagtatggctgagaaacctttttgcttttagctttttttggagttcattacaataaaatgaaattatagaaactt

SEQ ID NO: 5093 - protein, 42 aa, Homo sapiens
MFYDMRNIKIDHLIHRIVEGHSKVSPLPTPPGPLSAVERQRL

SEQ ID NO: 5094 - DNA, 4984 bp, Homo sapiens
gagtatacttagagtatggagctgacaaacattctctttccttctcctcctcctcctcctcattctgttgaattgctggtttctgtagtctattaggcttcttattaatagtaataaaatgttcattcattaactctctcatgcctgcataccagctatagtaactgtctttgcccccaagttatgcagtctttataaagtcgttcagtagcagggcaatgagttgggaaaactgatattgcatctgtagcatcaggtactatttaaccagtgggagggactgataaaattagcaagttgactaaccacttcccttccttgtggctctttaatattataacggatacagaaaagttcagaaggactgagctagtttgcgaaaccacagcacactttggcaaagagggaatgcacaacaaaacgggagtacctggtaaaatgctgtggtgtatggagacagttatgagaaactggagggaggatgatagttgagatggggtggctggacgagagcagctcttggctcagcaaagaatgcacagtatgatcagctcagtggatgtgaagtcagaagttcctgtgggcctggagcccatctcacctttagacctaaggacagacctcaggatgatgatgcccgtggtggaccctgttgtccgtgagaagcaattgcagcaggaattacttcttatccagcagcagcaacaaatccagaagcagcttctgatagcagagtttcagaaacagcatgagaacttgacacggcagcaccaggctcagcttcaggagcatatcaagttgcaacaggaacttctagccataaaacagcaacaagaactcctagaaaaggagcagaaactggagcagcagaggcaagaacaggaagtagagaggcatcgcagagaacagcagcttcctcctctcagaggcaaagatagaggacgagaaagggcagtggcaagtacagaagtaaagcagaagcttcaagagttcctactgagtaaatcagcaacgaaagacactccaactaatggaaaaaatcattccgtgagccgccatcccaagctctggtacacggctgcccaccacacatcattggatcaaagctctccaccccttagtggaacatctccatcctacaagtacacattaccaggagcacaagatgcaaaggatgatttcccccttcgaaaaactgcctctgagcccaacttgaaggtgcggtccaggttaaaacagaaagtggcagagaggagaagcagccccttactcaggcggaaggatggaaatgttgtcacttcattcaagaagcgaatgtttgaggtgacagaatcctcagtcagtagcagttctccaggctctggtcccagttcaccaaacaatgggccaactggaagtgttactgaaaatgagacttcggttttgccccctacccctcatgccgagcaaatggtttcacagcaacgcattctaattcatgaagattccatgaacctgctaagtctttatacctctccttctttgcccaacattaccttggggcttcccgcagtgccatcccagctcaatgcttcgaattcactcaaagaaaagcagaagtgtgagacgcagacgcttaggcaaggtgttcctctgcctgggcagtatggaggcagcatcccggcatcttccagccaccctcatgttactttagagggaaagccacccaacagcagccaccaggctctcctgcagcatttattattgaaagaacaaatgcgacagcaaaagcttcttgtagctggtggagttcccttacatcctcagtctcccttggcaacaaaagagagaatttcacctggcattagaggtacccacaaattgccccgtcacagacccctgaaccgaacccagtctgcacctttgcctcagagcacgttggctcagctggtcattcaacagcaacaccagcaattcttggagaagcagaagcaataccagcagcagatccacatgaacaaactgctttcgaaatctattgaacaactgaagcaaccaggcagtcaccttgaggaagcagaggaagagcttcagggggaccaggcgatgcaggaagacagagcgccctctagtggcaacagcactaggagcgacagcagtgcttgtgtggatgacacactgggacaagttggggctgtgaaggtcaaggaggaaccagtggacagtgatgaagatgctcagatccaggaaatggaatctggggagcaggctgcttttatgcaacagcctttcctggaacccacgcacacacgtgcgctctctgtgcgccaagctccgctggctgcggttggcatggatggattagagaaacaccgtctcgtctccaggactcactcttcccctgctgcctctgttttacctcacccagcaatggaccgccccctccagcctggctctgcaactggaattgcctatgaccccttgatgctgaaacaccagtgcgtttgtggcaattccaccacccaccctgagcatgctggacgaatacagagtatctggtcacgactgcaagaaactgggctgctaaataaatgtgagcgaattcaaggtcgaaaagccagcctggaggaaatacagcttgttcattctgaacatcactcactgttgtatggcaccaaccccctggacggacagaagctggaccccaggatactcctaggtgatgactctcaaaagtttttttcctcattaccttgtggtggacttggggtggacagtgacaccatttggaatgagctacactcgtccggtgctgcacgcatggctgttggctgtgtcatcgagctggcttccaaagtggcctcaggagagctgaagaatgggtttgctgttgtgaggccccctggccatcacgctgaagaatccacagccatggggttctgcttttttaattcagttgcaattaccgccaaatacttgagagaccaactaaatataagcaagatattgattgtagatctggatgttcaccatggaaacggtacccagcaggccttttatgctgaccccagcatcctgtacatttcactccatcgctatgatgaagggaactttttccctggcagtggagccccaaatgaggttggaacaggccttggagaagggtacaatataaatattgcctggacaggtggccttgatcctcccatgggagatgttgagtaccttgaagcattcaggaccatcgtgaagcctgtggccaaagagtttgatccagacatggtcttagtatctgctggatttgatgcattggaaggccacacccctcctctaggagggtacaaagtgacggcaaaatgttttggtcatttgacgaagcaattgatgacattggctgatggacgtgtggtgttggctctagaaggaggacatgatctcacagccatctgtgatgcatcagaagcctgtgtaaatgcccttctaggaaatgagctggagccacttgcagaagatattctccaccaaagcccgaatatgaatgctgttatttctttacagaagatcattgaaattcaaagcaagtattggaagtcagtaaggatggtggctgtgccaaggggctgtgctctggctggtgctcagttgcaagaggagacagagaccgtttctgccctggcctccctaacagtggatgtggaacagccctttgctcaggaagacagcagaactgctggtgagcctatggaagaggagccagccttgtgaagtgccaagtccccctctgatatttcctgtgtgtgacatcattgtgtatccccccaccccagtaccctcagacatgtcttgtctgctgcctgggtggcacagattcaatggaacataaacactgggcacaaaattctgaacagcagcttcacttgttctttggatggacttgaaagggcattaaagattccttaaacgtaaccgctgtgattctagagttacagtaaaccacgattggaagaaactgcttccagcatgcttttaatatgctgggtgacccactcctagacaccaagtttgaactagaaacattcagtacagcactagatattgttaatttcagaagctatgacagccagtgaaattttgggcaaaacctgagacatagtcattcctgacattctgatcagctttttttggggtaatttgtttttcaaacagtcttaacttgtttacaagatttgcttttagctatgaacggatcgtaattccacccagaatgtaatgtttcttgtttgtttgttttgttttgttagggtttttttctcaactttaacacacagttcaactgttcctagtaaaagttcaagatggaggaactagcatgaggcttttttcagtatctcgaagtccaaatgccaaaggaacctcacacactgtttgtaatggtgcaatattttatatcacttttttttaaacatccccaacatctttgtgttctcacacacaggcaatttgcaatgttgcaattgtgttggagaatgaagtccccccacctcccagccacacacacatcctttgttctcatgacagtaggtctgagcaaatgttccaccaagcattttcagtgtctttgaaaagcacgtaacttttcaaaggtggtcttaatttgttgcatatctatcaaggacttattcactcacctttccttttctgccctctatcaattgatttcttcttacctttcatcattcattccttcctttagaaaaactgaagattacccataatctcctcttattacttgagggccttgactatttagtttattttgtttactttacaggttaacacagttgttttgtctgattgcattttattaactgtgaagccgttgaaatgaatatcacttaagcaacgttgctaaatttctatgtgtttgaaatgtgttaatgaaggcactgcttatttgtagtcaccttgaactgacttaacctagaagctgtgccttcttgtgaaa

SEQ ID NO: 5095 - protein, 1069 aa, Homo sapiens; identical to SEQ ID NO: 673

SEQ ID NO: 5096 - DNA, 4585 bp, Homo sapiens
aatattataacggatacagaaaagttcagaaggactgagctagtttgcgaaaccacagcacactttggcaaagagggaatgcacaacaaaacggatggggtggctggacgagagcagctcttggctcagcaaagaatgcacagtatgatcagctcagtggatgtgaagtcagaagttcctgtgggcctggagcccatctcacctttagacctaaggacagacctcaggatgatgatgcccgtggtggaccctgttgtccgtgagaagcaattgcagcaggaattacttcttatccagcagcagcaacaaatccagaagcagcttctgatagcagagtttcagaaacagcatgagaacttgacacggcagcaccaggctcagcttcaggagcatatcaagttgcaacaggaacttctagccataaaacagcaacaagaactcctagaaaaggagcagaaactggagcagcagaggcaagaacaggaagtagagaggcatcgcagagaacagcagcttcctcctctcagaggcaaagatagaggacgagaaagggcagtggcaagtacagaagtaaagcagaagcttcaagagttcctactgagtaaatcagcaacgaaagacactccaactaatggaaaaaatcattccgtgagccgccatcccaagctctggtacacggctgcccaccacacatcattggatcaaagctctccaccccttagtggaacatctccatcctacaagtacacattaccaggagcacaagatgcaaaggatgatttcccccttcgaaaaactgcctctgagcccaacttgaaggtgcggtccaggttaaaacagaaagtggcagagaggagaagcagccccttactcaggcggaaggatggaaatgttgtcacttcattcaagaagcgaatgtttgaggtgacagaatcctcagtcagtagcagttctccaggctctggtcccagttcaccaaacaatgggccaactggaagtgttactgaaaatgagacttcggttttgccccctacccctcatgccgagcaaatggtttcacagcaacgcattctaattcatgaagattccatgaacctgctaagtctttatacctctccttctttgcccaacattaccttggggcttcccgcagtgccatcccagctcaatgcttcgaattcactcaaagaaaagcagaagtgtgagacgcagacgcttaggcaaggtgttcctctgcctgggcagtatggaggcagcatcccggcatcttccagccaccctcatgttactttagagggaaagccacccaacagcagccaccaggctctcctgcagcatttattattgaaagaacaaatgcgacagcaaaagcttcttgtagctggtggagttcccttacatcctcagtctcccttggcaacaaaagagagaatttcacctggcattagaggtacccacaaattgccccgtcacagacccctgaaccgaacccagtctgcacctttgcctcagagcacgttggctcagctggtcattcaacagcaacaccagcaattcttggagaagcagaagcaataccagcagcagatccacatgaacaaactgctttcgaaatctattgaacaactgaagcaaccaggcagtcaccttgaggaagcagaggaagagcttcagggggaccaggcgatgcaggaagacagagcgccctctagtggcaacagcactaggagcgacagcagtgcttgtgtggatgacacactgggacaagttggggctgtgaaggtcaaggaggaaccagtggacagtgatgaagatgctcagatccaggaaatggaatctggggagcaggctgcttttatgcaacagcctttcctggaacccacgcacacacgtgcgctctctgtgcgccaagctccgctggctgcggttggcatggatggattagagaaacaccgtctcgtctccaggactcactcttcccctgctgcctctgttttacctcacccagcaatggaccgccccctccagcctggctctgcaactggaattgcctatgaccccttgatgctgaaacaccagtgcgtttgtggcaattccaccacccaccctgagcatgctggacgaatacagagtatctggtcacgactgcaagaaactgggctgctaaataaatgtgagcgaattcaaggtcgaaaagccagcctggaggaaatacagcttgttcattctgaacatcactcactgttgtatggcaccaaccccctggacggacagaagctggaccccaggatactcctaggtgatgactctcaaaagtttttttcctcattaccttgtggtggacttggggtggacagtgacaccatttggaatgagctacactcgtccggtgctgcacgcatggctgttggctgtgtcatcgagctggcttccaaagtggcctcaggagagctgaagaatgggtttgctgttgtgaggccccctggccatcacgctgaagaatccacagccatggggttctgcttttttaattcagttgcaattaccgccaaatacttgagagaccaactaaatataagcaagatattgattgtagatctggatgttcaccatggaaacggtacccagcaggccttttatgctgaccccagcatcctgtacatttcactccatcgctatgatgaagggaactttttccctggcagtggagccccaaatgaggttggaacaggccttggagaagggtacaatataaatattgcctggacaggtggccttgatcctcccatgggagatgttgagtaccttgaagcattcaggaccatcgtgaagcctgtggccaaagagtttgatccagacatggtcttagtatctgctggatttgatgcattggaaggccacacccctcctctaggagggtacaaagtgacggcaaaatgttttggtcatttgacgaagcaattgatgacattggctgatggacgtgtggtgttggctctagaaggaggacatgatctcacagccatctgtgatgcatcagaagcctgtgtaaatgcccttctaggaaatgagctggagccacttgcagaagatattctccaccaaagcccgaatatgaatgctgttatttctttacagaagatcattgaaattcaaagcaagtattggaagtcagtaaggatggtggctgtgccaaggggctgtgctctggctggtgctcagttgcaagaggagacagagaccgtttctgccctggcctccctaacagtggatgtggaacagccctttgctcaggaagacagcagaactgctggtgagcctatggaagaggagccagccttgtgaagtgccaagtccccctctgatatttcctgtgtgtgacatcattgtgtatccccccaccccagtaccctcagacatgtcttgtctgctgcctgggtggcacagattcaatggaacataaacactgggcacaaaattctgaacagcagcttcacttgttctttggatggacttgaaagggcattaaagattccttaaacgtaaccgctgtgattctagagttacagtaaaccacgattggaagaaactgcttccagcatgcttttaatatgctgggtgacccactcctagacaccaagtttgaactagaaacattcagtacagcactagatattgttaatttcagaagctatgacagccagtgaaattttgggcaaaacctgagacatagtcattcctgacattctgatcagctttttttggggtaatttgtttttcaaacagtcttaacttgtttacaagatttgcttttagctatgaacggatcgtaattccacccagaatgtaatgtttcttgtttgtttgttttgttttgttagggtttttttctcaactttaacacacagttcaactgttcctagtaaaagttcaagatggaggaactagcatgaggcttttttcagtatctcgaagtccaaatgccaaaggaacctcacacactgtttgtaatggtgcaatattttatatcacttttttttaaacatccccaacatctttgtgttctcacacacaggcaatttgcaatgttgcaattgtgttggagaatgaagtccccccacctcccagccacacacacatcctttgttctcatgacagtaggtctgagcaaatgttccaccaagcattttcagtgtctttgaaaagcacgtaacttttcaaaggtggtcttaatttgttgcatatctatcaaggacttattcactcacctttccttttctgccctctatcaattgatttcttcttacctttcatcattcattccttcctttagaaaaactgaagattacccataatctcctcttattacttgagggccttgactatttagtttattttgtttactttacaggttaacacagttgttttgtctgattgcattttattaactgtgaagccgttgaaatgaatatcacttaagcaacgttgctaaatttctatgtgtttgaaatgtgttaatgaaggcactgcttatttgtagtcaccttgaactgacttaacctagaagctgtgccttcttgtgaaa

SEQ ID NO: 5097 - protein, 1088 aa, Homo sapiens
MHNKTDGVAGREQLLAQQRMHSMISSVDVKSEVPVGLEPISPLDLRTDLRMMMPVVDPVVREKQLQQELLLIQQQQQIQKQLLIAEFQKQHENLTRQHQAQLQEHIKLQQELLAIKQQQELLEKEQKLEQQRQEQEVERHRREQQLPPLRGKDRGRERAVASTEVKQKLQEFLLSKSATKDTPTNGKNHSVSRHPKLWYTAAHHTSLDQSSPPLSGTSPSYKYTLPGAQDAKDDFPLRKTASEPNLKVRSRLKQKVAERRSSPLLRRKDGNVVTSFKKRMFEVTESSVSSSSPGSGPSSPNNGPTGSVTENETSVLPPTPHAEQMVSQQRILIHEDSMNLLSLYTSPSLPNITLGLPAVPSQLNASNSLKEKQKCETQTLRQGVPLPGQYGGSIPASSSHPHVTLEGKPPNSSHQALLQHLLLKEQMRQQKLLVAGGVPLHPQSPLATKERISPGIRGTHKLPRHRPLNRTQSAPLPQSTLAQLVIQQQHQQFLEKQKQYQQQIHMNKLLSKSIEQLKQPGSHLEEAEEELQGDQAMQEDRAPSSGNSTRSDSSACVDDTLGQVGAVKVKEEPVDSDEDAQIQEMESGEQAAFMQQPFLEPTHTRALSVRQAPLAAVGMDGLEKHRLVSRTHSSPAASVLPHPAMDRPLQPGSATGIAYDPLMLKHQCVCGNSTTHPEHAGRIQSIWSRLQETGLLNKCERIQGRKASLEEIQLVHSEHHSLLYGTNPLDGQKLDPRILLGDDSQKFFSSLPCGGLGVDSDTIWNELHSSGAARMAVGCVIELASKVASGELKNGFAVVRPPGHHAEESTAMGFCFFNSVAITAKYLRDQLNISKILIVDLDVHHGNGTQQAFYADPSILYISLHRYDEGNFFPGSGAPNEVGTGLGEGYNINIAWTGGLDPPMGDVEYLEAFRTIVKPVAKEFDPDMVLVSAGFDALEGHTPPLGGYKVTAKCFGHLTKQLMTLADGRVVLALEGGHDLTAICDASEACVNALLGNELEPLAEDILHQSPNMNAVISLQKIIEIQSKYWKSVRMVAVPRGCALAGAQLQEETETVSALASLTVDVEQPFAQEDSRTAGEPMEEEPAL

SEQ ID NO: 5098 - DNA, 5166 bp, Homo sapiens
atactacaaaaataaaatgaaatgaaatgtatgtgcatttgccctcttagaattatgattcttaattttttttcttgccttcctttctttggaagcgaatcgccagtatggaaacacagtgtgtaaagcaagcttcgagagaggaaagagttaattggttttaaggccctgcgatagagaattatggttggaaagatagaggctggacagctgggtttgctggggtatttttaaatgcattaatgcaggctccaatcactcggccatgcttgacctatttttggctcaggccgaccattgttctatttctgtgcctgtgggccatgctgttgttgattcatatgcaaatggattatcactcgctttagccaacttgagctgagagagactgagaaagggggaagagaggcacagacacagataggagaagggcaccggctggagccacttgcaggactgagggtttttgcaacaaaaccctagcagcctgaagaactctaagccaggtttaattggtttctttttctcgtgggtagacttaataattttctacgtattctgacaaagaaataaccccgaagcacgttcctatttcccacctgcttgtagtttccgggataacctaaactccagagagctatagcatccactctgtcctttctgctttgcacacagatggggtggctggacgagagcagctcttggctcagcaaagaatgcacagtatgatcagctcagtggatgtgaagtcagaagttcctgtgggcctggagcccatctcacctttagacctaaggacagacctcaggatgatgatgcccgtggtggaccctgttgtccgtgagaagcaattgcagcaggaattacttcttatccagcagcagcaacaaatccagaagcagcttctgatagcagagtttcagaaacagcatgagaacttgacacggcagcaccaggctcagcttcaggagcatatcaagttgcaacaggaacttctagccataaaacagcaacaagaactcctagaaaaggagcagaaactggagcagcagaggcaagaacaggaagtagagaggcatcgcagagaacagcagcttcctcctctcagaggcaaagatagaggacgagaaagggcagtggcaagtacagaagtaaagcagaagcttcaagagttcctactgagtaaatcagcaacgaaagacactccaactaatggaaaaaatcattccgtgagccgccatcccaagctctggtacacggctgcccaccacacatcattggatcaaagctctccaccccttagtggaacatctccatcctacaagtacacattaccaggagcacaagatgcaaaggatgatttcccccttcgaaaaactgcctctgagcccaacttgaaggtgcggtccaggttaaaacagaaagtggcagagaggagaagcagccccttactcaggcggaaggatggaaatgttgtcacttcattcaagaagcgaatgtttgaggtgacagaatcctcagtcagtagcagttctccaggctctggtcccagttcaccaaacaatgggccaactggaagtgttactgaaaatgagacttcggttttgccccctacccctcatgccgagcaaatggtttcacagcaacgcattctaattcatgaagattccatgaacctgctaagtctttatacctctccttctttgcccaacattaccttggggcttcccgcagtgccatcccagctcaatgcttcgaattcactcaaagaaaagcagaagtgtgagacgcagacgcttaggcaaggtgttcctctgcctgggcagtatggaggcagcatcccggcatcttccagccaccctcatgttactttagagggaaagccacccaacagcagccaccaggctctcctgcagcatttattattgaaagaacaaatgcgacagcaaaagcttcttgtagctggtggagttcccttacatcctcagtctcccttggcaacaaaagagagaatttcacctggcattagaggtacccacaaattgccccgtcacagacccctgaaccgaacccagtctgcacctttgcctcagagcacgttggctcagctggtcattcaacagcaacaccagcaattcttggagaagcagaagcaataccagcagcagatccacatgaacaaactgctttcgaaatctattgaacaactgaagcaaccaggcagtcaccttgaggaagcagaggaagagcttcagggggaccaggcgatgcaggaagacagagcgccctctagtggcaacagcactaggagcgacagcagtgcttgtgtggatgacacactgggacaagttggggctgtgaaggtcaaggaggaaccagtggacagtgatgaagatgctcagatccaggaaatggaatctggggagcaggctgcttttatgcaacagcctttcctggaacccacgcacacacgtgcgctctctgtgcgccaagctccgctggctgcggttggcatggatggattagagaaacaccgtctcgtctccaggactcactcttcccctgctgcctctgttttacctcacccagcaatggaccgccccctccagcctggctctgcaactggaattgcctatgaccccttgatgctgaaacaccagtgcgtttgtggcaattccaccacccaccctgagcatgctggacgaatacagagtatctggtcacgactgcaagaaactgggctgctaaataaatgtgagcgaattcaaggtcgaaaagccagcctggaggaaatacagcttgttcattctgaacatcactcactgttgtatggcaccaaccccctggacggacagaagctggaccccaggatactcctaggtgatgactctcaaaagtttttttcctcattaccttgtggtggacttggggtggacagtgacaccatttggaatgagctacactcgtccggtgctgcacgcatggctgttggctgtgtcatcgagctggcttccaaagtggcctcaggagagctgaagaatgggtttgctgttgtgaggccccctggccatcacgctgaagaatccacagccatggggttctgcttttttaattcagttgcaattaccgccaaatacttgagagaccaactaaatataagcaagatattgattgtagatctggatgttcaccatggaaacggtacccagcaggccttttatgctgaccccagcatcctgtacatttcactccatcgctatgatgaagggaactttttccctggcagtggagccccaaatgaggttggaacaggccttggagaagggtacaatataaatattgcctggacaggtggccttgatcctcccatgggagatgttgagtaccttgaagcattcaggaccatcgtgaagcctgtggccaaagagtttgatccagacatggtcttagtatctgctggatttgatgcattggaaggccacacccctcctctaggagggtacaaagtgacggcaaaatgttttggtcatttgacgaagcaattgatgacattggctgatggacgtgtggtgttggctctagaaggaggacatgatctcacagccatctgtgatgcatcagaagcctgtgtaaatgcccttctaggaaatgagctggagccacttgcagaagatattctccaccaaagcccgaatatgaatgctgttatttctttacagaagatcattgaaattcaaagcaagtattggaagtcagtaaggatggtggctgtgccaaggggctgtgctctggctggtgctcagttgcaagaggagacagagaccgtttctgccctggcctccctaacagtggatgtggaacagccctttgctcaggaagacagcagaactgctggtgagcctatggaagaggagccagccttgtgaagtgccaagtccccctctgatatttcctgtgtgtgacatcattgtgtatccccccaccccagtaccctcagacatgtcttgtctgctgcctgggtggcacagattcaatggaacataaacactgggcacaaaattctgaacagcagcttcacttgttctttggatggacttgaaagggcattaaagattccttaaacgtaaccgctgtgattctagagttacagtaaaccacgattggaagaaactgcttccagcatgcttttaatatgctgggtgacccactcctagacaccaagtttgaactagaaacattcagtacagcactagatattgttaatttcagaagctatgacagccagtgaaattttgggcaaaacctgagacatagtcattcctgacattctgatcagctttttttggggtaatttgtttttcaaacagtcttaacttgtttacaagatttgcttttagctatgaacggatcgtaattccacccagaatgtaatgtttcttgtttgtttgttttgttttgttagggtttttttctcaactttaacacacagttcaactgttcctagtaaaagttcaagatggaggaactagcatgaggcttttttcagtatctcgaagtccaaatgccaaaggaacctcacacactgtttgtaatggtgcaatattttatatcacttttttttaaacatccccaacatctttgtgttctcacacacaggcaatttgcaatgttgcaattgtgttggagaatgaagtccccccacctcccagccacacacacatcctttgttctcatgacagtaggtctgagcaaatgttccaccaagcattttcagtgtctttgaaaagcacgtaacttttcaaaggtggtcttaatttgttgcatatctatcaaggacttattcactcacctttccttttctgccctctatcaattgatttcttcttacctttcatcattcattccttcctttagaaaaactgaagattacccataatctcctcttattacttgagggccttgactatttagtttattttgtttactttacaggttaacacagttgttttgtctgattgcattttattaactgtgaagccgttgaaatgaatatcacttaagcaacgttgctaaatttctatgtgtttgaaatgtgttaatgaaggcactgcttatttgtagtcaccttgaactgacttaacctagaagctgtgccttcttgtgaaa

SEQ ID NO: 5099 - protein, 1069 aa, Homo sapiens; identical to SEQ ID NO: 673

SEQ ID NO: 5100 - DNA, 4659 bp, Homo sapiens
ggggaagagaggcacagacacagataggagaagggcaccggctggagccacttgcaggactgagggtttttgcaacaaaaccctagcagcctgaagaactctaagccagatggggtggctggacgagagcagctcttggctcagcaaagaatgcacagtatgatcagctcagtggatgtgaagtcagaagttcctgtgggcctggagcccatctcacctttagacctaaggacagacctcaggatgatgatgcccgtggtggaccctgttgtccgtgagaagcaattgcagcaggaattacttcttatccagcagcagcaacaaatccagaagcagcttctgatagcagagtttcagaaacagcatgagaacttgacacggcagcaccaggctcagcttcaggagcatatcaagttgcaacaggaacttctagccataaaacagcaacaagaactcctagaaaaggagcagaaactggagcagcagaggcaagaacaggaagtagagaggcatcgcagagaacagcagcttcctcctctcagaggcaaagatagaggacgagaaagggcagtggcaagtacagaagtaaagcagaagcttcaagagttcctactgagtaaatcagcaacgaaagacactccaactaatggaaaaaatcattccgtgagccgccatcccaagctctggtacacggctgcccaccacacatcattggatcaaagctctccaccccttagtggaacatctccatcctacaagtacacattaccaggagcacaagatgcaaaggatgatttcccccttcgaaaaactgcctctgagcccaacttgaaggtgcggtccaggttaaaacagaaagtggcagagaggagaagcagccccttactcaggcggaaggatggaaatgttgtcacttcattcaagaagcgaatgtttgaggtgacagaatcctcagtcagtagcagttctccaggctctggtcccagttcaccaaacaatgggccaactggaagtgttactgaaaatgagacttcggttttgccccctacccctcatgccgagcaaatggtttcacagcaacgcattctaattcatgaagattccatgaacctgctaagtctttatacctctccttctttgcccaacattaccttggggcttcccgcagtgccatcccagctcaatgcttcgaattcactcaaagaaaagcagaagtgtgagacgcagacgcttaggcaaggtgttcctctgcctgggcagtatggaggcagcatcccggcatcttccagccaccctcatgttactttagagggaaagccacccaacagcagccaccaggctctcctgcagcatttattattgaaagaacaaatgcgacagcaaaagcttcttgtagctggtggagttcccttacatcctcagtctcccttggcaacaaaagagagaatttcacctggcattagaggtacccacaaattgccccgtcacagacccctgaaccgaacccagtctgcacctttgcctcagagcacgttggctcagctggtcattcaacagcaacaccagcaattcttggagaagcagaagcaataccagcagcagatccacatgaacaaactgctttcgaaatctattgaacaactgaagcaaccaggcagtcaccttgaggaagcagaggaagagcttcagggggaccaggcgatgcaggaagacagagcgccctctagtggcaacagcactaggagcgacagcagtgcttgtgtggatgacacactgggacaagttggggctgtgaaggtcaaggaggaaccagtggacagtgatgaagatgctcagatccaggaaatggaatctggggagcaggctgcttttatgcaacagcctttcctggaacccacgcacacacgtgcgctctctgtgcgccaagctccgctggctgcggttggcatggatggattagagaaacaccgtctcgtctccaggactcactcttcccctgctgcctctgttttacctcacccagcaatggaccgccccctccagcctggctctgcaactggaattgcctatgaccccttgatgctgaaacaccagtgcgtttgtggcaattccaccacccaccctgagcatgctggacgaatacagagtatctggtcacgactgcaagaaactgggctgctaaataaatgtgagcgaattcaaggtcgaaaagccagcctggaggaaatacagcttgttcattctgaacatcactcactgttgtatggcaccaaccccctggacggacagaagctggaccccaggatactcctaggtgatgactctcaaaagtttttttcctcattaccttgtggtggacttggggtggacagtgacaccatttggaatgagctacactcgtccggtgctgcacgcatggctgttggctgtgtcatcgagctggcttccaaagtggcctcaggagagctgaagaatgggtttgctgttgtgaggccccctggccatcacgctgaagaatccacagccatggggttctgcttttttaattcagttgcaattaccgccaaatacttgagagaccaactaaatataagcaagatattgattgtagatctggatgttcaccatggaaacggtacccagcaggccttttatgctgaccccagcatcctgtacatttcactccatcgctatgatgaagggaactttttccctggcagtggagccccaaatgaggttggaacaggccttggagaagggtacaatataaatattgcctggacaggtggccttgatcctcccatgggagatgttgagtaccttgaagcattcaggaccatcgtgaagcctgtggccaaagagtttgatccagacatggtcttagtatctgctggatttgatgcattggaaggccacacccctcctctaggagggtacaaagtgacggcaaaatgttttggtcatttgacgaagcaattgatgacattggctgatggacgtgtggtgttggctctagaaggaggacatgatctcacagccatctgtgatgcatcagaagcctgtgtaaatgcccttctaggaaatgagctggagccacttgcagaagatattctccaccaaagcccgaatatgaatgctgttatttctttacagaagatcattgaaattcaaagcaagtattggaagtcagtaaggatggtggctgtgccaaggggctgtgctctggctggtgctcagttgcaagaggagacagagaccgtttctgccctggcctccctaacagtggatgtggaacagccctttgctcaggaagacagcagaactgctggtgagcctatggaagaggagccagccttgtgaagtgccaagtccccctctgatatttcctgtgtgtgacatcattgtgtatccccccaccccagtaccctcagacatgtcttgtctgctgcctgggtggcacagattcaatggaacataaacactgggcacaaaattctgaacagcagcttcacttgttctttggatggacttgaaagggcattaaagattccttaaacgtaaccgctgtgattctagagttacagtaaaccacgattggaagaaactgcttccagcatgcttttaatatgctgggtgacccactcctagacaccaagtttgaactagaaacattcagtacagcactagatattgttaatttcagaagctatgacagccagtgaaattttgggcaaaacctgagacatagtcattcctgacattctgatcagctttttttggggtaatttgtttttcaaacagtcttaacttgtttacaagatttgcttttagctatgaacggatcgtaattccacccagaatgtaatgtttcttgtttgtttgttttgttttgttagggtttttttctcaactttaacacacagttcaactgttcctagtaaaagttcaagatggaggaactagcatgaggcttttttcagtatctcgaagtccaaatgccaaaggaacctcacacactgtttgtaatggtgcaatattttatatcacttttttttaaacatccccaacatctttgtgttctcacacacaggcaatttgcaatgttgcaattgtgttggagaatgaagtccccccacctcccagccacacacacatcctttgttctcatgacagtaggtctgagcaaatgttccaccaagcattttcagtgtctttgaaaagcacgtaacttttcaaaggtggtcttaatttgttgcatatctatcaaggacttattcactcacctttccttttctgccctctatcaattgatttcttcttacctttcatcattcattccttcctttagaaaaactgaagattacccataatctcctcttattacttgagggccttgactatttagtttattttgtttactttacaggttaacacagttgttttgtctgattgcattttattaactgtgaagccgttgaaatgaatatcacttaagcaacgttgctaaatttctatgtgtttgaaatgtgttaatgaaggcactgcttatttgtagtcaccttgaactgacttaacctagaagctgtgccttcttgtgaaaaaaaaaaaaaacaaaaacaaaaaacagcctttaaacaagtttccttagtgtcaaaagtt

SEQ ID NO: 5101 - protein, 1069 aa, Homo sapiens; identical to SEQ ID NO: 673

SEQ ID NO: 5102 - DNA, 4634 bp, Homo sapiens
gggcaccggctggagccacttgcaggactgagggtttttgcaacaaaaccctagcagcctgaagaactctaagccagtttccgggataacctaaactccagagagctatagcatccactctgtcctttctgctttgcacacagatggggtggctggacgagagcagctcttggctcagcaaagaatgcacagtatgatcagctcagtggatgtgaagtcagaagttcctgtgggcctggagcccatctcacctttagacctaaggacagacctcaggatgatgatgcccgtggtggaccctgttgtccgtgagaagcaattgcagcaggaattacttcttatccagcagcagcaacaaatccagaagcagcttctgatagcagagtttcagaaacagcatgagaacttgacacggcagcaccaggctcagcttcaggagcatatcaagttgcaacaggaacttctagccataaaacagcaacaagaactcctagaaaaggagcagaaactggagcagcagaggcaagaacaggaagtagagaggcatcgcagagaacagcagcttcctcctctcagaggcaaagatagaggacgagaaagggcagtggcaagtacagaagtaaagcagaagcttcaagagttcctactgagtaaatcagcaacgaaagacactccaactaatggaaaaaatcattccgtgagccgccatcccaagctctggtacacggctgcccaccacacatcattggatcaaagctctccaccccttagtggaacatctccatcctacaagtacacattaccaggagcacaagatgcaaaggatgatttcccccttcgaaaaactgcctctgagcccaacttgaaggtgcggtccaggttaaaacagaaagtggcagagaggagaagcagccccttactcaggcggaaggatggaaatgttgtcacttcattcaagaagcgaatgtttgaggtgacagaatcctcagtcagtagcagttctccaggctctggtcccagttcaccaaacaatgggccaactggaagtgttactgaaaatgagacttcggttttgccccctacccctcatgccgagcaaatggtttcacagcaacgcattctaattcatgaagattccatgaacctgctaagtctttatacctctccttctttgcccaacattaccttggggcttcccgcagtgccatcccagctcaatgcttcgaattcactcaaagaaaagcagaagtgtgagacgcagacgcttaggcaaggtgttcctctgcctgggcagtatggaggcagcatcccggcatcttccagccaccctcatgttactttagagggaaagccacccaacagcagccaccaggctctcctgcagcatttattattgaaagaacaaatgcgacagcaaaagcttcttgtagctggtggagttcccttacatcctcagtctcccttggcaacaaaagagagaatttcacctggcattagaggtacccacaaattgccccgtcacagacccctgaaccgaacccagtctgcacctttgcctcagagcacgttggctcagctggtcattcaacagcaacaccagcaattcttggagaagcagaagcaataccagcagcagatccacatgaacaaactgctttcgaaatctattgaacaactgaagcaaccaggcagtcaccttgaggaagcagaggaagagcttcagggggaccaggcgatgcaggaagacagagcgccctctagtggcaacagcactaggagcgacagcagtgcttgtgtggatgacacactgggacaagttggggctgtgaaggtcaaggaggaaccagtggacagtgatgaagatgctcagatccaggaaatggaatctggggagcaggctgcttttatgcaacagcctttcctggaacccacgcacacacgtgcgctctctgtgcgccaagctccgctggctgcggttggcatggatggattagagaaacaccgtctcgtctccaggactcactcttcccctgctgcctctgttttacctcacccagcaatggaccgccccctccagcctggctctgcaactggaattgcctatgaccccttgatgctgaaacaccagtgcgtttgtggcaattccaccacccaccctgagcatgctggacgaatacagagtatctggtcacgactgcaagaaactgggctgctaaataaatgtgagcgaattcaaggtcgaaaagccagcctggaggaaatacagcttgttcattctgaacatcactcactgttgtatggcaccaaccccctggacggacagaagctggaccccaggatactcctaggtgatgactctcaaaagtttttttcctcattaccttgtggtggacttggggtggacagtgacaccatttggaatgagctacactcgtccggtgctgcacgcatggctgttggctgtgtcatcgagctggcttccaaagtggcctcaggagagctgaagaatgggtttgctgttgtgaggccccctggccatcacgctgaagaatccacagccatggggttctgcttttttaattcagttgcaattaccgccaaatacttgagagaccaactaaatataagcaagatattgattgtagatctggatgttcaccatggaaacggtacccagcaggccttttatgctgaccccagcatcctgtacatttcactccatcgctatgatgaagggaactttttccctggcagtggagccccaaatgaggttggaacaggccttggagaagggtacaatataaatattgcctggacaggtggccttgatcctcccatgggagatgttgagtaccttgaagcattcaggaccatcgtgaagcctgtggccaaagagtttgatccagacatggtcttagtatctgctggatttgatgcattggaaggccacacccctcctctaggagggtacaaagtgacggcaaaatgttttggtcatttgacgaagcaattgatgacattggctgatggacgtgtggtgttggctctagaaggaggacatgatctcacagccatctgtgatgcatcagaagcctgtgtaaatgcccttctaggaaatgagctggagccacttgcagaagatattctccaccaaagcccgaatatgaatgctgttatttctttacagaagatcattgaaattcaaagcaagtattggaagtcagtaaggatggtggctgtgccaaggggctgtgctctggctggtgctcagttgcaagaggagacagagaccgtttctgccctggcctccctaacagtggatgtggaacagccctttgctcaggaagacagcagaactgctggtgagcctatggaagaggagccagccttgtgaagtgccaagtccccctctgatatttcctgtgtgtgacatcattgtgtatccccccaccccagtaccctcagacatgtcttgtctgctgcctgggtggcacagattcaatggaacataaacactgggcacaaaattctgaacagcagcttcacttgttctttggatggacttgaaagggcattaaagattccttaaacgtaaccgctgtgattctagagttacagtaaaccacgattggaagaaactgcttccagcatgcttttaatatgctgggtgacccactcctagacaccaagtttgaactagaaacattcagtacagcactagatattgttaatttcagaagctatgacagccagtgaaattttgggcaaaacctgagacatagtcattcctgacattctgatcagctttttttggggtaatttgtttttcaaacagtcttaacttgtttacaagatttgcttttagctatgaacggatcgtaattccacccagaatgtaatgtttcttgtttgtttgttttgttttgttagggtttttttctcaactttaacacacagttcaactgttcctagtaaaagttcaagatggaggaactagcatgaggcttttttcagtatctcgaagtccaaatgccaaaggaacctcacacactgtttgtaatggtgcaatattttatatcacttttttttaaacatccccaacatctttgtgttctcacacacaggcaatttgcaatgttgcaattgtgttggagaatgaagtccccccacctcccagccacacacacatcctttgttctcatgacagtaggtctgagcaaatgttccaccaagcattttcagtgtctttgaaaagcacgtaacttttcaaaggtggtcttaatttgttgcatatctatcaaggacttattcactcacctttccttttctgccctctatcaattgatttcttcttacctttcatcattcattccttcctttagaaaaactgaagattacccataatctcctcttattacttgagggccttgactatttagtttattttgtttactttacaggttaacacagttgttttgtctgattgcattttattaactgtgaagccgttgaaatgaatatcacttaagcaacgttgctaaatttctatgtgtttgaaatgtgttaatgaaggcactgcttatttgtagtcaccttgaactgacttaacctagaagctgtgccttcttgtgaaa

SEQ ID NO: 5103 - protein, 1069 aa, Homo sapiens; identical to SEQ ID NO: 673

SEQ ID NO: 5104 - DNA, 4622 bp, Homo sapiens
ccggctggagccacttgcaggactgagggtttttgcaacaaaaccctagcagcctgaagaactctaagccagatggggtggctggacgagagcagctcttggctcagcaaagaatgcacagtatgatcagctcagttgaactatgggtgttgactttcttttcatgaagataatatatctgtttaaatactaattggatgtgaagtcagaagttcctgtgggcctggagcccatctcacctttagacctaaggacagacctcaggatgatgatgcccgtggtggaccctgttgtccgtgagaagcaattgcagcaggaattacttcttatccagcagcagcaacaaatccagaagcagcttctgatagcagagtttcagaaacagcatgagaacttgacacggcagcaccaggctcagcttcaggagcatatcaagttgcaacaggaacttctagccataaaacagcaacaagaactcctagaaaaggagcagaaactggagcagcagaggcaagaacaggaagtagagaggcatcgcagagaacagcagcttcctcctctcagaggcaaagatagaggacgagaaagggcagtggcaagtacagaagtaaagcagaagcttcaagagttcctactgagtaaatcagcaacgaaagacactccaactaatggaaaaaatcattccgtgagccgccatcccaagctctggtacacggctgcccaccacacatcattggatcaaagctctccaccccttagtggaacatctccatcctacaagtacacattaccaggagcacaagatgcaaaggatgatttcccccttcgaaaaactgcctctgagcccaacttgaaggtgcggtccaggttaaaacagaaagtggcagagaggagaagcagccccttactcaggcggaaggatggaaatgttgtcacttcattcaagaagcgaatgtttgaggtgacagaatcctcagtcagtagcagttctccaggctctggtcccagttcaccaaacaatgggccaactggaagtgttactgaaaatgagacttcggttttgccccctacccctcatgccgagcaaatggtttcacagcaacgcattctaattcatgaagattccatgaacctgctaagtctttatacctctccttctttgcccaacattaccttggggcttcccgcagtgccatcccagctcaatgcttcgaattcactcaaagaaaagcagaagtgtgagacgcagacgcttaggcaaggtgttcctctgcctgggcagtatggaggcagcatcccggcatcttccagccaccctcatgttactttagagggaaagccacccaacagcagccaccaggctctcctgcagcatttattattgaaagaacaaatgcgacagcaaaagcttcttgtagctggtggagttcccttacatcctcagtctcccttggcaacaaaagagagaatttcacctggcattagaggtacccacaaattgccccgtcacagacccctgaaccgaacccagtctgcacctttgcctcagagcacgttggctcagctggtcattcaacagcaacaccagcaattcttggagaagcagaagcaataccagcagcagatccacatgaacaaactgctttcgaaatctattgaacaactgaagcaaccaggcagtcaccttgaggaagcagaggaagagcttcagggggaccaggcgatgcaggaagacagagcgccctctagtggcaacagcactaggagcgacagcagtgcttgtgtggatgacacactgggacaagttggggctgtgaaggtcaaggaggaaccagtggacagtgatgaagatgctcagatccaggaaatggaatctggggagcaggctgcttttatgcaacagcctttcctggaacccacgcacacacgtgcgctctctgtgcgccaagctccgctggctgcggttggcatggatggattagagaaacaccgtctcgtctccaggactcactcttcccctgctgcctctgttttacctcacccagcaatggaccgccccctccagcctggctctgcaactggaattgcctatgaccccttgatgctgaaacaccagtgcgtttgtggcaattccaccacccaccctgagcatgctggacgaatacagagtatctggtcacgactgcaagaaactgggctgctaaataaatgtgagcgaattcaaggtcgaaaagccagcctggaggaaatacagcttgttcattctgaacatcactcactgttgtatggcaccaaccccctggacggacagaagctggaccccaggatactcctaggtgatgactctcaaaagtttttttcctcattaccttgtggtggacttggggtggacagtgacaccatttggaatgagctacactcgtccggtgctgcacgcatggctgttggctgtgtcatcgagctggcttccaaagtggcctcaggagagctgaagaatgggtttgctgttgtgaggccccctggccatcacgctgaagaatccacagccatggggttctgcttttttaattcagttgcaattaccgccaaatacttgagagaccaactaaatataagcaagatattgattgtagatctggatgttcaccatggaaacggtacccagcaggccttttatgctgaccccagcatcctgtacatttcactccatcgctatgatgaagggaactttttccctggcagtggagccccaaatgaggttggaacaggccttggagaagggtacaatataaatattgcctggacaggtggccttgatcctcccatgggagatgttgagtaccttgaagcattcaggaccatcgtgaagcctgtggccaaagagtttgatccagacatggtcttagtatctgctggatttgatgcattggaaggccacacccctcctctaggagggtacaaagtgacggcaaaatgttttggtcatttgacgaagcaattgatgacattggctgatggacgtgtggtgttggctctagaaggaggacatgatctcacagccatctgtgatgcatcagaagcctgtgtaaatgcccttctaggaaatgagctggagccacttgcagaagatattctccaccaaagcccgaatatgaatgctgttatttctttacagaagatcattgaaattcaaagcaagtattggaagtcagtaaggatggtggctgtgccaaggggctgtgctctggctggtgctcagttgcaagaggagacagagaccgtttctgccctggcctccctaacagtggatgtggaacagccctttgctcaggaagacagcagaactgctggtgagcctatggaagaggagccagccttgtgaagtgccaagtccccctctgatatttcctgtgtgtgacatcattgtgtatccccccaccccagtaccctcagacatgtcttgtctgctgcctgggtggcacagattcaatggaacataaacactgggcacaaaattctgaacagcagcttcacttgttctttggatggacttgaaagggcattaaagattccttaaacgtaaccgctgtgattctagagttacagtaaaccacgattggaagaaactgcttccagcatgcttttaatatgctgggtgacccactcctagacaccaagtttgaactagaaacattcagtacagcactagatattgttaatttcagaagctatgacagccagtgaaattttgggcaaaacctgagacatagtcattcctgacattctgatcagctttttttggggtaatttgtttttcaaacagtcttaacttgtttacaagatttgcttttagctatgaacggatcgtaattccacccagaatgtaatgtttcttgtttgtttgttttgttttgttagggtttttttctcaactttaacacacagttcaactgttcctagtaaaagttcaagatggaggaactagcatgaggcttttttcagtatctcgaagtccaaatgccaaaggaacctcacacactgtttgtaatggtgcaatattttatatcacttttttttaaacatccccaacatctttgtgttctcacacacaggcaatttgcaatgttgcaattgtgttggagaatgaagtccccccacctcccagccacacacacatcctttgttctcatgacagtaggtctgagcaaatgttccaccaagcattttcagtgtctttgaaaagcacgtaacttttcaaaggtggtcttaatttgttgcatatctatcaaggacttattcactcacctttccttttctgccctctatcaattgatttcttcttacctttcatcattcattccttcctttagaaaaactgaagattacccataatctcctcttattacttgagggccttgactatttagtttattttgtttactttacaggttaacacagttgttttgtctgattgcattttattaactgtgaagccgttgaaatgaatatcacttaagcaacgttgctaaatttctatgtgtttgaaatgtgttaatgaaggcactgcttatttgtagtcaccttgaactgacttaacctagaagctgtgccttcttgtgaaa

SEQ ID NO: 5105 - protein, 1038 aa, Homo sapiens
MMMPVVDPVVREKQLQQELLLIQQQQQIQKQLLIAEFQKQHENLTRQHQAQLQEHIKLQQELLAIKQQQELLEKEQKLEQQRQEQEVERHRREQQLPPLRGKDRGRERAVASTEVKQKLQEFLLSKSATKDTPTNGKNHSVSRHPKLWYTAAHHTSLDQSSPPLSGTSPSYKYTLPGAQDAKDDFPLRKTASEPNLKVRSRLKQKVAERRSSPLLRRKDGNVVTSFKKRMFEVTESSVSSSSPGSGPSSPNNGPTGSVTENETSVLPPTPHAEQMVSQQRILIHEDSMNLLSLYTSPSLPNITLGLPAVPSQLNASNSLKEKQKCETQTLRQGVPLPGQYGGSIPASSSHPHVTLEGKPPNSSHQALLQHLLLKEQMRQQKLLVAGGVPLHPQSPLATKERISPGIRGTHKLPRHRPLNRTQSAPLPQSTLAQLVIQQQHQQFLEKQKQYQQQIHMNKLLSKSIEQLKQPGSHLEEAEEELQGDQAMQEDRAPSSGNSTRSDSSACVDDTLGQVGAVKVKEEPVDSDEDAQIQEMESGEQAAFMQQPFLEPTHTRALSVRQAPLAAVGMDGLEKHRLVSRTHSSPAASVLPHPAMDRPLQPGSATGIAYDPLMLKHQCVCGNSTTHPEHAGRIQSIWSRLQETGLLNKCERIQGRKASLEEIQLVHSEHHSLLYGTNPLDGQKLDPRILLGDDSQKFFSSLPCGGLGVDSDTIWNELHSSGAARMAVGCVIELASKVASGELKNGFAVVRPPGHHAEESTAMGFCFFNSVAITAKYLRDQLNISKILIVDLDVHHGNGTQQAFYADPSILYISLHRYDEGNFFPGSGAPNEVGTGLGEGYNINIAWTGGLDPPMGDVEYLEAFRTIVKPVAKEFDPDMVLVSAGFDALEGHTPPLGGYKVTAKCFGHLTKQLMTLADGRVVLALEGGHDLTAICDASEACVNALLGNELEPLAEDILHQSPNMNAVISLQKIIEIQSKYWKSVRMVAVPRGCALAGAQLQEETETVSALASLTVDVEQPFAQEDSRTAGEPMEEEPAL

SEQ ID NO: 5106 - DNA, 4545 bp, Homo sapiens
gggagaaccaggggaagactgtcagctacgattttctctagcctcaagaagactgagaccgagccaaactcctggccaacgtgctttgtggattcacagtgtagcttgagaaaaatgtggatgtgaagtcagaagttcctgtgggcctggagcccatctcacctttagacctaaggacagacctcaggatgatgatgcccgtggtggaccctgttgtccgtgagaagcaattgcagcaggaattacttcttatccagcagcagcaacaaatccagaagcagcttctgatagcagagtttcagaaacagcatgagaacttgacacggcagcaccaggctcagcttcaggagcatatcaagttgcaacaggaacttctagccataaaacagcaacaagaactcctagaaaaggagcagaaactggagcagcagaggcaagaacaggaagtagagaggcatcgcagagaacagcagcttcctcctctcagaggcaaagatagaggacgagaaagggcagtggcaagtacagaagtaaagcagaagcttcaagagttcctactgagtaaatcagcaacgaaagacactccaactaatggaaaaaatcattccgtgagccgccatcccaagctctggtacacggctgcccaccacacatcattggatcaaagctctccaccccttagtggaacatctccatcctacaagtacacattaccaggagcacaagatgcaaaggatgatttcccccttcgaaaaactgcctctgagcccaacttgaaggtgcggtccaggttaaaacagaaagtggcagagaggagaagcagccccttactcaggcggaaggatggaaatgttgtcacttcattcaagaagcgaatgtttgaggtgacagaatcctcagtcagtagcagttctccaggctctggtcccagttcaccaaacaatgggccaactggaagtgttactgaaaatgagacttcggttttgccccctacccctcatgccgagcaaatggtttcacagcaacgcattctaattcatgaagattccatgaacctgctaagtctttatacctctccttctttgcccaacattaccttggggcttcccgcagtgccatcccagctcaatgcttcgaattcactcaaagaaaagcagaagtgtgagacgcagacgcttaggcaaggtgttcctctgcctgggcagtatggaggcagcatcccggcatcttccagccaccctcatgttactttagagggaaagccacccaacagcagccaccaggctctcctgcagcatttattattgaaagaacaaatgcgacagcaaaagcttcttgtagctggtggagttcccttacatcctcagtctcccttggcaacaaaagagagaatttcacctggcattagaggtacccacaaattgccccgtcacagacccctgaaccgaacccagtctgcacctttgcctcagagcacgttggctcagctggtcattcaacagcaacaccagcaattcttggagaagcagaagcaataccagcagcagatccacatgaacaaactgctttcgaaatctattgaacaactgaagcaaccaggcagtcaccttgaggaagcagaggaagagcttcagggggaccaggcgatgcaggaagacagagcgccctctagtggcaacagcactaggagcgacagcagtgcttgtgtggatgacacactgggacaagttggggctgtgaaggtcaaggaggaaccagtggacagtgatgaagatgctcagatccaggaaatggaatctggggagcaggctgcttttatgcaacagcctttcctggaacccacgcacacacgtgcgctctctgtgcgccaagctccgctggctgcggttggcatggatggattagagaaacaccgtctcgtctccaggactcactcttcccctgctgcctctgttttacctcacccagcaatggaccgccccctccagcctggctctgcaactggaattgcctatgaccccttgatgctgaaacaccagtgcgtttgtggcaattccaccacccaccctgagcatgctggacgaatacagagtatctggtcacgactgcaagaaactgggctgctaaataaatgtgagcgaattcaaggtcgaaaagccagcctggaggaaatacagcttgttcattctgaacatcactcactgttgtatggcaccaaccccctggacggacagaagctggaccccaggatactcctaggtgatgactctcaaaagtttttttcctcattaccttgtggtggacttggggtggacagtgacaccatttggaatgagctacactcgtccggtgctgcacgcatggctgttggctgtgtcatcgagctggcttccaaagtggcctcaggagagctgaagaatgggtttgctgttgtgaggccccctggccatcacgctgaagaatccacagccatggggttctgcttttttaattcagttgcaattaccgccaaatacttgagagaccaactaaatataagcaagatattgattgtagatctggatgttcaccatggaaacggtacccagcaggccttttatgctgaccccagcatcctgtacatttcactccatcgctatgatgaagggaactttttccctggcagtggagccccaaatgaggttggaacaggccttggagaagggtacaatataaatattgcctggacaggtggccttgatcctcccatgggagatgttgagtaccttgaagcattcaggaccatcgtgaagcctgtggccaaagagtttgatccagacatggtcttagtatctgctggatttgatgcattggaaggccacacccctcctctaggagggtacaaagtgacggcaaaatgttttggtcatttgacgaagcaattgatgacattggctgatggacgtgtggtgttggctctagaaggaggacatgatctcacagccatctgtgatgcatcagaagcctgtgtaaatgcccttctaggaaatgagctggagccacttgcagaagatattctccaccaaagcccgaatatgaatgctgttatttctttacagaagatcattgaaattcaaagcaagtattggaagtcagtaaggatggtggctgtgccaaggggctgtgctctggctggtgctcagttgcaagaggagacagagaccgtttctgccctggcctccctaacagtggatgtggaacagccctttgctcaggaagacagcagaactgctggtgagcctatggaagaggagccagccttgtgaagtgccaagtccccctctgatatttcctgtgtgtgacatcattgtgtatccccccaccccagtaccctcagacatgtcttgtctgctgcctgggtggcacagattcaatggaacataaacactgggcacaaaattctgaacagcagcttcacttgttctttggatggacttgaaagggcattaaagattccttaaacgtaaccgctgtgattctagagttacagtaaaccacgattggaagaaactgcttccagcatgcttttaatatgctgggtgacccactcctagacaccaagtttgaactagaaacattcagtacagcactagatattgttaatttcagaagctatgacagccagtgaaattttgggcaaaacctgagacatagtcattcctgacattctgatcagctttttttggggtaatttgtttttcaaacagtcttaacttgtttacaagatttgcttttagctatgaacggatcgtaattccacccagaatgtaatgtttcttgtttgtttgttttgttttgttagggtttttttctcaactttaacacacagttcaactgttcctagtaaaagttcaagatggaggaactagcatgaggcttttttcagtatctcgaagtccaaatgccaaaggaacctcacacactgtttgtaatggtgcaatattttatatcacttttttttaaacatccccaacatctttgtgttctcacacacaggcaatttgcaatgttgcaattgtgttggagaatgaagtccccccacctcccagccacacacacatcctttgttctcatgacagtaggtctgagcaaatgttccaccaagcattttcagtgtctttgaaaagcacgtaacttttcaaaggtggtcttaatttgttgcatatctatcaaggacttattcactcacctttccttttctgccctctatcaattgatttcttcttacctttcatcattcattccttcctttagaaaaactgaagattacccataatctcctcttattacttgagggccttgactatttagtttattttgtttactttacaggttaacacagttgttttgtctgattgcattttattaactgtgaagccgttgaaatgaatatcacttaagcaacgttgctaaatttctatgtgtttgaaatgtgttaatgaaggcactgcttatttgtagtcaccttgaactgacttaacctagaagctgtgccttcttgtgaaa

SEQ ID NO: 5107 - protein, 1038 aa, Homo sapiens; identical to SEQ ID NO: 5105

SEQ ID NO: 5108 - DNA, 2422 bp, Homo sapiens
agctggccaagacggaagactaatgttattgtacataggctgttaccctgccagcccttcctcacagatttgctttctctctctgtccctcttcccctgcgacctcttccccttttacccctttcatctcttccttctctttcgctttcttcttctgtcttcggactctgctgactgtttgctcaggtggacagtgacaccatttggaatgagctacactcgtccggtgctgcacgcatggctgttggctgtgtcatcgagctggcttccaaagtggcctcaggagagctgaagaatgggtttgctgttgtgaggccccctggccatcacgctgaagaatccacagccatggggttctgcttttttaattcagttgcaattaccgccaaatacttgagagaccaactaaatataagcaagatattgattgtagatctggatgttcaccatggaaacggtacccagcaggccttttatgctgaccccagcatcctgtacatttcactccatcgctatgatgaagggaactttttccctggcagtggagccccaaatgaggttggaacaggccttggagaagggtacaatataaatattgcctggacaggtggccttgatcctcccatgggagatgttgagtaccttgaagcattcaggaccatcgtgaagcctgtggccaaagagtttgatccagacatggtcttagtatctgctggatttgatgcattggaaggccacacccctcctctaggagggtacaaagtgacggcaaaatgttttggtcatttgacgaagcaattgatgacattggctgatggacgtgtggtgttggctctagaaggaggacatgatctcacagccatctgtgatgcatcagaagcctgtgtaaatgcccttctaggaaatgagctggagccacttgcagaagatattctccaccaaagcccgaatatgaatgctgttatttctttacagaagatcattgaaattcaaagcaagtattggaagtcagtaaggatggtggctgtgccaaggggctgtgctctggctggtgctcagttgcaagaggagacagagaccgtttctgccctggcctccctaacagtggatgtggaacagccctttgctcaggaagacagcagaactgctggtgagcctatggaagaggagccagccttgtgaagtgccaagtccccctctgatatttcctgtgtgtgacatcattgtgtatccccccaccccagtaccctcagacatgtcttgtctgctgcctgggtggcacagattcaatggaacataaacactgggcacaaaattctgaacagcagcttcacttgttctttggatggacttgaaagggcattaaagattccttaaacgtaaccgctgtgattctagagttacagtaaaccacgattggaagaaactgcttccagcatgcttttaatatgctgggtgacccactcctagacaccaagtttgaactagaaacattcagtacagcactagatattgttaatttcagaagctatgacagccagtgaaattttgggcaaaacctgagacatagtcattcctgacattctgatcagctttttttggggtaatttgtttttcaaacagtcttaacttgtttacaagatttgcttttagctatgaacggatcgtaattccacccagaatgtaatgtttcttgtttgtttgttttgttttgttagggtttttttctcaactttaacacacagttcaactgttcctagtaaaagttcaagatggaggaactagcatgaggcttttttcagtatctcgaagtccaaatgccaaaggaacctcacacactgtttgtaatggtgcaatattttatatcacttttttttaaacatccccaacatctttgtgttctcacacacaggcaatttgcaatgttgcaattgtgttggagaatgaagtccccccacctcccagccacacacacatcctttgttctcatgacagtaggtctgagcaaatgttccaccaagcattttcagtgtctttgaaaagcacgtaacttttcaaaggtggtcttaatttgttgcatatctatcaaggacttattcactcacctttccttttctgccctctatcaattgatttcttcttacctttcatcattcattccttcctttagaaaaactgaagattacccataatctcctcttattacttgagggccttgactatttagtttattttgtttactttacaggttaacacagttgttttgtctgattgcattttattaactgtgaagccgttgaaatgaatatcacttaagcaacgttgctaaatttctatgtgtttgaaatgtgttaatgaaggcactgcttatttgtagtcaccttgaactgacttaacctagaagctgtgccttcttgtgaaa

SEQ ID NO: 5109 - protein, 314 aa, Homo sapiens
MAVGCVIELASKVASGELKNGFAVVRPPGHHAEESTAMGFCFFNSVAITAKYLRDQLNISKILIVDLDVHHGNGTQQAFYADPSILYISLHRYDEGNFFPGSGAPNEVGTGLGEGYNINIAWTGGLDPPMGDVEYLEAFRTIVKPVAKEFDPDMVLVSAGFDALEGHTPPLGGYKVTAKCFGHLTKQLMTLADGRVVLALEGGHDLTAICDASEACVNALLGNELEPLAEDILHQSPNMNAVISLQKIIEIQSKYWKSVRMVAVPRGCALAGAQLQEETETVSALASLTVDVEQPFAQEDSRTAGEPMEEEPAL

SEQ ID NO: 5110 - DNA, 1820 bp, Homo sapiens
ctcctgctgccgtgtatgaagtgccttgcttctccttcgcgttccgccatgattgaccatcgtgaagcctgtggccaaagagtttgatccagacatggtcttagtatctgctggatttgatgcattggaaggccacacccctcctctaggagggtacaaagtgacggcaaaatgttttggtcatttgacgaagcaattgatgacattggctgatggacgtgtggtgttggctctagaaggaggacatgatctcacagccatctgtgatgcatcagaagcctgtgtaaatgcccttctaggaaatgagctggagccacttgcagaagatattctccaccaaagcccgaatatgaatgctgttatttctttacagaagatcattgaaattcaaagcaagtattggaagtcagtaaggatggtggctgtgccaaggggctgtgctctggctggtgctcagttgcaagaggagacagagaccgtttctgccctggcctccctaacagtggatgtggaacagccctttgctcaggaagacagcagaactgctggtgagcctatggaagaggagccagccttgtgaagtgccaagtccccctctgatatttcctgtgtgtgacatcattgtgtatccccccaccccagtaccctcagacatgtcttgtctgctgcctgggtggcacagattcaatggaacataaacactgggcacaaaattctgaacagcagcttcacttgttctttggatggacttgaaagggcattaaagattccttaaacgtaaccgctgtgattctagagttacagtaaaccacgattggaagaaactgcttccagcatgcttttaatatgctgggtgacccactcctagacaccaagtttgaactagaaacattcagtacagcactagatattgttaatttcagaagctatgacagccagtgaaattttgggcaaaacctgagacatagtcattcctgacattctgatcagctttttttggggtaatttgtttttcaaacagtcttaacttgtttacaagatttgcttttagctatgaacggatcgtaattccacccagaatgtaatgtttcttgtttgtttgttttgttttgttagggtttttttctcaactttaacacacagttcaactgttcctagtaaaagttcaagatggaggaactagcatgaggcttttttcagtatctcgaagtccaaatgccaaaggaacctcacacactgtttgtaatggtgcaatattttatatcacttttttttaaacatccccaacatctttgtgttctcacacacaggcaatttgcaatgttgcaattgtgttggagaatgaagtccccccacctcccagccacacacacatcctttgttctcatgacagtaggtctgagcaaatgttccaccaagcattttcagtgtctttgaaaagcacgtaacttttcaaaggtggtcttaatttgttgcatatctatcaaggacttattcactcacctttccttttctgccctctatcaattgatttcttcttacctttcatcattcattccttcctttagaaaaactgaagattacccataatctcctcttattacttgagggccttgactatttagtttattttgtttactttacaggttaacacagttgttttgtctgattgcattttattaactgtgaagccgttgaaatgaatatcacttaagcaacgttgctaaatttctatgtgtttgaaatgtgttaatgaaggcactgcttatttgtagtcaccttgaactgacttaacctagaagctgtgccttcttgtgaaa

SEQ ID NO: 5111 - protein, 161 aa, Homo sapiens
MVLVSAGFDALEGHTPPLGGYKVTAKCFGHLTKQLMTLADGRVVLALEGGHDLTAICDASEACVNALLGNELEPLAEDILHQSPNMNAVISLQKIIEIQSKYWKSVRMVAVPRGCALAGAQLQEETETVSALASLTVDVEQPFAQEDSRTAGEPMEEEPAL

SEQ ID NO: 5112 - DNA, 675 bp, Homo sapiens
aagagaataaaggaggaagacttagggctgaggagtatgacaggtccactcgtattcatccaaagatgaagatgagctctatgggccatgcaccagtggcggattatttgtcatatcagaagcacaggcaaatttaggtgaagctgggatgtgtcctctttcctcttaaccccctagctcaggacctggtaaatacagcaaacggggagtgagtttctcaaatgcctggctgtgtctgccctgtggctgccccgagatggggtggtggaatagcaagaggagccttgccagcctgcaggactcaggtgctgctgagccctccagttaccacgactacagcgctttccagcaggtttctataagacaaggatgttttggacatgttcaagcccccagaactggctgcaccccgtgtgcctttctctcagtgcagcaacttatgggctaataatggcccctgccagagcatattgtgctgggcggtcacgggtggcagaaactactggcctctcttttgacaacccacaggaaacatttgcacctccagcactttccgctcaaagtgctccatggtagcaacacctgtgtgtggtgcagaagctggggctacactgctttataactcgtctttctatctgacctctggagtccagtgaaagaccaaaactttactgc

SEQ ID NO: 5113 - protein, 63 aa, Homo sapiens
MGWWNSKRSLASLQDSGAAEPSSYHDYSAFQQVSIRQGCFGHVQAPRTGCTPCAFLSVQQLMG

SEQ ID NO: 5114 - DNA, 6346 bp, Homo sapiens
agagaggctggcggcagtggtggctctcccggctgggttgtcagtcagtgagaggagggggaagatggctcaccgggacccgttctgctaggaagaaggggagcaggtggtgctgctactcgggaggaagcagagcagcctccgtcgctgtcgctgagagcctcacgagtcgaggtcctgcaggtggagctccggcagccgccctgacattaccagaaacatctttaccaaattatgccacaaatttgaaagacaagagttctttagtttcatctctctataaagttatccaggagccacaaagtgagttgctagaacctgtctgtcaccagctctttgaattctatcgcagtggagaggagcagttgcttcaatttacgctgcaatttctcccagaactaatttggtgctaccttgcagtctcagccagcagaaatgtgcatagcagtggatgcattgaagctcttcttctaggggtttacaatttggaaatagttgacaaacagggacataccaaagtattgagttttacgattccatctttatccaaaccatctgtataccatgaaccttccagcattgggtccatggctctgactgagagtgcactatcccagcatggtttgtcaaaagtggtatacagtggacctcatcctcaaagggagatgctgacagcacagaatcggtttgaagtgttgacattccttttgttgtgttacaatgctgccttaacttacatgcccagtgtttctcttcagtcactgtgtcaaatttgttcaagaatctgtgtttgtggatatcctcgacaacatgtaagaaaatataaaggtataagtagcaggataccagtttcttcaggattcatggtgcaaatgttaacagggatttattttgccttttataatggagaatgggatctagctcaaaaagcactggatgatattatatacagagcccagctagaattatatccagagccattgctggttgctaatgcaataaaggcttcattgcctcatggtcccatgaaatctaataaggaaggtacaaggtgtattcaagttgaaatcacaccaacttcctctcgaatatcaagaaatgcagtaaccagcatgtcaataaggggtcataggtggaaaagacatgagcaacctgacaacaataatgatgctactgaattgggcatccttgtcattcctgagattagtgtcacaaatgtggccggagagagaaccgggaatggggaaaaaggcagaacactaggagagattgatgctcagcatatacagggtgtgcaggaaacagccacagatcctagaactgagagcaaaggcttgccagagatcaggaggcaaaaatctgtaagaaaaatgatggaggatggaataaactcacctggcagagtgcagttttagcagagcactttataactgcactccaaggaaatacagaattaacaggtcaagaagaactgatggagatatctgaagttgacgagggattttattccagggctgcgtctagtaccagccagtcgggtttatcaaacagtagtcacaattgtagtaacaagccaagtataggaaagaaccacagacggtcaggaggaagcaaaactggaggaaaagaaaaagaaactacaggggaatcttgcaaagatcactttgctcgaaaacaaactcagagagcccaaagtgagaatcttgagcttctctctttgaagagacttactttaacaaccagccaatccctacctaagcctagtagccatggtttggctaagaccgcagcgactgtatttagtaaatcctttgaacaagtcagtggtgtcacagtcccacataacccgtcatctgctgttggttgtggggctgggacagatgccaataggttttccgcttgtagtctccaagaagaaaagcttatttacgtttcagaaagaactgaacttccaatgaagcatcaatcaggtcagcagagacctcctagtattagcattactctgtccacagattaattagtaacatatttttctcccataacctagtgaacctggaaatacaactttgcttctttatgaaagtaccctgggtctttcatccgtattcctgacaggagccctgatgtcttaaattctgaaggctcccctgactttatgaagggaagattgtctaggttgcagtaagttgaaatatggttttgttatttcttgattaagattttttccccttggtttgagtcttttttttccctcctcttatttgttattgttgccctaagattgtcagtgacaataaattttgacaggttgtctaatcaagttggttatgtctcatgtgaggttgtaaggtggtttttcttgttttggtttggtttggttttttaatagctcctattttgatggctgtgtgtttggccttcagagtcaaagggagtctgcatgtatgggaactgttttatagagaatggggcagaggcacaactccaggaattctctagctcctggtcaggaagccaatctgaaaacaggcatgtggaaacacaaaaatgatgtgtatgaaaagcacctgatgaaaatatttgtaagcagatcatctttatgattagaacaatttgctcaaagccctggaaaatgcctggtaacccagtgcctagaatattatatgattccaggggatggctagaggcatttctgttgttatctctgaaacatttttatatcaaaaatcagattgctggtaggtgtgttgttttgaagtgttttatctggatttagcatgtgaagatccctttcaattattaaggtataataggctgtaaagctgatttaccctactgctggactttggaaatcctagttagtttggactcctataattcagagcatacgtcattggaagacttcctggaaatcagtgtaaatcttgcaacatagctctcaagataccactgtataatatgtaattgtttgtctgcaaatgcatttttcatctataaaatgtcatgaaagaaaataaaggtagtgaaatatggacaaaggacatttatatattaactaaagttgtttatgtttgtgttcttaaatttaaaacacgaagaaaaagaaatgtctttcttgttagtgaacaggcctgttttaaatatcttagtatgatatcaaaagaataatcaatttagttacctcccaactaaaaagtaaaaatgaaaaagacgacatggcagaagttgaaacaaacttgtatgtatctgtatgtgacctctagatggaaataaaagtttgatgtttgctagccgtggtccttttggctatggttgcggttcccctgtaaagcaaatgtacttaagtcatcattcagagtgagagagagaaagcacggctgaggctgagtcagttgaccgttgaggaagacctaaggagctgtccagttcttggctctttttcactgtgactgcacagcggtttccttcttcatagtcccttgctgtagtcaccaagagagcatgctagtgttttcctcttgttcctgcttatgcagagctcagatatatgaaaaatttgtatgctttgaaggctgccaaagcatttatactctggacatagttttaactgcaactgctttggctaccagtttaaaccgagttcttcaaaaagcatgaactcgttttcattcattagccctgtttacaatgtggattttgacataaatgaatttgattttcttttagctccagtaacagaatggaataagatctattgccataaattgtagttaagaactgtaaggcaatcgggcagtgaaacttgatattgtattaacttaataggaaccctgtgtacaatttaaaatatttgtaaaatatcactgtgaatttacagatgtctttttgtcattctttaacaatgaatttcccctgtgcatagttattaatagtattggtattattaaaaactaatttggcattttaagattggcattttaagcaagttgaggtgcttaggaaacattgtagaataagtttggggaaatgttagctgacagagctgagagatcagattttcatgttctatcactgtaatggaacctcatttagacctctctagacctttgctagctgtgtggtctgaggaccagtaagtaggattggcattatctggtatcttgttaaaaatgcagaatttcatgccactctaggtctactaaatcagaatttgcattcttaacaaggttcccaagtgatttttatgagaagaaagtatcagagtgcaaacaaattactcgtctaatatgtagaattcccagtggtctcacagccctagatcaaatgtgtcagacactagatcattataatcttcattggttttgacagctaattaattagtttaataatattgacatatggcttcttaagtatttgaattctagattgctaatgatccttatttttgcagtaaaaaagtaacactttatatttttcttgttaactataaatggaatcagagctgtaaatgcctgaaattttaagtgtgaaaaggggtgccacccttttatatactgcacaacaaatttgcatttgtatattctttttaaaaaatctctgaagacttgctcagtgaaatggttctgattttttgcttcaaatgatttgcactaattgattttctggagagcggagttacgttaacaacaaaattcttttatagttcctttgatactatttcaaataaggattacacattgaaagtttttatagaaattatgaaaattggataatcttaactatggtaaccattactattatccatactactttctccccactgaactttcaaatttgaaaattggggtagcttttgtaggtcactttcttataaagatgctgatggtcacagatctcctaagtatccagaataatatttttatcatgagaaggattccacacaaaattggggtcttgcaccccatatttcagaggatctgaacagaaattgtggcttcattgcacattttaaatctctatagattcttgaaatcacccaacctctcacatttgaaaacccaacggcctggagtattctggtggcactggagccagcactagctttttggaatccaagtggggagagaaacaaaaatagacttttcaagggactgtcccagactacccagggcaaatgtcttcccttcccttcctgaagccacaggaaagcaccctggagtcctttgtataccactatggaaatttttaaggcaagctctcaagacttgaagagttggaattctcggcatttaaatgatgcctgaagtttgttttgaaaaagcaatatttcattgctcttttcaattgtgaagcaactgctcagcaaatattactcatttttttaaaaagttgaattaaagggaaatatatttttaaaaccaaaatagatcaaaatgatcccagttttaagggattttgcctattttggaagaataaaactaaaatgttaaaactgttgaattacagagaacagatgtactctgagacataattttaaacaaatatttaaaataaggcaggttaacatttgcgtttaggcacaataaatctgtattaaagggaagcacatcaaggaaatatatacatgttgaataatgtaactgaaaaatattttttaaaaaccacttaaaaagaaaaataatttgatgggtactttaagcattgtagatagaaattaatgtataatagtgtcctcccagtctttgtatgaaaaattaaaactctctagtcctttaatgagcatgaatttatacttctacatttgttgcttagtaaaattatactcagtactttgagttattcagatttatgtttaatattgttaaattcttcatcagagagcataaatatattgtcttctatactttgtaacttgtgcatatctaaagaaactaacaacgaacattttgggagatgtttttgtgtttttttatagtagagttttagagtacatttgtcttaataggaagtttttaccataaacccaagattttatttcacgtattgttgctttctcttatatggaacttattgtgtacctcttacctttatttctaatcatttagtgatactaatcttttcatagtaaatatatttgtttctaattgtattcctagagtttacattcctaaagaataaacgacgactttggctatttttgtgtgttccctaccttcttaaggctatggaaataaactggagtttagttttttgaatttttgtatatttgtgtaaatgttctccatatgtagtactttatacaacaagtgttgcctcttgttttattgaaataaaaactgaaaaaaat

SEQ ID NO: 5115 - protein, 275 aa, Homo sapiens
MALTESALSQHGLSKVVYSGPHPQREMLTAQNRFEVLTFLLLCYNAALTYMPSVSLQSLCQICSRICVCGYPRQHVRKYKGISSRIPVSSGFMVQMLTGIYFAFYNGEWDLAQKALDDIIYRAQLELYPEPLLVANAIKASLPHGPMKSNKEGTRCIQVEITPTSSRISRNAVTSMSIRGHRWKRHEQPDNNNDATELGILVIPEISVTNVAGERTGNGEKGRTLGEIDAQHIQGVQETATDPRTESKGLPEIRRQKSVRKMMEDGINSPGRVQF

SEQ ID NO: 5116 - DNA, 6194 bp, Homo sapiens
aggctgaactggcgtggggcggtggtggttggctgcttgaggacgggtccctggtcgtgcctgtcagagaggctggcggcagtggtggctctcccggctgggttgtcagtcagtgagaggagggggaagatggctcaccgggacccgttctgctaggaagaaggggagcaggtggtgctgctactcgggaggaagcagagcagcctccgtcgctgtcgctgagagcctcacgagtcgaggtcctgcaggtggagctccggcagccgccctggttgaaggtttagaacagatgtggaaaaatgtttacttcagagaaaggggttgtggaggaatggttgtcagagtttaagacattaccagaaacatctttaccaaattatgccacaaatttgaaagacaagagttctttagtttcatctctctataaagttatccaggagccacaaagtgagttgctagaacctgtctgtcaccagctctttgaattctatcgcagtggagaggagcagttgcttcaatttacgctgcaatttctcccagaactaatttggtgctaccttgcagtctcagccagcagaaatgtgcatagcagtggatgcattgaagctcttcttctaggggtttacaatttggaaatagttgacaaacagggacataccaaagtattgagttttacgattccatctttatccaaaccatctgtataccatgaaccttccagcattgggtccatggctctgactgagagtgcactatcccagcatggtttgtcaaaagtggtatacagtggacctcatcctcaaagggagatgctgacagcacagaatcggtttgaagtgttgacattccttttgttgtgttacaatgctgccttaacttacatgcccagtgtttctcttcagtcactgtgtcaaatttgttcaagaatctgtgtttgtggatatcctcgacaacatgtaagaaaatataaaggtataagtagcaggataccagtttcttcaggattcatggtgcaaatgttaacagggatttattttgccttttataatggagaatgggatctagctcaaaaagcactggatgatattatatacagagcccagctagaattatatccagagccattgctggttgctaatgcaataaaggcttcattgcctcatggtcccatgaaatctaataaggaaggtacaaggtgtattcaagttgaaatcacaccaacttcctctcgaatatcaagaaatgcagtaaccagcatgtcaataaggggtcataggtggaaaagacatggaaatacagaattaacaggtcaagaagaactgatggagatatctgaagttgacgagggattttattccagggctgcgtctagtaccagccagtcgggtttatcaaacagtagtcacaattgtagtaacaagccaagtataggaaagaaccacagacggtcaggaggaagcaaaactggaggaaaagaaaaagaaactacaggggaatcttgcaaagatcactttgctcgaaaacaaactcagagagcccaaagtgagaatcttgagcttctctctttgaagagacttactttaacaaccagccaatccctacctaagcctagtagccatggtttggctaagaccgcagcgactgtatttagtaaatcctttgaacaagtcagtggtgtcacagtcccacataacccgtcatctgctgttggttgtggggctgggacagatgccaataggttttccgcttgtagtctccaagaagaaaagcttatttacgtttcagaaagaactgaacttccaatgaagcatcaatcaggtcagcagagacctcctagtattagcattactctgtccacagattaattagtaacatatttttctcccataacctagtgaacctggaaatacaactttgcttctttatgaaagtaccctgggtctttcatccgtattcctgacaggagccctgatgtcttaaattctgaaggctcccctgactttatgaagggaagattgtctaggttgcagtaagttgaaatatggttttgttatttcttgattaagattttttccccttggtttgagtcttttttttccctcctcttatttgttattgttgccctaagattgtcagtgacaataaattttgacaggttgtctaatcaagttggttatgtctcatgtgaggttgtaaggtggtttttcttgttttggtttggtttggttttttaatagctcctattttgatggctgtgtgtttggccttcagagtcaaagggagtctgcatgtatgggaactgttttatagagaatggggcagaggcacaactccaggaattctctagctcctggtcaggaagccaatctgaaaacaggcatgtggaaacacaaaaatgatgtgtatgaaaagcacctgatgaaaatatttgtaagcagatcatctttatgattagaacaatttgctcaaagccctggaaaatgcctggtaacccagtgcctagaatattatatgattccaggggatggctagaggcatttctgttgttatctctgaaacatttttatatcaaaaatcagattgctggtaggtgtgttgttttgaagtgttttatctggatttagcatgtgaagatccctttcaattattaaggtataataggctgtaaagctgatttaccctactgctggactttggaaatcctagttagtttggactcctataattcagagcatacgtcattggaagacttcctggaaatcagtgtaaatcttgcaacatagctctcaagataccactgtataatatgtaattgtttgtctgcaaatgcatttttcatctataaaatgtcatgaaagaaaataaaggtagtgaaatatggacaaaggacatttatatattaactaaagttgtttatgtttgtgttcttaaatttaaaacacgaagaaaaagaaatgtctttcttgttagtgaacaggcctgttttaaatatcttagtatgatatcaaaagaataatcaatttagttacctcccaactaaaaagtaaaaatgaaaaagacgacatggcagaagttgaaacaaacttgtatgtatctgtatgtgacctctagatggaaataaaagtttgatgtttgctagccgtggtccttttggctatggttgcggttcccctgtaaagcaaatgtacttaagtcatcattcagagtgagagagagaaagcacggctgaggctgagtcagttgaccgttgaggaagacctaaggagctgtccagttcttggctctttttcactgtgactgcacagcggtttccttcttcatagtcccttgctgtagtcaccaagagagcatgctagtgttttcctcttgttcctgcttatgcagagctcagatatatgaaaaatttgtatgctttgaaggctgccaaagcatttatactctggacatagttttaactgcaactgctttggctaccagtttaaaccgagttcttcaaaaagcatgaactcgttttcattcattagccctgtttacaatgtggattttgacataaatgaatttgattttcttttagctccagtaacagaatggaataagatctattgccataaattgtagttaagaactgtaaggcaatcgggcagtgaaacttgatattgtattaacttaataggaaccctgtgtacaatttaaaatatttgtaaaatatcactgtgaatttacagatgtctttttgtcattctttaacaatgaatttcccctgtgcatagttattaatagtattggtattattaaaaactaatttggcattttaagattggcattttaagcaagttgaggtgcttaggaaacattgtagaataagtttggggaaatgttagctgacagagctgagagatcagattttcatgttctatcactgtaatggaacctcatttagacctctctagacctttgctagctgtgtggtctgaggaccagtaagtaggattggcattatctggtatcttgttaaaaatgcagaatttcatgccactctaggtctactaaatcagaatttgcattcttaacaaggttcccaagtgatttttatgagaagaaagtatcagagtgcaaacaaattactcgtctaatatgtagaattcccagtggtctcacagccctagatcaaatgtgtcagacactagatcattataatcttcattggttttgacagctaattaattagtttaataatattgacatatggcttcttaagtatttgaattctagattgctaatgatccttatttttgcagtaaaaaagtaacactttatatttttcttgttaactataaatggaatcagagctgtaaatgcctgaaattttaagtgtgaaaaggggtgccacccttttatatactgcacaacaaatttgcatttgtatattctttttaaaaaatctctgaagacttgctcagtgaaatggttctgattttttgcttcaaatgatttgcactaattgattttctggagagcggagttacgttaacaacaaaattcttttatagttcctttgatactatttcaaataaggattacacattgaaagtttttatagaaattatgaaaattggataatcttaactatggtaaccattactattatccatactactttctccccactgaactttcaaatttgaaaattggggtagcttttgtaggtcactttcttataaagatgctgatggtcacagatctcctaagtatccagaataatatttttatcatgagaaggattccacacaaaattggggtcttgcaccccatatttcagaggatctgaacagaaattgtggcttcattgcacattttaaatctctatagattcttgaaatcacccaacctctcacatttgaaaacccaacggcctggagtattctggtggcactggagccagcactagctttttggaatccaagtggggagagaaacaaaaatagacttttcaagggactgtcccagactacccagggcaaatgtcttcccttcccttcctgaagccacaggaaagcaccctggagtcctttgtataccactatggaaatttttaaggcaagctctcaagacttgaagagttggaattctcggcatttaaatgatgcctgaagtttgttttgaaaaagcaatatttcattgctcttttcaattgtgaagcaactgctcagcaaatattactcatttttttaaaaagttgaattaaagggaaatatatttttaaaaccaaaatagatcaaaatgatcccagttttaagggattttgcctattttggaagaataaaactaaaatgttaaaactgttgaattacagagaacagatgtactctgagacataattttaaacaaatatttaaaataaggcaggttaacatttgcgtttaggcacaataaatctgtattaaagggaagcacatcaaggaaatatatacatgttgaataatgtaactgaaaaatattttttaaaaaccacttaaaaagaaaaataatttgatgggtactttaagcattgtagatagaaattaatgtataatagtgtcctcccagtctttgtatgaaaaattaaaactctctagtcctttaatgagcatgaatttatacttctacatttgttgcttagtaaaattatactcagtactttgagttattcagatttatgtttaatattgttaaattcttcatcagagagcataaatatattgtcttctatactttgtaacttgtgcatatctaaagaaactaacaacgaacattttgggagatgtttttgtgtttttttatagtagagttttagagtacatttgtcttaataggaagtttttaccataaacccaagattttatttcacgtattgttgctttctcttatatggaacttattgtgtacctcttacctttatttctaatcatttagtgatactaatcttttcatagtaaatatatttgtttctaattgtattcctagagtttacattcctaaagaataaacgacgactttggctatttttgtgtgttccctaccttcttaaggctatggaaataaactggagtttagttttttgaatttttgtatatttgtgtaaatgttctccatatgtagtactttatacaacaagtgttgcctcttgttttattgaaataaaaactgaaaaaaat

SEQ ID NO: 5117 - protein, 521 aa, Homo sapiens; identical to SEQ ID NO: 675

SEQ ID NO: 5118 - DNA, 3813 bp, Homo sapiens
aggctgaactggcgtggggcggtggtggttggctgcttgaggacgggtccctggtcgtgcctgtcagagaggctggcggcagtggtggctctcccggctgggttgtcagtcagtgagaggagggggaagatggctcaccgggacccgttctgctaggaagaaggggagcaggtggtgctgctactcgggaggaagcagagcagcctccgtcgctgtcgctgagagcctcacgagtcgaggtcctgcaggtggagctccggcagccgccctggttgaaggtttagaacagatgtggaaaaatgtttacttcagagaaaggggttgtggaggaatggttgtcagagtttaagacattaccagaaacatctttaccaaattatgccacaaatttgaaagacaagagttctttagtttcatctctctataaagttatccaggagccacaaagtgagttgctagaacctgtctgtcaccagctctttgaattctatcgcagtggagaggagcagttgcttcaatttacgctgcaatttctcccagaactaatttggtgctaccttgcagtctcagccagcagaaatgtgcatagcagtggatgcattgaagctcttcttctaggggtttacaatttggaaatagttgacaaacagggacataccaaagtattgagttttacgattccatctttatccaaaccatctgtataccatgaaccttccagcattgggtccatggctctgactgagagtgcactatcccagcatggtttgtcaaaagtggtatacagtggacctcatcctcaaagggagatgctgacagcacagaatcggtttgaagtgttgacattccttttgttgtgttacaatgctgccttaacttacatgcccagtgtttctcttcagtcactgtgtcaaatttgttcaagaatctgtgtttgtggatatcctcgacaacatgtaagaaaatataaaggtataagtagcaggataccagtttcttcaggattcatggtgcaaatgttaacagggatttattttgccttttataatggagaatgggatctagctcaaaaagcactggatgatattatatacagagcccagctagaattatatccagagccattgctggttgctaatgcaataaaggcttcattgcctcatggtcccatgaaatctaataaggaaggtacaaggtgtattcaagttgaaatcacaccaacttcctctcgaatatcaagaaatgcagtaaccagcatgtcaataaggggtcataggtggaaaagacatggaaatacagaattaacaggtcaagaagaactgatggagatatctgaagttgacgagggattttattccagggctgcgtctagtaccagccagtcgggtttatcaaacagtagtcacaattgtagtaacaagccaagtataggaaagaaccacagacggtcaggaggaagcaaaactggaggaaaagaaaaagaaactacaggggaatcttgcaaagatcactttgctcgaaaacaaactcagagagcccaaagtgagaatcttgagcttctctctttgaagagacttactttaacaaccagccaatccctacctaagcctagtagccatggtttggctaagaccgcagcgactgtatttagtaaatcctttgaacaagtcagtggtgtcacagtcccacataacccgtcatctgctgttggttgtggggctgggacagatgccaataggttttccgcttgtagtctccaagaagaaaagcttatttacgtttcagaaagaactgaacttccaatgaagcatcaatcaggtcagcagagacctcctagtattagcattactctgtccacagattaattagtaacatatttttctcccataacctagtgaacctggaaatacaactttgcttctttatgaaagtaccctgggtctttcatccgtattcctgacaggagccctgatgtcttaaattctgaaggctcccctgactttatgaagggaagattgtctaggttgcagtaagttgaaatatggttttgttatttcttgattaagattttttccccttggtttgagtcttttttttccctcctcttatttgttattgttgccctaagattgtcagtgacaataaattttgacaggttgtctaatcaagttggttatgtctcatgtgaggttgtaaggtggtttttcttgttttggtttggtttggttttttaatagctcctattttgatggctgtgtgtttggccttcagagtcaaagggagtctgcatgtatgggaactgttttatagagaatggggcagaggcacaactccaggaattctctagctcctggtcaggaagccaatctgaaaacaggcatgtggaaacacaaaaatgatgtgtatgaaaagcacctgatgaaaatatttgtaagcagatcatctttatgattagaacaatttgctcaaagccctggaaaatgcctggtaacccagtgcctagaatattatatgattccaggggatggctagaggcatttctgttgttatctctgaaacatttttatatcaaaaatcagattgctggtaggtgtgttgttttgaagtgttttatctggatttagcatgtgaagatccctttcaattattaaggtataataggctgtaaagctgatttaccctactgctggactttggaaatcctagttagtttggactcctataattcagagcatacgtcattggaagacttcctggaaatcagtgtaaatcttgcaacatagctctcaagataccactgtataatatgtaattgtttgtctgcaaatgcatttttcatctataaaatgtcatgaaagaaaataaaggtagtgaaatatggacaaaggacatttatatattaactaaagttgtttatgtttgtgttcttaaatttaaaacacgaagaaaaagaaatgtctttcttgttagtgaacaggcctgttttaaatatcttagtatgatatcaaaagaataatcaatttagttacctcccaactaaaaagtaaaaatgaaaaagacgacatggcagaagttgaaacaaacttgtatgtatctgtatgtgacctctagatggaaataaaagtttgatgtttgctagccgtggtccttttggctatggttgcggttcccctgtaaagcaaatgtacttaagtcatcattcagagtgagagagagaaagcacggctgaggctgagtcagttgaccgttgaggaagacctaaggagctgtccagttcttggctctttttcactgtgactgcacagcggtttccttcttcatagtcccttgctgtagtcaccaagagagcatgctagtgttttcctcttgttcctgcttatgcagagctcagatatatgaaaaatttgtatgctttgaaggctgccaaagcatttatactctggacatagttttaactgcaactgctttggctaccagtttaaaccgagttcttcaaaaagcatgaactcgttttcattcattagccctgtttacaatgtggattttgacataaatgaatttgattttcttttagctccagtaacagaatggaataagatctattgccataaattgtagttaagaactgtaaggcaatcgggcagtgaaacttgatattgtattaacttaataggaaccctgtgtacaatttaaaatatttgtaaaatatcactgtgaatttacagatgtctttttgtcattctttaacaatgaatttcccctgtgcatagttattaatagtattggtattattaaaaactaatttggcatttt

SEQ ID NO: 5119 - protein, 521 aa, Homo sapiens; identical to SEQ ID NO: 675

SEQ ID NO: 5120 - DNA, 2901 bp, Homo sapiens
aggctgaactggcgtggggcggtggtggttggctgcttgaggacgggtccctggtcgtgcctgtcagagaggctggcggcagtggtggctctcccggctgggttgtcagtcagtgagaggagggggaagatggctcaccgggacccgttctgctaggaagaaggggagcaggtggtgctgctactcgggaggaagcagagcagcctccgtcgctgtcgctgagagcctcacgagtcgaggtcctgcaggtggagctccggcagccgccctggttgaaggtttagaacagatgtggaaaaatgtttacttcagagaaaggggttgtggaggaatggttgtcagagtttaagacattaccagaaacatctttaccaaattatgccacaaatttgaaagacaagagttctttagtttcatctctctataaagttatccaggagccacaaagtgagttgctagaacctgtctgtcaccagctctttgaattctatcgcagtggagaggagcagttgcttcaatttacgctgcaatttctcccagaactaatttggtgctaccttgcagtctcagccagcagaaatgtgcatagcagtggatgcattgaagctcttcttctaggggtttacaatttggaaatagttgacaaacagggacataccaaagtattgagttttacgattccatctttatccaaaccatctgtataccatgaaccttccagcattgggtccatggctctgactgagagtgcactatcccagcatggtttgtcaaaagtggtatacagtggacctcatcctcaaagggagatgctgacagcacagaatcggtttgaagtgttgacattccttttgttgtgttacaatgctgccttaacttacatgcccagtgtttctcttcagtcactgtgtcaaatttgttcaagaatctgtgtttgtggatatcctcgacaacatgtaagaaaatataaaggtataagtagcaggataccagtttcttcaggattcatggtgcaaatgttaacagggatttattttgccttttataatggagaatgggatctagctcaaaaagcactggatgatattatatacagagcccagctagaattatatccagagccattgctggttgctaatgcaataaaggcttcattgcctcatggtcccatgaaatctaataaggaaggtacaaggtgtattcaagttgaaatcacaccaacttcctctcgaatatcaagaaatgcagtaaccagcatgtcaataaggggtcataggtggaaaagacatggaaatacagaattaacaggtcaagaagaactgatggagatatctgaagttgacgagggattttattccagggctgcgtctagtaccagccagtcgggtttatcaaacagtagtcacaattgtagtaacaagccaagtataggaaagaaccacagacggtcaggaggaagcaaaactggaggaaaagaaaaagaaactacaggggaatcttgcaaagatcactttgctcgaaaacaaactcagagagcccaaagtgagaatcttgagcttctctctttgaagagacttactttaacaaccagccaatccctacctaagcctagtagccatggtttggctaagaccgcagcgactgtatttagtaaatcctttgaacaagtcagtggtgtcacagtcccacataacccgtcatctgctgttggttgtggggctgggacagatgccaataggttttccgcttgtagtctccaagaagaaaagcttatttacgtttcagaaagaactgaacttccaatgaagcatcaatcaggtcagcagagacctcctagtattagcattactctgtccacagattaattagtaacatatttttctcccataacctagtgaacctggaaatacaactttgcttctttatgaaagtaccctgggtctttcatccgtattcctgacaggagccctgatgtcttaaattctgaaggctcccctgactttatgaagggaagattgtctaggttgcagtaagttgaaatatggttttgttatttcttgattaagattttttccccttggtttgagtcttttttttccctcctcttatttgttattgttgccctaagattgtcagtgacaataaattttgacaggttgtctaatcaagttggttatgtctcatgtgaggttgtaaggtggtttttcttgttttggtttggtttggttttttaatagctcctattttgatggctgtgtgtttggccttcagagtcaaagggagtctgcatgtatgggaactgttttatagagaatggggcagaggcacaactccaggaattctctagctcctggtcaggaagccaatctgaaaacaggcatgtggaaacacaaaaatgatgtgtatgaaaagcacctgatgaaaatatttgtaagcagatcatctttatgattagaacaatttgctcaaagccctggaaaatgcctggtaacccagtgcctagaatattatatgattccaggggatggctagaggcatttctgttgttatctctgaaacatttttatatcaaaaatcagattgctggtaggtgtgttgttttgaagtgttttatctggatttagcatgtgaagatccctttcaattattaaggtataataggctgtaaagctgatttaccctactgctggactttggaaatcctagttagtttggactcctataattcagagcatacgtcattggaagacttcctggaaatcagtgtaaatcttgcaacatagctctcaagataccactgtataatatgtaattgtttgtctgcaaatgcatttttcatctataaaatgtcatgaaagaaaataaaggtagtgaaatatggacaaaggacatttatatatt

SEQ ID NO: 5121 - protein, 521 aa, Homo sapiens; identical to SEQ ID NO: 675

SEQ ID NO: 5122 - DNA, 2162 bp, Homo sapiens
aggctgaactggcgtggggcggtggtggttggctgcttgaggacgggtccctggtcgtgcctgtcagagaggctggcggcagtggtggctctcccggctgggttgtcagtcagtgagaggagggggaagatggctcaccgggacccgttctgctaggaagaaggggagcaggtggtgctgctactcgggaggaagcagagcagcctccgtcgctgtcgctgagagcctcacgagtcgaggtcctgcaggtggagctccggcagccgccctggttgaaggtttagaacagatgtggaaaaatgtttacttcagagaaaggggttgtggaggaatggttgtcagagtttaagacattaccagaaacatctttaccaaattatgccacaaatttgaaagacaagagttctttagtttcatctctctataaagttatccaggagccacaaagtgagttgctagaacctgtctgtcaccagctctttgaattctatcgcagtggagaggagcagttgcttcaatttacgctgcaatttctcccagaactaatttggtgctaccttgcagtctcagccagcagaaatgtgcatagcagtggatgcattgaagctcttcttctaggggtttacaatttggaaatagttgacaaacagggacataccaaagtattgagttttacgattccatctttatccaaaccatctgtataccatgaaccttccagcattgggtccatggctctgactgagagtgcactatcccagcatggtttgtcaaaagtggtatacagtggacctcatcctcaaagggagatgctgacagcacagaatcggtttgaagtgttgacattccttttgttgtgttacaatgctgccttaacttacatgcccagtgtttctcttcagtcactgtgtcaaatttgttcaagaatctgtgtttgtggatatcctcgacaacatgtaagaaaatataaaggtataagtagcaggataccagtttcttcaggattcatggtgcaaatgttaacagggatttattttgccttttataatggagaatgggatctagctcaaaaagcactggatgatattatatacagagcccagctagaattatatccagagccattgctggttgctaatgcaataaaggcttcattgcctcatggtcccatgaaatctaataaggaaggtacaaggtgtattcaagttgaaatcacaccaacttcctctcgaatatcaagaaatgcagtaaccagcatgtcaataaggggtcataggtggaaaagacatggaaatacagaattaacaggtcaagaagaactgatggagatatctgaagttgacgagggattttattccagggctgcgtctagtaccagccagtcgggtttatcaaacagtagtcacaattgtagtaacaagccaagtataggaaagaaccacagacggtcaggaggaagcaaaactggaggaaaagaaaaagaaactacaggggaatcttgcaaagatcactttgctcgaaaacaaactcagagagcccaaagtgagaatcttgagcttctctctttgaagagacttactttaacaaccagccaatccctacctaagcctagtagccatggtttggctaagaccgcagcgactgtatttagtaaatcctttgaacaagtcagtggtgtcacagtcccacataacccgtcatctgctgttggttgtggggctgggacagatgccaataggttttccgcttgtagtctccaagaagaaaagcttatttacgtttcagaaagaactgaacttccaatgaagcatcaatcaggtcagcagagacctcctagtattagcattactctgtccacagattaattagtaacatatttttctcccataacctagtgaacctggaaatacaactttgcttctttatgaaagtaccctgggtctttcatccgtattcctgacaggagccctgatgtcttaaattctgaaggctcccctgactttatgaagggaagattgtctaggttgcagtaagttgaaatatggttttgttatttcttgattaagattttttccccttggtttgagtcttttttttccctcctcttatttgttattgttgccctaagattgtcagtgacaataaattttgacaggttgtct

SEQ ID NO: 5123 - protein, 521 aa, Homo sapiens; identical to SEQ ID NO: 675

SEQ ID NO: 5124 - DNA, 676 bp, Homo sapiens
tgcgcagcggggccagcgtgcccggggcgagcgcctgcaagaggttgttccccaggtacagctcttccagccgcgagagcttctcgaaggtcttggggtgcagagagcggatctggttgtactgcaggtccagccgtctgagctgccccagacggtggaagtcgaaggccgtgatgttggttatgaagttgccgccgaggctgtaggtgccaccctgcgggaagtttgggcagcacggagtccgccagcattctacaggaagtttgggggagcacaaggttgcctgcagaaggccatcagaaggggagagtgatctgcctgctccccgcagttgagagtgctgcactgcaagtgttacctggagagaatgaaatggaaataatgttctgggacttttgagtacaggccttaaaaggactggcatcttctgcttttccatttggaacaccagcctgctgtattgtggaaaagtccaggccaggacactacatgattagaggtggtatggagagagcactggaggagaggagatcatcttggatgtcccagctttagccaaactcccagctgaatgcagctgcacatgtgacctcagcctaccccatctgaatcagacccacccagctgagctcactcaatccacatatttgtgagaaataataaattgtttgaagcc

SEQ ID NO: 5125 - protein, 103 aa, Homo sapiens
AQRGQRARGERLQEVVPQVQLFQPRELLEGLGVQRADLVVLQVQPSELPQTVEVEGRDVGYEVAAEAVGATLREVWAARSPPAFYRKFGGAQGCLQKAIRRGE

SEQ ID NO: 5126 - DNA, 3707 bp, Homo sapiens
attttccccagctggcctggactgcctgtgctctgggctccagcaatccggggatagtttcagcaagatcaacactgagtatccctgacaggattcagccaagggccagtggcagcttcccagcctctttggagagtgatctgcctgctccccgcagttgagagtgctgcactgcaagtgttacctggtgaggcccacctccagcccactacttctgggaaaaatgacttaatgtctaaggagaaggctaatttggaagggagtcatactggtacaaggaggcaaattaggagactaccaaatcagtatagaaagatgcataccctcaagagaatctgcttgttgtggtttctgatttacatagatgatgagattggccccatgtctgaaaaacagtatgtggggaaggcctggagaagcaattgaactgaaacaaagtcaaaagtgggaagtccccctctggcaagcagctctaagatgacagagccggtgccagaatctaaaccttgggactctggttgctgtataaaaaaataaatattaggaacaaaaataaatacccacatctccatgctggacagcagaagagcaataagttgccaaattttttttttgttttgttttgatagttttttactctctaaatgtaagctcctatatttcctgtcttccatatgttagaagctcagtacaaacaggagaaaaagaaaaaaaaaaaggctggatgcacctcatttgttgtcaacagggatgtttcaaattattgttaaactagaagggactcaatgctttagaaacaactcattactcaattcagccacttttatttcctattaggctgtcatatagcaaaatgtccaacaccgccccatccctctctgctactactaccttttgacaagacagtctctttgttaaagtcaagttaaaactggatacagctgtggtagtttcaggcctatctgacagacaatattgaactcatttcatcatctgaaactttaatacaaaatgtctcttaaggactctatgaacagagcaagaggttcttgccctgtgaaaatagattaatgctaagagagctccctaatggcaatagaaaccaacatttattttatgcttattaggtgccaggtagagagagggtcaagtaatttataagcattatctcaattcatcctaataatgaaccctcctgtgagagtggtgggtgataatattatccccatttcacaggtgagggggttcttggagaggttaagtaacttgcccaaggtcatacagctggtacatggtagagcagggatctattccaagtctaacacagtatccattctcttaatccctatactataatgtcacttgaatatggtaacaaaagtagttagaattgccagtgtaatcaactagaaacaaaattcaagcctacttgatagtttagctcataaaatctgtctggtatcaccaaaggtgataggtgatttgggctggggagaatctataaattattttcaacaattcaaatagcctaatgcatgggttcttaatctgtttctgtgctacagtctcctatgactgtctggtgcagcctgtggactaccttctcacaataatgtttctaaatgcatgctggctgggcatggcggctcatgccgataatcctaggactttgggaggccaaggcaagaggatcacttgagctcaggagtttgaaaccaggctgaacagcatggcaagaccccatctctacaagaaaatacaaaaattagtcaggtgtggtatcatgtgcctatggtcccagatacctgggatgctgaggtgggaggatttgttgagcctgggagttcaaggctaaagtgagccatgatggtgctacagcacttcagcctaggtgacagggcaagtccctgccttaaaataaatacatacataattaatacagagtgcatatgcatccacacatatacatagataatatacagtgaattaaaatcaaatcctaggctttgctaggattgcaaatgaaacactccactgaaatcatcaaaacagtaaaaaaaaattgtgagatagcacatacatacttgtatattagcacattcagtaggagaaaccagagggtctgaaaactactataattttaattttagtgataaggataaaaggttttcaacatatctataacagtgtatgtggtatttggtatgagaatgtctttgctttctattggtgacaaaagtcaaaggtactgctgtgccactgtgatttgttgcctacatttataatggaaggaaatgtgaaatttcacaattcataatgaaaggaaatgctatttcagttagaggttagagaaaataaagatgcagttttttcccttccaagttcactgacaactccttgaatcctaaccacagacccttactccaggttaagaatccttattaaatagcctaatgagtaactaatggaaatactgagcttacttataataagacttcacagtctaaaatgtggcactttttttttctttgctttgacatggaattgtatgaatctattatccagaaaaaaaattcactgtggctagtggacatctttgctgcaaaccatcactctggatgatgtttaaagcagacagtgcttggtagttttttctttgttgaaaggcaacacagacacactactatctaagagcactgcacaccaggaacacgttgtttcagtacagcacaaaactgctgggaaaaggaaactaatgcttttaaacaaataaaagagttttcttacaagtctaaattgccagtgatctatcaataattaaaaagaacaaagaccacttgtaaacctgcagtgcatggcagggactgaagtctacaatttagattaaggttttggctgatgatttcagagaaccagtgccataccagttgatactactgactggaagacagagacaatgcttcaggtcaatggctgatttgtaaagagtaaaactgtgttctcaaatttctggttagcttgtaagtaaaaatggatttagaacatacttcaggaatcagaatgaaagtttctccaaacatatgccacatgggggttcctgccagatggaagccatgtcattatcaatagagggacaaaagacatcatagtttagggttcccaaactggctacatattagaaacctctttgaagcttcaataccaatgcccaggttccaccccagaccaataaaatcagggtatctacagagcaggtgtggaaatctgtatctgcaaaggttgagacacattggtttagggcaaaggaggagattaaaaatggctccagattctttgccattcttcccaccaaaaggaatctgctttgctctgtgttttgcattgaccaggagagaatgaaatggaaataatgttctgggacttttgagtacaggccttaaaaggactggcatcttctgcttttccatttggaacaccagcctgctgtattgtggaaaagtccaggccaggacactacatgattagaggtggtatggagagagcactggaggagaggagatcatcttggatgtcccagctttagccaaactcccagctgaatgcagctgcacatgtgacctcagcctaccccatctgaatcagacccacccagctgagctcactcaatccacatatttgtgagaaataataaattgtttgaagccact

SEQ ID NO: 5127 - protein, 64 aa, Homo sapiens
MSKEKANLEGSHTGTRRQIRRLPNQYRKMHTLKRICLLWFLIYIDDEIGPMSEKQYVGKAWRSN

SEQ ID NO: 5128 - DNA, 711 bp, Homo sapiens
gcaaaagatactgctgaagaagagtaaacagactttggccactgggtgaatataaaagaaggacaagagaaagctgttgatgcccaagaagagaaaaacgttccactgaagggtaggaaatggcagaaaatttggaaccggggctcagaatcgcatgcttcccgggatggtgcacctttctcttctgactgtccagtgagggaagaatgtgatctagaagcaaatccacatggaccttggtttacttatgaggccaaaacagaattgcatttctcattccttaagaaactagaactcttaaggaattgttctgaggctctagcctaacaaatattaacatttttcggggacagaggagctaatttaagggaaccgtgactgattagagattccttttcctctgccctaacaaggaagacacattctagtggaattttaccctgaagaaactacctcattggagcaaacaaaatccacccttcatccagtccaagatcagcttccattttccagggcaacatcactccaaaccttttttgatagaatctactttttttttttttttttaacttttgtttatttttgccccaaagcctttggcattgtcctccagtgagtcacactatggagccatttcaaaatgtcctccttaaagaatgtttctcttcccaggggagatgggaaattggtcaatgacagcatgttctggca

SEQ ID NO: 5129 - protein, 99 aa, Homo sapiens
TDFGHWVNIKEGQEKAVDAQEEKNVPLKGRKWQKIWNRGSESHASRDGAPFSSDCPVREECDLEANPHGPWFTYEAKTELHFSFLKKLELLRNCSEALA

SEQ ID NO: 5130 - DNA, 2111 bp, Homo sapiens
gctcgagttctgcagggtcctcgtgactgggtggggctgcctcacttctgcctgatttgggaagcgctgcaaggacaaccggctggggtccttgcgcgccgcggctcagggaggagcaccgactgcgccgcaccctgagagatggttggtgccatgtggaaggtgattgtttcgctggtcctgttgatgcctggcccctgtgatgggctgtttcgctccctatacagaagtgtttccatgccacctaagggagactcaggacagccattatttctcaccccttacattgaagctgggaagatccaaaaaggaagagaattgagtttggtcggccctttcccaggactgaacatgaagagttatgccggcttcctcaccgtgaataagacttacaacagcaacctcttcttctggttcttcccagctcagatacagccagaagatgccccagtagttctctggctacagggtgggccgggaggttcatccatgtttggactctttgtggaacatgggccttatgttgtcacaagtaacatgaccttgcgtgacagagacttcccctggaccacaacgctctccatgctttacattgacaatccagtgggcacaggcttcagttttactgatgatacccacggatatgcagtcaatgaggacgatgtagcacgggatttatacagtgcactaattcagtttttccagatatttcctgaatataaaaataatgacttttatgtcactggggagtcttatgcagggaaatatgtgccagccattgcacacctcatccattccctcaaccctgtgagagaggtgaagatcaacctgaacggaattgctattggagatggatattctgatcccgaatcaattatagggggctatgcagaattcctgtaccaaattggcttgttggatgagaagcaaaaaaagtacttccagaagcagtgccatgaatgcatagaacacatcaggaagcagaactggtttgaggcctttgaaatactggataaactactagatggcgacttaacaagtgatccttcttacttccagaatgttacaggatgtagtaattactataactttttgcggtgcacggaacctgaggatcagctttactatgtgaaatttttgtcactcccagaggtgagacaagccatccacgtggggaatcagacttttaatgatggaactatagttgaaaagtacttgcgagaagatacagtacagtcagttaagccatggttaactgaaatcatgaataattataaggttctgatctacaatggccaactggacatcatcgtggcagctgccctgacagagcgctccttgatgggcatggactggaaaggatcccaggaatacaagaaggcagaaaaaaaagtttggaagatctttaaatctgacagtgaagtggctggttacatccggcaagcgggtgacttccatcaggtaattattcgaggtggaggacatattttaccctatgaccagcctctgagagcttttgacatgattaatcgattcatttatggaaaaggatgggatccttatgttggataaactaccttcccaaaagagaacatcagaggttttcattgctgaaaagaaaatcgtaaaaacagaaaatgtcataggaataaaaaaattatcttttcatatctgcaagatttttttcatcaataaaaattatccttgaaacaagtgagcttttgtttttggggggagatgtttactacaaaattaacatgagtacatgagtaagaattacattatttaacttaaaggatgaaaggtatggatgatgtgacactgagacaagatgtataaatgaaattttagggtcttgaataggaagttttaatttcttctaagagtaagtgaaaagtgcagttgtaacaaacaaagctgtaacatctttttctgccaataacagaagtttggcatgccgtgaaggtgtttggaaatattattggataagaatagctcaattatcccaaataaatggatgaagctataatagttttggggaaaagattctcaaatgtataaagtcttagaacaaaagaattctttgaaataaaaatattatatataaaagt

SEQ ID NO: 5131 - protein, 476 aa, Homo sapiens; identical to SEQ ID NO: 677

SEQ ID NO: 5132 - DNA, 2301 bp, Homo sapiens
gacttgatgcggccaggtttctgggaccaggaggttgggacacgacgacgcactttttgccctgtgggtctgggtcatgtgagcctagaggagcgcttaaaggctcgagttctgcagggtcctcgtgactgggtggggctgcctcacttctgcctgatttgggaagcgctgcaaggacaaccggctggggtccttgcgcgccgcggctcagggaggagcaccgactgcgccgcgtaagtgccgcctgccctgcgtgggtcgtgccagctcagcgggacaggtcctcgcctcggtccctcggacttagggagcgcggggcagaccctgagagatggttggtgccatgtggaaggtgattgtttcgctggtcctgttgatgcctggcccctgtgatgggctgtttcgctccctatacagaagtgtttccatgccacctaagggagactcaggacagccattatttctcaccccttacattgaagctgggaagatccaaaaaggaagagaattgagtttggtcggccctttcccaggactgaacatgaagagttatgccggcttcctcaccgtgaataagacttacaacagcaacctcttcttctggttcttcccagctcagatacagccagaagatgccccagtagttctctggctacagggtgggccgggaggttcatccatgtttggactctttgtggaacatgggccttatgttgtcacaagtaacatgaccttgcgtgacagagacttcccctggaccacaacgctctccatgctttacattgacaatccagtgggcacaggcttcagttttactgatgatacccacggatatgcagtcaatgaggacgatgtagcacgggatttatacagtgcactaattcagtttttccagatatttcctgaatataaaaataatgacttttatgtcactggggagtcttatgcagggaaatatgtgccagccattgcacacctcatccattccctcaaccctgtgagagaggtgaagatcaacctgaacggaattgctattggagatggatattctgatcccgaatcaattatagggggctatgcagaattcctgtaccaaattggcttgttggatgagaagcaaaaaaagtacttccagaagcagtgccatgaatgcatagaacacatcaggaagcagaactggtttgaggcctttgaaatactggataaactactagatggcgacttaacaagtgatccttcttacttccagaatgttacaggatgtagtaattactataactttttgcggtgcacggaacctgaggatcagctttactatgtgaaatttttgtcactcccagaggtgagacaagccatccacgtggggaatcagacttttaatgatggaactatagttgaaaagtacttgcgagaagatacagtacagtcagttaagccatggttaactgaaatcatgaataattataaggttctgatctacaatggccaactggacatcatcgtggcagctgccctgacagagcgctccttgatgggcatggactggaaaggatcccaggaatacaagaaggcagaaaaaaaagtttggaagatctttaaatctgacagtgaagtggctggttacatccggcaagcgggtgacttccatcaggtaattattcgaggtggaggacatattttaccctatgaccagcctctgagagcttttgacatgattaatcgattcatttatggaaaaggatgggatccttatgttggataaactaccttcccaaaagagaacatcagaggttttcattgctgaaaagaaaatcgtaaaaacagaaaatgtcataggaataaaaaaattatcttttcatatctgcaagatttttttcatcaataaaaattatccttgaaacaagtgagcttttgtttttggggggagatgtttactacaaaattaacatgagtacatgagtaagaattacattatttaacttaaaggatgaaaggtatggatgatgtgacactgagacaagatgtataaatgaaattttagggtcttgaataggaagttttaatttcttctaagagtaagtgaaaagtgcagttgtaacaaacaaagctgtaacatctttttctgccaataacagaagtttggcatgccgtgaaggtgtttggaaatattattggataagaatagctcaattatcccaaataaatggatgaagctataatagttttggggaaaagattctcaaatgtataaagtcttagaacaaaagaattctttgaaataaaaatattatatataaaagt

SEQ ID NO: 5133 - protein, 476 aa, Homo sapiens; identical to SEQ ID NO: 677

SEQ ID NO: 5134 - DNA, 2617 bp, Homo sapiens
gctcctttcgcttttcgctcgctgcactccaagccccggaacacccgcgtccgcacactaagggcaccaccgctctcccacctctgcgctgtcagatgtcaggcgcggaggtgctctgggcaccgaggtgctggcgaaccaaacaagtatcaccccggacgcctgcccccattccgagagagcgggcgggatggccacaggctgcaatacagtgacacgatcacagctcactgctacagcctctacctcctgggcttaatccatcctccctcctcagcctcccaagcagctgggactacaggtgattttgatatgctgctaaggtttgataagagaaatgagattcagagaacagattatattgttgaagagcttgactggaaatgatccaaacggaaacattggctcttcctggggttccagcctgctgtcttgacaggaactataccatcagctctcctgggtctcttacatgccaagtcatcctgcagatctgggactcactccgtaatcagcttgattgctgtaagttgaacacgtcagtggcatgggcaccagctgcacaaccctaggagccaccaaacacagtatattctatataaatgttgctgccaggagccccagttcaaactacaataccctgagagatggttggtgccatgtggaaggtgattgtttcgctggtcctgttgatgcctggcccctgtgatgggctgtttcgctccctatacagaagtgtttccatgccacctaagggagactcaggacagccattatttctcaccccttacattgaagctgggaagatccaaaaaggaagagaattgagtttggtcggccctttcccaggactgaacatgaagagttatgccggcttcctcaccgtgaataagacttacaacagcaacctcttcttctggttcttcccagctcagatacagccagaagatgccccagtagttctctggctacagggtgggccgggaggttcatccatgtttggactctttgtggaacatgggccttatgttgtcacaagtaacatgaccttgcgtgacagagacttcccctggaccacaacgctctccatgctttacattgacaatccagtgggcacaggcttcagttttactgatgatacccacggatatgcagtcaatgaggacgatgtagcacgggatttatacagtgcactaattcagtttttccagatatttcctgaatataaaaataatgacttttatgtcactggggagtcttatgcagggaaatatgtgccagccattgcacacctcatccattccctcaaccctgtgagagaggtgaagatcaacctgaacggaattgctattggagatggatattctgatcccgaatcaattatagggggctatgcagaattcctgtaccaaattggcttgttggatgagaagcaaaaaaagtacttccagaagcagtgccatgaatgcatagaacacatcaggaagcagaactggtttgaggcctttgaaatactggataaactactagatggcgacttaacaagtgatccttcttacttccagaatgttacaggatgtagtaattactataactttttgcggtgcacggaacctgaggatcagctttactatgtgaaatttttgtcactcccagaggtgagacaagccatccacgtggggaatcagacttttaatgatggaactatagttgaaaagtacttgcgagaagatacagtacagtcagttaagccatggttaactgaaatcatgaataattataaggttctgatctacaatggccaactggacatcatcgtggcagctgccctgacagagcgctccttgatgggcatggactggaaaggatcccaggaatacaagaaggcagaaaaaaaagtttggaagatctttaaatctgacagtgaagtggctggttacatccggcaagcgggtgacttccatcaggtaattattcgaggtggaggacatattttaccctatgaccagcctctgagagcttttgacatgattaatcgattcatttatggaaaaggatgggatccttatgttggataaactaccttcccaaaagagaacatcagaggttttcattgctgaaaagaaaatcgtaaaaacagaaaatgtcataggaataaaaaaattatcttttcatatctgcaagatttttttcatcaataaaaattatccttgaaacaagtgagcttttgtttttggggggagatgtttactacaaaattaacatgagtacatgagtaagaattacattatttaacttaaaggatgaaaggtatggatgatgtgacactgagacaagatgtataaatgaaattttagggtcttgaataggaagttttaatttcttctaagagtaagtgaaaagtgcagttgtaacaaacaaagctgtaacatctttttctgccaataacagaagtttggcatgccgtgaaggtgtttggaaatattattggataagaatagctcaattatcccaaataaatggatgaagctataatagttttggggaaaagattctcaaatgtataaagtcttagaacaaaagaattctttgaaataaaaatattatatataaaagt

SEQ ID NO: 5135 - protein, 476 aa, Homo sapiens; identical to SEQ ID NO: 677

SEQ ID NO: 5136 - DNA, 1711 bp, Homo sapiens
gctcgagttctgcagggtcctcgtgactgggtggggctgcctcacttctgcctgatttgggaagcgctgcaaggacaaccggctggggtccttgcgcgccgcggctcagggaggagcaccgactgcgccgcaccctgagagatggttggtgccatgtggaaggtgattgtttcgctggtcctgttgatgcctggcccctgtgatgggctgtttcgctccctatacagaagtgtttccatgccacctaagggagactcaggacagccattatttctcaccccttacattgaagctgggaagatccaaaaaggaagagaattgagtttggtcggccctttcccaggactgaacatgaagagttatgccggcttcctcaccgtgaataagacttacaacagcaacctcttcttctggttcttcccagctcagatacagccagaagatgccccagtagttctctggctacagggtgggccgggaggttcatccatgtttggactctttgtggaacatgggccttatgttgtcacaagtaacatgaccttgcgtgacagagacttcccctggaccacaacgctctccatgctttacattgacaatccagtgggcacaggcttcagttttactgatgatacccacggatatgcagtcaatgaggacgatgtagcacgggatttatacagtgcactaattcagtttttccagatatttcctgaatataaaaataatgacttttatgtcactggggagtcttatgcagggaaatatgtgccagccattgcacacctcatccattccctcaaccctgtgagagaggtgaagatcaacctgaacggaattgctattggagatggatattctgatcccgaatcaattatagggggctatgcagaattcctgtaccaaattggcttgttggatgagaagcaaaaaaagtacttccagaagcagtgccatgaatgcatagaacacatcaggaagcagaactggtttgaggcctttgaaatactggataaactactagatggcgacttaacaagtgatccttcttacttccagaatgttacaggatgtagtaattactataactttttgcggtgcacggaacctgaggatcagctttactatgtgaaatttttgtcactcccagaggtgagacaagccatccacgtggggaatcagacttttaatgatggaactatagttgaaaagtacttgcgagaagatacagtacagtcagttaagccatggttaactgaaatcatgaataattataaggttctgatctacaatggccaactggacatcatcgtggcagctgccctgacagagcgctccttgatgggcatggactggaaaggatcccaggaatacaagaaggcagaaaaaaaagtttggaagatctttaaatctgacagtgaagtggctggttacatccggcaagcgggtgacttccatcaggtaattattcgaggtggaggacatattttaccctatgaccagcctctgagagcttttgacatgattaatcgattcatttatggaaaaggatgggatccttatgttggataaactaccttcccaaaagagaacatcagaggttttcattgctgaaaagaaaatcgtaaaaacagaaaatgtcataggaataaaaaaattatcttttcatatctgcaagatttttttcatcaataaaaattatccttgaaac

SEQ ID NO: 5137 - protein, 476 aa, Homo sapiens; identical to SEQ ID NO: 677

SEQ ID NO: 5138 - DNA, 1901 bp, Homo sapiens
gacttgatgcggccaggtttctgggaccaggaggttgggacacgacgacgcactttttgccctgtgggtctgggtcatgtgagcctagaggagcgcttaaaggctcgagttctgcagggtcctcgtgactgggtggggctgcctcacttctgcctgatttgggaagcgctgcaaggacaaccggctggggtccttgcgcgccgcggctcagggaggagcaccgactgcgccgcgtaagtgccgcctgccctgcgtgggtcgtgccagctcagcgggacaggtcctcgcctcggtccctcggacttagggagcgcggggcagaccctgagagatggttggtgccatgtggaaggtgattgtttcgctggtcctgttgatgcctggcccctgtgatgggctgtttcgctccctatacagaagtgtttccatgccacctaagggagactcaggacagccattatttctcaccccttacattgaagctgggaagatccaaaaaggaagagaattgagtttggtcggccctttcccaggactgaacatgaagagttatgccggcttcctcaccgtgaataagacttacaacagcaacctcttcttctggttcttcccagctcagatacagccagaagatgccccagtagttctctggctacagggtgggccgggaggttcatccatgtttggactctttgtggaacatgggccttatgttgtcacaagtaacatgaccttgcgtgacagagacttcccctggaccacaacgctctccatgctttacattgacaatccagtgggcacaggcttcagttttactgatgatacccacggatatgcagtcaatgaggacgatgtagcacgggatttatacagtgcactaattcagtttttccagatatttcctgaatataaaaataatgacttttatgtcactggggagtcttatgcagggaaatatgtgccagccattgcacacctcatccattccctcaaccctgtgagagaggtgaagatcaacctgaacggaattgctattggagatggatattctgatcccgaatcaattatagggggctatgcagaattcctgtaccaaattggcttgttggatgagaagcaaaaaaagtacttccagaagcagtgccatgaatgcatagaacacatcaggaagcagaactggtttgaggcctttgaaatactggataaactactagatggcgacttaacaagtgatccttcttacttccagaatgttacaggatgtagtaattactataactttttgcggtgcacggaacctgaggatcagctttactatgtgaaatttttgtcactcccagaggtgagacaagccatccacgtggggaatcagacttttaatgatggaactatagttgaaaagtacttgcgagaagatacagtacagtcagttaagccatggttaactgaaatcatgaataattataaggttctgatctacaatggccaactggacatcatcgtggcagctgccctgacagagcgctccttgatgggcatggactggaaaggatcccaggaatacaagaaggcagaaaaaaaagtttggaagatctttaaatctgacagtgaagtggctggttacatccggcaagcgggtgacttccatcaggtaattattcgaggtggaggacatattttaccctatgaccagcctctgagagcttttgacatgattaatcgattcatttatggaaaaggatgggatccttatgttggataaactaccttcccaaaagagaacatcagaggttttcattgctgaaaagaaaatcgtaaaaacagaaaatgtcataggaataaaaaaattatcttttcatatctgcaagatttttttcatcaataaaaattatccttgaaac

SEQ ID NO: 5139 - protein, 476 aa, Homo sapiens; identical to SEQ ID NO: 677

SEQ ID NO: 5140 - DNA, 2217 bp, Homo sapiens
gctcctttcgcttttcgctcgctgcactccaagccccggaacacccgcgtccgcacactaagggcaccaccgctctcccacctctgcgctgtcagatgtcaggcgcggaggtgctctgggcaccgaggtgctggcgaaccaaacaagtatcaccccggacgcctgcccccattccgagagagcgggcgggatggccacaggctgcaatacagtgacacgatcacagctcactgctacagcctctacctcctgggcttaatccatcctccctcctcagcctcccaagcagctgggactacaggtgattttgatatgctgctaaggtttgataagagaaatgagattcagagaacagattatattgttgaagagcttgactggaaatgatccaaacggaaacattggctcttcctggggttccagcctgctgtcttgacaggaactataccatcagctctcctgggtctcttacatgccaagtcatcctgcagatctgggactcactccgtaatcagcttgattgctgtaagttgaacacgtcagtggcatgggcaccagctgcacaaccctaggagccaccaaacacagtatattctatataaatgttgctgccaggagccccagttcaaactacaataccctgagagatggttggtgccatgtggaaggtgattgtttcgctggtcctgttgatgcctggcccctgtgatgggctgtttcgctccctatacagaagtgtttccatgccacctaagggagactcaggacagccattatttctcaccccttacattgaagctgggaagatccaaaaaggaagagaattgagtttggtcggccctttcccaggactgaacatgaagagttatgccggcttcctcaccgtgaataagacttacaacagcaacctcttcttctggttcttcccagctcagatacagccagaagatgccccagtagttctctggctacagggtgggccgggaggttcatccatgtttggactctttgtggaacatgggccttatgttgtcacaagtaacatgaccttgcgtgacagagacttcccctggaccacaacgctctccatgctttacattgacaatccagtgggcacaggcttcagttttactgatgatacccacggatatgcagtcaatgaggacgatgtagcacgggatttatacagtgcactaattcagtttttccagatatttcctgaatataaaaataatgacttttatgtcactggggagtcttatgcagggaaatatgtgccagccattgcacacctcatccattccctcaaccctgtgagagaggtgaagatcaacctgaacggaattgctattggagatggatattctgatcccgaatcaattatagggggctatgcagaattcctgtaccaaattggcttgttggatgagaagcaaaaaaagtacttccagaagcagtgccatgaatgcatagaacacatcaggaagcagaactggtttgaggcctttgaaatactggataaactactagatggcgacttaacaagtgatccttcttacttccagaatgttacaggatgtagtaattactataactttttgcggtgcacggaacctgaggatcagctttactatgtgaaatttttgtcactcccagaggtgagacaagccatccacgtggggaatcagacttttaatgatggaactatagttgaaaagtacttgcgagaagatacagtacagtcagttaagccatggttaactgaaatcatgaataattataaggttctgatctacaatggccaactggacatcatcgtggcagctgccctgacagagcgctccttgatgggcatggactggaaaggatcccaggaatacaagaaggcagaaaaaaaagtttggaagatctttaaatctgacagtgaagtggctggttacatccggcaagcgggtgacttccatcaggtaattattcgaggtggaggacatattttaccctatgaccagcctctgagagcttttgacatgattaatcgattcatttatggaaaaggatgggatccttatgttggataaactaccttcccaaaagagaacatcagaggttttcattgctgaaaagaaaatcgtaaaaacagaaaatgtcataggaataaaaaaattatcttttcatatctgcaagatttttttcatcaataaaaattatccttgaaac

SEQ ID NO: 5141 - protein, 476 aa, Homo sapiens; identical to SEQ ID NO: 677

SEQ ID NO: 5142 - DNA, 979 bp, Homo sapiens
aaatgacttaatgtctaaggagaaggctaatttggaagggagtcatactggtacaaggaggcaaattaggagactaccaaatcaggcttctgacatgggcagatttgcaaaggtggtgctactcaccaggaaagagaaaagagccacatgggagctgcaagtttggcaggcagaatatgtaggattggtttattgtttctgctttccagtatagaaagatgcataccctcaagagaatctgcttgttgtggtttctgatttacatagatgatgagattggccccatgtctgaaaaacagtatgtggggaaggcctggagaagcaattgaactgaaacaaagtcaaaagtgggaagtccccctctggcaagcagctctaagatgacagagccggtgccagaatctaaaccttgggactctggttgctgtataaaaaaataaatattaggaacaaaaataaatacccacatctccatgctggacagcagaagagcaataagttgccaaattttttttttgttttgttttgatagttttttactctctaaatgtaagctcctatatttcctgtcttccatatgttagaagctcagtacaaacaggagaaaaagaaaaaaaaaaaggctggatgcacctcatttgttgtcaacagggatgtttcaaattattgttaaactagaagggactcaatgctttagaaacaactcattactcaattcagccacttttatttcctattaggctgtcatatagcaaaatgtccaacaccgccccatccctctctgctactactaccttttgacaagacagtctctttgttaaagtcaagttaaaactggatacagctgtggtagtttcaggcctatctgacagacaatattgaactcatttcatcatctgaaactttaatacaaaatgtctcttaaggactctatgaacagagcaagaggttcttgccctgtgaaaatagattaatgcta

SEQ ID NO: 5143 - protein, 67 aa, Homo sapiens
MSKEKANLEGSHTGTRRQIRRLPNQASDMGRFAKVVLLTRKEKRATWELQVWQAEYVGLVYCFCFPV

SEQ ID NO: 5144 - DNA, 1313 bp, Homo sapiens
tgatccagtattatggattttatacaagttatgttcttctttcaggcttatccagaatcagatcacagctaaggggactgcccagctggcagatgcgttacagagcaacactggcataacagagatttgcctaaatggaaacctgataaaaccagaggaggccaaagtctatgaagatgagaagcggattatctgtttctgagaggatgctttcctgttcatggggtttttgccctggagcctcagcagcaaatgccactctgggcagtcttttgtgtcagtgtcttaaaggggcctgcgcaggcgggactatcaggagtccactgcctccatgatgcaagccagcttcctgtgcagaaggtctggtcggcaaactccctaagtacccgctacaattctgcagaaaaagaatgtgtcttgcgagctgttgtagttacagtaaatacactgtgaagagactttattgcctattataattatttttatctgaagctagaggaataaagctgtgagcaaacagaggaggccagcctcacctcattccaacacctgccatagggaccaacgggagcgagttggtcaccgctcttttcattgaagagttgaggatgtggcacaaagttggtgccaagcttcttgaataaaacgtgtttgatggattagtattatacctgaaatattttcttccttctcagcactttcccatgtattgatactggtcccacttcacagctggagacaccggagtatgtgcagtgtgggatttgactcctccaaggttttgtggaaagttaatgtcaaggaaaggatgcaccacgggcttttaattttaatcctggagtctcactgtctgctggcaaagatagagaatgccctcagctcttagctggtctaagaatgacgatgccttcaaaatgctgcttccactcagggcttctcctctgctaggctaccctcctctagaaggctgagtaccatgggctacagtgtctggccttgggaagaagtgattctgtccctccaaagaaatagggcatggcttgcccctgtggccctggcatccaaatggctgcttttgtctcccttacctcgtgaagaggggaagtctcttcctgcctcccaagcagctgaagggtgactaaacgggcgccaagactcaggggatcggctgggaactgggccagcagagcatgttggacaccccccaccatggtgggcttgtggtggctgctccatgagggtgggggtgatactactagatcacttgtcctcttgccagctcatttgttaataaaatactgaaaacactctta

SEQ ID NO: 5145 - protein, 66 aa, Homo sapiens [sequence omitted]

SEQ ID NO: 5146 - DNA, 1587 bp, Homo sapiens
ggtagctgggctaagaaataggagcccaggtacaggatttgcattaaaaatgagtcccattgaccttctgtggggctgacaggctgggcttggagcctggctgttttctgggttctcagcaagtgatcatctgcatagctggagagccttgggctgagctcccgctcctgtgaactctaaaacaatgtctgccaagtaggctctcttgagtaaatacttccttttttttccttaggctgacccaaaatgaactcaacgatgaagtggcagagagtttggcagaaatgttgaaagtcaaccagacgttaaagcatttatggcttatccagaatcagatcacagctaaggggactgcccagctggcagatgcgttacagagcaacactggcataacagagatttgcctaaatggaaacctgataaaaccagaggaggccaaagtctatgaagatgagaagcggattatctgtttctgagaggatgctttcctgttcatggggtttttgccctggagcctcagcagcaaatgccactctgggcagtcttttgtgtcagtgtcttaaaggggcctgcgcaggcgggactatcaggagtccactgcctccatgatgcaagccagcttcctgtgcagaaggtctggtcggcaaactccctaagtacccgctacaattctgcagaaaaagaatgtgtcttgcgagctgttgtagttacagtaaatacactgtgaagagactttattgcctattataattatttttatctgaagctagaggaataaagctgtgagcaaacagaggaggccagcctcacctcattccaacacctgccatagggaccaacgggagcgagttggtcaccgctcttttcattgaagagttgaggatgtggcacaaagttggtgccaagcttcttgaataaaacgtgtttgatggattagtattatacctgaaatattttcttccttctcagcactttcccatgtattgatactggtcccacttcacagctggagacaccggagtatgtgcagtgtgggatttgactcctccaaggttttgtggaaagttaatgtcaaggaaaggatgcaccacgggcttttaattttaatcctggagtctcactgtctgctggcaaagatagagaatgccctcagctcttagctggtctaagaatgacgatgccttcaaaatgctgcttccactcagggcttctcctctgctaggctaccctcctctagaaggctgagtaccatgggctacagtgtctggccttgggaagaagtgattctgtccctccaaagaaatagggcatggcttgcccctgtggccctggcatccaaatggctgcttttgtctcccttacctcgtgaagaggggaagtctcttcctgcctcccaagcagctgaagggtgactaaacgggcgccaagactcaggggatcggctgggaactgggccagcagagcatgttggacaccccccaccatggtgggcttgtggtggctgctccatgagggtgggggtgatactactagatcacttgtcctcttgccagctcatttgttaataaaatactgaaaacactctta

SEQ ID NO: 5147 - protein, 63 aa, Homo sapiens [sequence omitted]

SEQ ID NO: 5148 - DNA, 2311 bp, Homo sapiens
tttgggtccataatccctcatccagagcctttggggcaagacccgaatggggattctgagtgcatgctatggcatgacgtggccgcaggggtctaaggcagtgccccattttcaaacactttcatatttctcccgcagaatgtatgaaacagtcaaaccaagtgtggtaagaaagactataagtagctccacatcagttgccaaaagaattgtgagaaactttgggcattcagagcctttgaggttttggagtctgagagaagggattgcgggccagccccacacaactggtggctctgcaagctggagcagttgttcagtttcttggggcctcagtggccttcgatgttaatgaggacatggacgcaaacgaccccgggccacactcggctccagggctctgtgtggctgtggaaccctggaagcctgagcttagctgcctttcaacttccatctgctgtactattgaattggcattgagcggtgagatggctgaaaggtagacatcgagaagttttaatattcagaatcttttcttctcaagacgctgaatgtaatcttagttgtaaatacccatcacctgccagtcaccgagcactcatgcaccagggctttgcgttatgtcctaagatcctcataaccaccctgcaaggggactatcatcattacctctgtattacagatggagaaactgaggcacagagaggtaacgtgacttgtctcaggccataaagctggggaaagtagtggagctggttttgaacctgagctgtgagacctcagagccctaaactctggtgcctgtgtgttcccctttcaacccagactttggaaatcagtagacaccatatgcttcaaaaaacaggggctattaaaatgacatcaggagccagaaagtctcatggctgtgctttctcttgaagtttatacaacaaccagatcaccgatgtcggagccagactgggaaaaaacaaaataacaagtgaaggagggaagtatctcgccctggctgtgaagaacagcaaatcaatctctgaggttgggcttatccagaatcagatcacagctaaggggactgcccagctggcagatgcgttacagagcaacactggcataacagagatttgcctaaatggaaacctgataaaaccagaggaggccaaagtctatgaagatgagaagcggattatctgtttctgagaggatgctttcctgttcatggggtttttgccctggagcctcagcagcaaatgccactctgggcagtcttttgtgtcagtgtcttaaaggggcctgcgcaggcgggactatcaggagtccactgcctccatgatgcaagccagcttcctgtgcagaaggtctggtcggcaaactccctaagtacccgctacaattctgcagaaaaagaatgtgtcttgcgagctgttgtagttacagtaaatacactgtgaagagactttattgcctattataattatttttatctgaagctagaggaataaagctgtgagcaaacagaggaggccagcctcacctcattccaacacctgccatagggaccaacgggagcgagttggtcaccgctcttttcattgaagagttgaggatgtggcacaaagttggtgccaagcttcttgaataaaacgtgtttgatggattagtattatacctgaaatattttcttccttctcagcactttcccatgtattgatactggtcccacttcacagctggagacaccggagtatgtgcagtgtgggatttgactcctccaaggttttgtggaaagttaatgtcaaggaaaggatgcaccacgggcttttaattttaatcctggagtctcactgtctgctggcaaagatagagaatgccctcagctcttagctggtctaagaatgacgatgccttcaaaatgctgcttccactcagggcttctcctctgctaggctaccctcctctagaaggctgagtaccatgggctacagtgtctggccttgggaagaagtgattctgtccctccaaagaaatagggcatggcttgcccctgtggccctggcatccaaatggctgcttttgtctcccttacctcgtgaagaggggaagtctcttcctgcctcccaagcagctgaagggtgactaaacgggcgccaagactcaggggatcggctgggaactgggccagcagagcatgttggacaccccccaccatggtgggcttgtggtggctgctccatgagggtgggggtgatactactagatcacttgtcctcttgccagctcatttgttaataaaatactgaaaacactctta

SEQ ID NO: 5149 - protein, 101 aa, Homo sapiens
MGILSACYGMTWPQGSKAVPHFQTLSYFSRRMYETVKPSVVRKTISSSTSVAKRIVRNFGHSEPLRFWSLREGIAGQPHTTGGSASWSSCSVSWGLSGLRC

SEQ ID NO: 5150 - DNA, 3105 bp, Homo sapiens
ctattttgggtccataatccctcatccagagcctttggggcaagacccgaatggggattctgagtgcatgctatggcatgacgtggccgcaggggtctaaggcagtgccccattttcaaacactttcatatttctcccgcagaatgtatgaaacagtcaaaccaagtgtggtaagaaagactataagtagctccacatcagttgccaaaagaattgtgagaaactttgggcattcagagcctttgaggttttggagtctgagagaagggattgcgggccagccccacacaactggtggctctgcaagctggagcagttgttcagtttcttggggcctcagtggccttcgatgttaatgaggacatggacgcaaacgaccccgggccacactcggctccagggctctgtgtggctgtggaaccctggaagcctgagcttagctgcctttcaacttccatctgctgtactattgaattggcattgagcggtgagatggctgaaaggtagacatcgagaagttttaatattcagaatcttttcttctcaagacgctgaatgtaatcttagttgtaaatacccatcacctgccagtcaccgagcactcatgcaccagggctttgcgttatgtcctaagatcctcataaccaccctgcaaggggactatcatcattacctctgtattacagatggagaaactgaggcacagagaggtaacgtgacttgtctcaggccataaagctggggaaagtagtggagctggttttgaacctgagctgtgagacctcagagccctaaactctggtgcctgtgtgttcccctttcaacccagactttggaaatcagtagacaccatatgcttcaaaaaacaggggctattaaaatgacatcaggagccagaaagtctcatggctgtgctttctcttgaagtttatacaacaaccagatcaccgatgtcggagccaggtacgtcaccaaaatcctggatgaatgcaaaggcctcacgcatcttaagtaagtggggtaggcaccaggttccttagtatattctcttgatcacccccttctgttgttcaaagattaaatgtcacagtaaagagctttcatcctaaagccttccacttgtcccagggccatgttggtcaagtaaagatacctctgtgtgatctgtgaggcttggattctggaagggcctcccgttattggtagggggaaaggttggcattttgatttcattaactactaggccgaagaaaggactaactctcaccctttctggtggtctttttgccccaagggagtttcctgtcgggttgcaaggaagagcttgggcccttgccctgctgtaggtgtgccctgcgcagggggtgacagtgcgccaggcttggagcctctggtcctgccctgacagtggccacataccttgacccttggcagtcaaagtgggacctcccaggtctcccgagggaagtcagtgatgctgctgaggtcaattagaggaccccagggagggctcaggtccctgagcttctgcagagactgtggaccatctcctggagaggaaccctgactgactgtcctcagggcttcagttccctccctgacaggaggcccaggccatggctcttgtggatcccagaagaaagtgtacggttcccaagatggggctggaaggggctctgtgctggggaggagggtgacccacattggagcccctgcatagctggaggctgactgtgtgtgactctctctgcagactgggaaaaaacaaaataacaagtgaaggagggaagtatctcgccctggctgtgaagaacagcaaatcaatctctgaggttgggcttatccagaatcagatcacagctaaggggactgcccagctggcagatgcgttacagagcaacactggcataacagagatttgcctaaatggaaacctgataaaaccagaggaggccaaagtctatgaagatgagaagcggattatctgtttctgagaggatgctttcctgttcatggggtttttgccctggagcctcagcagcaaatgccactctgggcagtcttttgtgtcagtgtcttaaaggggcctgcgcaggcgggactatcaggagtccactgcctccatgatgcaagccagcttcctgtgcagaaggtctggtcggcaaactccctaagtacccgctacaattctgcagaaaaagaatgtgtcttgcgagctgttgtagttacagtaaatacactgtgaagagactttattgcctattataattatttttatctgaagctagaggaataaagctgtgagcaaacagaggaggccagcctcacctcattccaacacctgccatagggaccaacgggagcgagttggtcaccgctcttttcattgaagagttgaggatgtggcacaaagttggtgccaagcttcttgaataaaacgtgtttgatggattagtattatacctgaaatattttcttccttctcagcactttcccatgtattgatactggtcccacttcacagctggagacaccggagtatgtgcagtgtgggatttgactcctccaaggttttgtggaaagttaatgtcaaggaaaggatgcaccacgggcttttaattttaatcctggagtctcactgtctgctggcaaagatagagaatgccctcagctcttagctggtctaagaatgacgatgccttcaaaatgctgcttccactcagggcttctcctctgctaggctaccctcctctagaaggctgagtaccatgggctacagtgtctggccttgggaagaagtgattctgtccctccaaagaaatagggcatggcttgcccctgtggccctggcatccaaatggctgcttttgtctcccttacctcgtgaagaggggaagtctcttcctgcctcccaagcagctgaagggtgactaaacgggcgccaagactcaggggatcggctgggaactgggccagcagagcatgttggacaccccccaccatggtgggcttgtggtggctgctccatgagggtgggggtgatactactagatcacttgtcctcttgccagctcatttgttaataaaatactgaaaacactctta

SEQ ID NO: 5151 - protein, 101 aa, Homo sapiens; identical to SEQ ID NO: 5149

SEQ ID NO: 5152 - DNA, 4499 bp, Homo sapiens
cccgttccgggcccgcgaggcagccgccccggtcctgcccctccctcgcgctactgcgggagcagcgtcctcccgggccacggcgcttcccggccccggcgtccccggaccatggcgctctccgggctcttctctagctctcagcggctgcgaagtctgtaaacctggtggccaagtgattgtaagtcaggagactttccttcggtttctgcctttgatggcaagaggtggagattgtggcggcgattacagaaaacatctgggaagacaagttgctgtttttatgggaatcgcaggcttggaagagacagaagcaattccagaaataaattggaaattgaagatttaaacaatgttgttttaaaatattctaacttcaaagaatgatgccagaaacttaaaaaggggctgcgcagagtagcaggggccctggagggcgcggcctgaatcctgattgcccttctgctgagaggacacacgcagctgaagatgaatttgggaaaagtagccgcttgctactttaactatggaagagcagggccacagtgagatggaaataatcccatcagagtctcacccccacattcaattactgaaaagcaatcgggaacttctggtcactcacatccgcaatactcagtgtctggtggacaacttgctgaagaatgactacttctcggccgaagatgcggagattgtgtgtgcctgccccacccagcctgacaaggtccgcaaaattctggacctggtacagagcaagggcgaggaggtgtccgagttcttcctctacttgctccagcaactcgcagatgcctacgtggacctcaggccttggctgctggagatcggcttctccccttccctgctcactcagagcaaagtcgtggtcaacactgacccagtgagcaggtatacccagcagctgcgacaccatctgggccgtgactccaagttcgtgctgtgctatgcccagaaggaggagctgctgctggaggagatctacatggacaccatcatggagctggttggcttcagcaatgagagcctgggcagcctgaacagcctggcctgcctcctggaccacaccaccggcatcctcaatgagcagggtgagaccatcttcatcctgggtgatgctggggtgggcaagtccatgctgctacagcggctgcagagcctctgggccacgggccggctagacgcaggggtcaaattcttcttccactttcgctgccgcatgttcagctgcttcaaggaaagtgacaggctgtgtctgcaggacctgctcttcaagcactactgctacccagagcgggaccccgaggaggtgtttgccttcctgctgcgcttcccccacgtggccctcttcaccttcgatggcctggacgagctgcactcggacttggacctgagccgcgtgcctgacagctcctgcccctgggagcctgcccaccccctggtcttgctggccaacctgctcagtgggaagctgctcaagggggctagcaagctgctcacagcccgcacaggcatcgaggtcccgcgccagttcctgcggaagaaggtgcttctccggggcttctcccccagccacctgcgcgcctatgccaggaggatgttccccgagcgggccctgcaggaccgcctgctgagccagctggaggccaaccccaacctctgcagcctgtgctctgtgcccctcttctgctggatcatcttccggtgcttccagcacttccgtgctgcctttgaaggctcaccacagctgcccgactgcacgatgaccctgacagatgtcttcctcctggtcactgaggtccatctgaacaggatgcagcccagcagcctggtgcagcggaacacacgcagcccagtggagaccctccacgccggccgggacactctgtgctcgctggggcaggtggcccaccggggcatggagaagagcctctttgtcttcacccaggaggaggtgcaggcctccgggctgcaggagagagacatgcagctgggcttcctgcgggctttgccggagctgggccccgggggtgaccagcagtcctatgagtttttccacctcaccctccaggccttctttacagccttcttcctcgtgctggacgacagggtgggcactcaggagctgctcaggttcttccaggagtggatgccccctgcgggggcagcgaccacgtcctgctatcctcccttcctcccgttccagtgcctgcagggcagtggtccggcgcgggaagacctcttcaagaacaaggatcacttccagttcaccaacctcttcctgtgcgggctgttgtccaaagccaaacagaaactcctgcggcatctggtgcccgcggcagccctgaggagaaagcgcaaggccctgtgggcacacctgttttccagcctgcggggctacctgaagagcctgccccgcgttcaggtcgaaagcttcaaccaggtgcaggccatgcccacgttcatctggatgctgcgctgcatctacgagacacagagccagaaggtggggcagctggcggccaggggcatctgcgccaactacctcaagctgacctactgcaacgcctgctcggccgactgcagcgccctctccttcgtcctgcatcacttccccaagcggctggccctagacctagacaacaacaatctcaacgactacggcgtgcgggagctgcagccctgcttcagccgcctcactgttctcagactcagcgtaaaccagatcactgacggtggggtaaaggtgctaagcgaagagctgaccaaatacaaaattgtgacctatttgggtttatacaacaaccagatcaccgatgtcggagccaggtacgtcaccaaaatcctggatgaatgcaaaggcctcacgcatcttaaactgggaaaaaacaaaataacaagtgaaggagggaagtatctcgccctggctgtgaagaacagcaaatcaatctctgaggttgggatgtggggcaatcaagttggggatgaaggagcaaaagccttcgcagaggctctgcggaaccaccccagcttgaccaccctgagtcttgcgtccaacggcatctccacagaaggaggaaagagccttgcgagggccctgcagcagaacacgtctctagaaatactgtggctgacccaaaatgaactcaacgatgaagtggcagagagtttggcagaaatgttgaaagtcaaccagacgttaaagcatttatggcttatccagaatcagatcacagctaaggggactgcccagctggcagatgcgttacagagcaacactggcataacagagatttgcctaaatggaaacctgataaaaccagaggaggccaaagtctatgaagatgagaagcggattatctgtttctgagaggatgctttcctgttcatggggtttttgccctggagcctcagcagcaaatgccactctgggcagtcttttgtgtcagtgtcttaaaggggcctgcgcaggcgggactatcaggagtccactgcctccatgatgcaagccagcttcctgtgcagaaggtctggtcggcaaactccctaagtacccgctacaattctgcagaaaaagaatgtgtcttgcgagctgttgtagttacagtaaatacactgtgaagagactttattgcctattataattatttttatctgaagctagaggaataaagctgtgagcaaacagaggaggccagcctcacctcattccaacacctgccatagggaccaacgggagcgagttggtcaccgctcttttcattgaagagttgaggatgtggcacaaagttggtgccaagcttcttgaataaaacgtgtttgatggattagtattatacctgaaatattttcttccttctcagcactttcccatgtattgatactggtcccacttcacagctggagacaccggagtatgtgcagtgtgggatttgactcctccaaggttttgtggaaagttaatgtcaaggaaaggatgcaccacgggcttttaattttaatcctggagtctcactgtctgctggcaaagatagagaatgccctcagctcttagctggtctaagaatgacgatgccttcaaaatgctgcttccactcagggcttctcctctgctaggctaccctcctctagaaggctgagtaccatgggctacagtgtctggccttgggaagaagtgattctgtccctccaaagaaatagggcatggcttgcccctgtggccctggcatccaaatggctgcttttgtctcccttacctcgtgaagaggggaagtctcttcctgcctcccaagcagctgaagggtgactaaacgggcgccaagactcaggggatcggctgggaactgggccagcagagcatgttggacaccccccaccatggtgggcttgtggtggctgctccatgagggtgggggtgatactactagatcacttgtcctcttgccagctcatttgttaataaaatactgaaaacactctta

SEQ ID NO: 5153 - protein, 953 aa, Homo sapiens; identical to SEQ ID NO: 681

SEQ ID NO: 5154 - DNA, 4655 bp, Homo sapiens
cccgttccgggcccgcgaggcagccgccccggtcctgcccctccctcgcgctactgcgggagcagcgtcctcccgggccacggcgcttcccggccccggcgtccccggaccatggcgctctccgggctcttctctagctctcagcggctgcgaagtctgtaaacctggtggccaagtgattgtaagtcaggagactttccttcggtttctgcctttgatggcaagaggtggagattgtggcggcgattacagaaaacatctgggaagacaagttgctgtttttatgggaatcgcaggcttggaagagacagaagcaattccagaaataaattggaaattgaagatttaaacaatgttgttttaaaatattctaacttcaaagaatgatgccagaaacttaaaaaggggctgcgcagagtagcaggggccctggagggcgcggcctgaatcctgattgcccttctgctgagaggacacacgcagctgaagatgaatttgggaaaagtagccgcttgctactttaactatggaagagcagggccacagtgagatggaaataatcccatcagagtctcacccccacattcaattactgaaaagcaatcgggaacttctggtcactcacatccgcaatactcagtgtctggtggacaacttgctgaagaatgactacttctcggccgaagatgcggagattgtgtgtgcctgccccacccagcctgacaaggtccgcaaaattctggacctggtacagagcaagggcgaggaggtgtccgagttcttcctctacttgctccagcaactcgcagatgcctacgtggacctcaggccttggctgctggagatcggcttctccccttccctgctcactcagagcaaagtcgtggtcaacactgacccagtgagcaggtatacccagcagctgcgacaccatctgggccgtgactccaagttcgtgctgtgctatgcccagaaggaggagctgctgctggaggagatctacatggacaccatcatggagctggttggcttcagcaatgagagcctgggcagcctgaacagcctggcctgcctcctggaccacaccaccggcatcctcaatgagcagggtgagaccatcttcatcctgggtgatgctggggtgggcaagtccatgctgctacagcggctgcagagcctctgggccacgggccggctagacgcaggggtcaaattcttcttccactttcgctgccgcatgttcagctgcttcaaggaaagtgacaggctgtgtctgcaggacctgctcttcaagcactactgctacccagagcgggaccccgaggaggtgtttgccttcctgctgcgcttcccccacgtggccctcttcaccttcgatggcctggacgagctgcactcggacttggacctgagccgcgtgcctgacagctcctgcccctgggagcctgcccaccccctggtcttgctggccaacctgctcagtgggaagctgctcaagggggctagcaagctgctcacagcccgcacaggcatcgaggtcccgcgccagttcctgcggaagaaggtgcttctccggggcttctcccccagccacctgcgcgcctatgccaggaggatgttccccgagcgggccctgcaggaccgcctgctgagccagctggaggccaaccccaacctctgcagcctgtgctctgtgcccctcttctgctggatcatcttccggtgcttccagcacttccgtgctgcctttgaaggctcaccacagctgcccgactgcacgatgaccctgacagatgtcttcctcctggtcactgaggtccatctgaacaggatgcagcccagcagcctggtgcagcggaacacacgcagcccagtggagaccctccacgccggccgggacactctgtgctcgctggggcaggtggcccaccggggcatggagaagagcctctttgtcttcacccaggaggaggtgcaggcctccgggctgcaggagagagacatgcagctgggcttcctgcgggctttgccggagctgggccccgggggtgaccagcagtcctatgagtttttccacctcaccctccaggccttctttacagccttcttcctcgtgctggacgacagggtgggcactcaggagctgctcaggttcttccaggagtggatgccccctgcgggggcagcgaccacgtcctgctatcctcccttcctcccgttccagtgcctgcagggcagtggtccggcgcgggaagacctcttcaagaacaaggatcacttccagttcaccaacctcttcctgtgcgggctgttgtccaaagccaaacagaaactcctgcggcatctggtgcccgcggcagccctgaggagaaagcgcaaggccctgtgggcacacctgttttccagcctgcggggctacctgaagagcctgccccgcgttcaggtcgaaagcttcaaccaggtgcaggccatgcccacgttcatctggatgctgcgctgcatctacgagacacagagccagaaggtggggcagctggcggccaggggcatctgcgccaactacctcaagctgacctactgcaacgcctgctcggccgactgcagcgccctctccttcgtcctgcatcacttccccaagcggctggccctagacctagacaacaacaatctcaacgactacggcgtgcgggagctgcagccctgcttcagccgcctcactgttctcagactcagcgtaaaccagatcactgacggtggggtaaaggtgctaagcgaagagctgaccaaatacaaaattgtgacctatttgggactttggaaatcagtagacaccatatgcttcaaaaaacaggggctattaaaatgacatcaggagccagaaagtctcatggctgtgctttctcttgaagtttatacaacaaccagatcaccgatgtcggagccagactgggaaaaaacaaaataacaagtgaaggagggaagtatctcgccctggctgtgaagaacagcaaatcaatctctgaggttgggatgtggggcaatcaagttggggatgaaggagcaaaagccttcgcagaggctctgcggaaccaccccagcttgaccaccctgagtcttgcgtccaacggcatctccacagaaggaggaaagagccttgcgagggccctgcagcagaacacgtctctagaaatactgtggctgacccaaaatgaactcaacgatgaagtggcagagagtttggcagaaatgttgaaagtcaaccagacgttaaagcatttatggcttatccagaatcagatcacagctaaggggactgcccagctggcagatgcgttacagagcaacactggcataacagagatttgaacttgtttggaacttgtcataaaatcgatcagtttggtgaattgcaaccaacaatatttaaaaagaaaacagaacagaacaaaatatcaggatgcaatgtgcatgcctaaatggaaacctgataaaaccagaggaggccaaagtctatgaagatgagaagcggattatctgtttctgagaggatgctttcctgttcatggggtttttgccctggagcctcagcagcaaatgccactctgggcagtcttttgtgtcagtgtcttaaaggggcctgcgcaggcgggactatcaggagtccactgcctccatgatgcaagccagcttcctgtgcagaaggtctggtcggcaaactccctaagtacccgctacaattctgcagaaaaagaatgtgtcttgcgagctgttgtagttacagtaaatacactgtgaagagactttattgcctattataattatttttatctgaagctagaggaataaagctgtgagcaaacagaggaggccagcctcacctcattccaacacctgccatagggaccaacgggagcgagttggtcaccgctcttttcattgaagagttgaggatgtggcacaaagttggtgccaagcttcttgaataaaacgtgtttgatggattagtattatacctgaaatattttcttccttctcagcactttcccatgtattgatactggtcccacttcacagctggagacaccggagtatgtgcagtgtgggatttgactcctccaaggttttgtggaaagttaatgtcaaggaaaggatgcaccacgggcttttaattttaatcctggagtctcactgtctgctggcaaagatagagaatgccctcagctcttagctggtctaagaatgacgatgccttcaaaatgctgcttccactcagggcttctcctctgctaggctaccctcctctagaaggctgagtaccatgggctacagtgtctggccttgggaagaagtgattctgtccctccaaagaaatagggcatggcttgcccctgtggccctggcatccaaatggctgcttttgtctcccttacctcgtgaagaggggaagtctcttcctgcctcccaagcagctgaagggtgactaaacgggcgccaagactcaggggatcggctgggaactgggccagcagagcatgttggacaccccccaccatggtgggcttgtggtggctgctccatgagggtgggggtgatactactagatcacttgtcctcttgccagctcatttgttaataaaatactgaaaacactctta

SEQ ID NO: 5155 - protein, 779 aa, Homo sapiens
MEEQGHSEMEIIPSESHPHIQLLKSNRELLVTHIRNTQCLVDNLLKNDYFSAEDAEIVCACPTQPDKVRKILDLVQSKGEEVSEFFLYLLQQLADAYVDLRPWLLEIGFSPSLLTQSKVVVNTDPVSRYTQQLRHHLGRDSKFVLCYAQKEELLLEEIYMDTIMELVGFSNESLGSLNSLACLLDHTTGILNEQGETIFILGDAGVGKSMLLQRLQSLWATGRLDAGVKFFFHFRCRMFSCFKESDRLCLQDLLFKHYCYPERDPEEVFAFLLRFPHVALFTFDGLDELHSDLDLSRVPDSSCPWEPAHPLVLLANLLSGKLLKGASKLLTARTGIEVPRQFLRKKVLLRGFSPSHLRAYARRMFPERALQDRLLSQLEANPNLCSLCSVPLFCWIIFRCFQHFRAAFEGSPQLPDCTMTLTDVFLLVTEVHLNRMQPSSLVQRNTRSPVETLHAGRDTLCSLGQVAHRGMEKSLFVFTQEEVQASGLQERDMQLGFLRALPELGPGGDQQSYEFFHLTLQAFFTAFFLVLDDRVGTQELLRFFQEWMPPAGAATTSCYPPFLPFQCLQGSGPAREDLFKNKDHFQFTNLFLCGLLSKAKQKLLRHLVPAAALRRKRKALWAHLFSSLRGYLKSLPRVQVESFNQVQAMPTFIWMLRCIYETQSQKVGQLAARGICANYLKLTYCNACSADCSALSFVLHHFPKRLALDLDNNNLNDYGVRELQPCFSRLTVLRLSVNQITDGGVKVLSEELTKYKIVTYLGLWKSVDTICFKKQGLLK

SEQ ID NO: 5156 - DNA, 1129 bp, Homo sapiens
atgtcttcctcctggtcactgaggtccatctgaacaggatgcagcccagcagcctggtgcagcggaacacacgcagcccagtggagaccctccacgccggccgggacactctgtgctcgctggggcaggtggcccaccggggcatggagaagagcctctttgtcttcacccaggaggaggtgcaggcctccgggctgcaggagagagacatgcagctgggcttcctgcgggctttgccggagctgggccccgggggtgaccagcagtcctatgagtttttccacctcaccctccaggccttctttacagccttcttcctcgtgctggacgacagggtgggcactcaggagctgctcaggttcttccaggagtggatgccccctgcgggggcagcgaccacgtcctgctatcctcccttcctcccgttccagtgcctgcagggcagtggtccggcgcgggaagacctcttcaagaacaaggatcacttccagttcaccaacctcttcctgtgcgggctgttgtccaaagccaaacagaaactcctgcggcatctggtgcccgcggcagccctgaggagaaagcgcaaggccctgtgggcacacctgttttccagcctgcggggctacctgaagagcctgccccgcgttcaggtcgaaagcttcaaccaggtgcaggccatgcccacgttcatctggatgctgcgctgcatctacgagacacagagccagaaggtggggcagctggcggccaggggcatctgcgccaactacctcaagctgacctactgcaacgcctgctcggccgactgcagcgccctctccttcgtcctgcatcacttccccaagcggctggccctagacctagacaacaacaatctcaacgactacggcgtgcgggagctgcagccctgcttcagccgcctcactgttctcagactcagcgtaaaccagatcactgacggtggggtaaaggtgctaagcgaagagctgaccaaatacaaaattgtgacctatttggggtatgtctttctccagaacactgggccaactacctagtaataatacagagctgcagggaattcacattcccataggtccctggatgatcggcacggatggcccagggctgg

SEQ ID NO: 5157 - protein, 338 aa, Homo sapiens
MQPSSLVQRNTRSPVETLHAGRDTLCSLGQVAHRGMEKSLFVFTQEEVQASGLQERDMQLGFLRALPELGPGGDQQSYEFFHLTLQAFFTAFFLVLDDRVGTQELLRFFQEWMPPAGAATTSCYPPFLPFQCLQGSGPAREDLFKNKDHFQFTNLFLCGLLSKAKQKLLRHLVPAAALRRKRKALWAHLFSSLRGYLKSLPRVQVESFNQVQAMPTFIWMLRCIYETQSQKVGQLAARGICANYLKLTYCNACSADCSALSFVLHHFPKRLALDLDNNNLNDYGVRELQPCFSRLTVLRLSVNQITDGGVKVLSEELTKYKIVTYLGYVFLQNTGPTT

SEQ ID NO: 5158 - DNA, 1648 bp, Homo sapiens
tgactccaagttcgtgctgtgctatgcccagaaggaggagctgctgctggaggagatctacatggacaccatcatggagctggttggcttcagcaatgagagcctgggcagcctgaacagcctggcctgcctcctggaccacaccaccggcatcctcaatgagcaggctgcttcaaggaaagtgacaggctgtgtctgcaggacctgctcttcaagcactactgctacccagagcgggaccccgaggaggtgtttgccttcctgctgcgcttcccccacgtggccctcttcaccttcgatggcctggacgagctgcactcggacttggacctgagccgcgtgcctgacagctcctgcccctgggagcctgcccaccccctggtcttgctggccaacctgctcagtgggaagctgctcaagggggctagcaagctgctcacagcccgcacaggcatcgaggtcccgcgccagttcctgcggaagaaggtgcttctccggggcttctcccccagccacctgcgcgcctatgccaggaggatgttccccgagcgggccctgcaggaccgcctgctgagccagctggaggccaaccccaacctctgcagcctgtgctctgtgcccctcttctgctggatcatcttccggtgcttccagcacttccgtgctgcctttgaaggctcaccacagctgcccgactgcacgatgaccctgacagatgtcttcctcctggtcactgaggtccatctgaacaggatgcagcccagcagcctggtgcagcggaacacacgcagcccagtggagaccctccacgccggccgggacactctgtgctcgctggggcaggtggcccaccggggcatggagaagagcctctttgtcttcacccaggaggaggtgcaggcctccgggctgcaggagagagacatgcagctgggcttcctgcgggctttgccggagctgggccccgggggtgaccagcagtcctatgagtttttccacctcaccctccaggccttctttacagccttcttcctcgtgctggacgacagggtgggcactcaggagctgctcaggttcttccaggagtggatgccccctgcgggggcagcgaccacgtcctgctatcctcccttcctcccgttccagtgcctgcagggcagtggtccggcgcgggaagacctcttcaagaacaaggatcacttccagttcaccaacctcttcctgtgcgggctgttgtccaaagccaaacagaaactcctgcggcatctggtgcccgcggcagccctgaggagaaagcgcaaggccctgtgggcacacctgttttccagcctgcggggctacctgaagagcctgccccgcgttcaggtcgaaagcttcaaccaggtgcaggccatgcccacgttcatctggatgctgcgctgcatctacgagacacagagccagaaggtggggcagctggcggccaggggcatctgcgccaactacctcaagctgacctactgcaacgcctgctcggccgactgcagcgccctctccttcgtcctgcatcacttccccaagcggctggccctagacctagacaacaacaatctcaacgactacggcgtgcgggagctgcagccctgcttcagccgcctcactgttctca

SEQ ID NO: 5159 - protein, 90 aa, Homo sapiens
MDTIMELVGFSNESLGSLNSLACLLDHTTGILNEQAASRKVTGCVCRTCSSSTTATQSGTPRRCLPSCCASPTWPSSPSMAWTSCTRTWT

SEQ ID NO: 5160 - DNA, 1754 bp, Homo sapiens
tcctcccgggccacggcgcttcccggccccggcgtccccggaccatggcgctctccgggctcttctctagctctcagcggctgcgaagtctgtaaacctggtggccaagtgattgtaagtcaggagactttccttcggtttctgcctttgatggcaagaggtggagattgtggcggcgattacagaaaacatctgggaagacaagttgctgtttttatgggaatcgcaggcttggaagagacagaagcaattccagaaataaattggaaattgaagatttaaacaatgttgttttaaaatattctaacttcaaagaatgatgccagaaacttaaaaaggggctgcgcagagtagcaggggccctggagggcgcggcctgaatcctgattgcccttctgctgagaggacacacgcagctgaagatgaatttgggaaaagtagccgcttgctactttaactatggaagagcagggccacagtgagatggaaataatcccatcagagtctcacccccacattcaattactgaaaagcaatcgggaacttctggtcactcacatccgcaatactcagtgtctggtggacaacttgctgaagaatgactacttctcggccgaagatgcggagattgtgtgtgcctgccccacccagcctgacaaggtgccccggggacagggacgggcatggcattgtgtggaccccgggagctagaagaggcctctccctgctgatctgagtgaagagcgtgggagtttagtccagcgggcagggctgcattttggggtactaatagcacacaaatgcctgggttagcaggttgcacagtcaggtattttacttctgtgtttgtgtctggagcaaaccctgacatctcagttctcattgctgtgtgtattggttcccagacacttcatttttagatcccctttaaattaggagggaaaaagaacataagcataagagcatccccagcagcgatgttcattcagtgcctctgaaggctggagggctgcttgttgctgggtgagactcggaggggaaccgactcagggtcaggaatgatgacatcccacggtgggtccacagtgaagaatcttccccgctccactgtgggacgccttaacagcccttacttccacttacgctttgcgttatctcctgaaaaataaaatggagaccacaaattccttcttggttagaggaatgacacaactcatttatgacatgaccccgctgggactcagaagagaccaggacggtttctgggggaagcagtagcacactcgtgtgctttgttctcttctcttgatttgttttcccacatttttaacaagaaaaaaagccgtttttaatatatggcctatcgccctcctactgtgtggcccaggtgcctacctcattatgcccaaggggtggttctcacctctccactctcattcctgcacagcagttgtgtcaggttaagagggacaaggagaaggctgggcaccgtggctcacgcctgtaatcccagcactttgggaggccgaggcaggcagatcacctaaggtcaggagtttgagaccagcctggccaacatggggaaaacccgtctctaataaaaacacaaaaattagtcgggcatggtggtgggtgcctgtaatcccagccacttgggaggctgaggaaagagaattccttgaacctgggaggtggaggttgcagtgagccaagattgtgccattgcactccagccctccagcctgggtgacaga

SEQ ID NO: 5161 - protein, 43 aa, Homo sapiens
MARGGDCGGDYRKHLGRQVAVFMGIAGLEETEAIPEINWKLKI

SEQ ID NO: 5162 - DNA, 651 bp, Homo sapiens
gtatgcagagaactgatatgtgtgtctgaaaatgtggaaagaacaagtatcagctgagtccagcttacaaaatctttgtaagagaacatgaaagaagaacaagtctcattttgatacattttatgtttgaccagaagggctccgcagttcaattgcttagtttccagaactaaaaaccctggatgttatgtataaaataaactcgagaagactttgaaggatggaaaaaaaggatgcagaactattggaaccttacaacgagaggaacagcataatgatttcaactgacaagttttctgcaagaaagatgcttctctggtatctgctgagatcatttgaaatcatggtagaacgcccagaattatgggctcttcttgaaattggatatcatcaaacgaggcactaattacagaacaattaacaaaagcctaaaagggtgtaatggagaatttctaatgaatcctgacttatcatggctgaaagaagacttgaagttggattaatgtagaaacactggaattctactgaaggagctggtgcttgatttgatagaaaaaaagaattattacactgttctattccctttttcagtttgtaaaactcctcagacaattgttttctaagaaaggattaaactcctatatgaaatgg

SEQ ID NO: 5163 - protein, 61 aa, Homo sapiens
MEKKDAELLEPYNERNSIMISTDKFSARKMLLWYLLRSFEIMVERPELWALLEIGYHQTRH

SEQ ID NO: 5164 - DNA, 528 bp, Homo sapiens
gagaatacggcatcttccgtctctcgtgatgccggtcagtttcatgctttcttccaagaaagtacaccaaaatggaggcactgcctttcaattaccttttgcattaaagactttaacttgtttattccaactgctttgatttcttacagttttgtgaaaaaggcagcttcttaaaatggagttgcctcctgatctggcgcacgccttgtgacttaggagggcatttgtttcccactgcctgtcaacatctcagccctccatgctcccagcacaggcaaaaatgggtttacaatcattaaaccacccacctcttatggaaggaactgagggcccgacttctatcaccttgtgtcactccattgatttcgtcgtcatcaccgtaaggtttgggttcttgctggtcttgattctcgaccccatttatggaaatgtcatcaacaccagagagaagtttggagaaggctgctctgtgttgtccattctcctgcccctttaacttctgacgaaaatagtccccttccagccaga

SEQ ID NO: 5165 - protein, 78 aa, Homo sapiens
MLPAQAKMGLQSLNHPPLMEGTEGPTSITLCHSIDFVVITVRFGFLLVLILDPIYGNVINTREKFGEGCSVLSILLPL

SEQ ID NO: 5166 - DNA, 877 bp, Homo sapiens
atgcagtatggcttccttaatttcaactcatttaaccttgatgaatatgaacactatgaaaaagcagaaaacggagatttaaattggctaataccagaccgatttattgccttctgtggacctcattcaagagccagacttgaaagtggttaccaccaacattctcccgagacttatattcaatattttaagaatcacaatgttactaccattattcgtctgaataaaaggatacatgatgccaaacgctttacggatgctggcttcgatcaccatgatcttttctttgcagatggcagcacccctactgatgccattgtcaaaagatttctggatatctgtgaaaatgctgagggtgccattgcagtacattgtaaagctggccttggtcgcacaggcactctgatagcctgctacatcatgaagcattacaggatgacagcagccgagaccattgcgtgggtaaggatctgcagacctggcttggtgatcgggcctccgcagcagtttttggtgatgaagcaaacaagcctctggctggaaggggactattttcgtcagaagttaaaggggcaggagaatggacaacacagagcagccttctccaaacttctctctggtgttgatgacatttccataaatggggtcgagaatcaagaccagcaagaacccaaaccttacggtgatgacgacgaaatcaatggagtgacacaaggtgatagaagtcgggccctgaaaaggcaaagacaatcaaaaacaaacgatattcttctcccatctcccctggctgtgctgacctttacactgtgtagtgttgtcatctggtggattgtttgtgactacattcttcccatcctgctatcctgactcgaagatt

SEQ ID NO: 5167 - protein, 288 aa, Homo sapiens
MQYGFLNFNSFNLDEYEHYEKAENGDLNWLIPDRFIAFCGPHSRARLESGYHQHSPETYIQYFKNHNVTTIIRLNKRIHDAKRFTDAGFDHHDLFFADGSTPTDAIVKRFLDICENAEGAIAVHCKAGLGRTGTLIACYIMKHYRMTAAETIAWVRICRPGLVIGPPQQFLVMKQTSLWLEGDYFRQKLKGQENGQHRAAFSKLLSGVDDISINGVENQDQQEPKPYGDDDEINGVTQGDRSRALKRQRQSKTNDILLPSPLAVLTFTLCSVVIWWIVCDYILPILLS

SEQ ID NO: 5168 - DNA, 1669 bp, Homo sapiens
atgaatgaagtttcttctgaatgtggcaagaagtgtgaaccacttggctgctcaagcacaaatggggatttgcagggagaagctggtgctgtggtctccattttcctaagaatggtgccaagaataaaaagcaatgaaggatacgggtattccaacagaaactggagaaaagaaaatacaatgcattcactggacagaaatattgtggacggggggcaagcattgggacagtggaagcggaaaagcaaggggcggtcgagctgggccgccgcgccccactgctcgccgcgctgctctttgacctcgcagggtgtgaagaagatgcgcagctccacgctgcaggacccgcgccgccgggacccccaggacgacgtgtacgtggacatcaccgatcgccttcgttttgccattctctacagcagaccaaagagtgcatcaaatgtacattatttcagcatagataatgaactcgaatatgagaacttctccgaagactttggaccactcaatctggcaatggtttacagatattgttgcaagataaataagaaattaaagtccattacaatgttaaggaagaaaattgttcattttactggctctgatcagagaaaacaagcaaatgctgccttccttgttggatgctacatggttatatacttggggagaaccccagaagcagcatatagaatattaatctttggagatacaccctatattcctttcagagatgctgcctatggaagctgcaatttctacattacacttcttgactgttttcatgcagtaaagaaggcaatgcagtatggcttccttaatttcaactcatttaaccttgatgaatatgaacactatgaaaaagcagaaaacggagatttaaattggataataccagaccgatttattgccttctgtggacctcattcaagagccagacttgaaagtggttaccaccaacattctcccgagacttatattcaatattttaagaatcacaatgttactaccattattcgtctgaataaaaggatgtatgatgccaaacgctttacggatgctggcttcgatcaccatgatcttttctttgcggatggcagcacccctactgatgccattgtcaaaagatttctggatatctgtgaaaatgctgagggtgccattgcagtacattgtaaagctggccttggtcgcacaggcactctgatagcctgctacatcatgaagcattacaggatgacagcagccgagaccattgcgtgggtaaggatctgcagacctggcttggtgatcgggcctcagcagcagtttttggtgatgaagcaaacaagcctctggctggaaggggactattttcgtcagaggttaaaggggcaggagaatggacaacacagagcagccttctccaaacttctctctggtgttgatgacatttccataaatggggtcgagaatcaagaccagcaagaacccaaaccttacagtgatgacgacgaaatcaatggagtgacacaaggtgatagaagtcgggccctgaaaaggcgaagacaatcaaaaacaaacgatattcttctcccatctcccctggctgtgctgacctttacactgtgtagtgttgtcatctggtggattgtttgtgactacattcttcccatcctgctattctgactca

SEQ ID NO: 5169 - protein, 554 aa, Homo sapiens
MNEVSSECGKKCEPLGCSSTNGDLQGEAGAVVSIFLRMVPRIKSNEGYGYSNRNWRKENTMHSLDRNIVDGGQALGQWKRKSKGRSSWAAAPHCSPRCSLTSQGVKKMRSSTLQDPRRRDPQDDVYVDITDRLRFAILYSRPKSASNVHYFSIDNELEYENFSEDFGPLNLAMVYRYCCKINKKLKSITMLRKKIVHFTGSDQRKQANAAFLVGCYMVIYLGRTPEAAYRILIFGDTPYIPFRDAAYGSCNFYITLLDCFHAVKKAMQYGFLNFNSFNLDEYEHYEKAENGDLNWIIPDRFIAFCGPHSRARLESGYHQHSPETYIQYFKNHNVTTIIRLNKRMYDAKRFTDAGFDHHDLFFADGSTPTDAIVKRFLDICENAEGAIAVHCKAGLGRTGTLIACYIMKHYRMTAAETIAWVRICRPGLVIGPQQQFLVMKQTSLWLEGDYFRQRLKGQENGQHRAAFSKLLSGVDDISINGVENQDQQEPKPYSDDDEINGVTQGDRSRALKRRRQSKTNDILLPSPLAVLTFTLCSVVIWWIVCDYILPILLF

SEQ ID NO: 5170 - DNA, 1385 bp, Homo sapiens
atggtttaaaaaagcaaagggagggcggttgcgggagggagcggggcaggcgctgtgggccaggcccctcctctggctcctgcaccaccgcctcttttcgggctccgccggctcccgccgtccctgcaatgccgctctgtgcccgccgtcctgagagcccgcgcggcactggcgccagccttggcggcgcgcgcggggccgtggtcgttgctccctgactggccgcggcggcctccaggaagcggaaaagcaaggggcggtcgagctgggccgccgcgccccactgctcgccgcgctgctctttgacctcgcagggtgtgaagaagatgcgcagctccacgctgcaggacccgcgccgccgggacccccaggacgacgtgtacgtggacatcaccgatcgccttcgttttgccattctctacagcagaccaaagagtgcatcaaatgtacattatttcagcatagataatgaactcgaatatgagaacttctccgaagactttggaccactcaatctggcaatggtttacagatattgttgcaagataaataagaaattaaagtccattacaatgttaaggaagaaaattgttcattttactggctctgatcagagaaaacaagcaaatgctgccttccttgttggatgctacatgagatgctgcctatggaagctgcaatttctacattacacttcttgactgttttcatgcagtaaagaaggcaatgcagtatggcttccttaatttcaactcatttaaccttgatgaatatgaacactatgaaaaagcagaaaacggagatttaaattggataataccagaccgatttattgccttctgtggacctcattcaagagccagacttgaaagtggttaccaccaacattctcccgagacttatattcaatattttaagaatcacaatgttactaccattattcgtctgaataaaaggatgtatgatgccaaacgctttacggatgctggcttcgatcaccatgatcttttctttgcggatggcagcacccctactgatgccattgtcaaaagatttctggatatctgtgaaaatgctgagggtgccattgcagtacattgtaaagctggccttggtcgcacaggcactctgatagcctgctacatcatgaagcattacaggatgacagcagccgagaccattgcgtgggtaaggatctgcagacctggcttggtgatcgggcctcagcagcagtttttggtgatgaagcaaacaagcctctggctggaaggggactattttcgtcagaggttaaaggggcaggagaatggacaacacagagcagccttctccaaacttctctctggtgttgatgacatttccataaatggggtcgagaatcaaga

SEQ ID NO: 5171 - protein, 124 aa, Homo sapiens
MRSSTLQDPRRRDPQDDVYVDITDRLRFAILYSRPKSASNVHYFSIDNELEYENFSEDFGPLNLAMVYRYCCKINKKLKSITMLRKKIVHFTGSDQRKQANAAFLVGCYMRCCLWKLQFLHYTS

SEQ ID NO: 5172 - DNA, 2925 bp, Homo sapiens
ggcggcgcgcgcggggccgtggtcgttgctccctgactggccgcggcggcctccaggaagcggaaaagcaaggggcggtcgagctgggccgccgcgccccactgctcgccgcgctgctctttgacctcgcagggtgtgaagaagatgcgcagctccacgctgcaggacccgcgccgccgggacccccaggacgacgtgtacgtggacatcaccgatcgccttcgttttgccattctctacagcagaccaaagagtgcatcaaatgtacattatttcagcatagataatgaactcgaatatgagaacttctccgaagactttggaccactcaatctggcaatggtttacagatattgttgcaagataaataagaaattaaagtccattacaatgttaaggaagaaaattgttcattttactggctctgatcagagaaaacaagcaaatgctgccttccttgttggatgctacatggttatatacttggggagaaccccagaagcagcatatagaatattaatctttggagatacaccctatattcctttcagagatgctgcctatggaagctgcaatttctacattacacttcttgactgttttcatgcagtaaagaaggcaatgcagtatggcttccttaatttcaactcatttaaccttgatgaatatgaacactatgaaaaagcagaaaacggagatttaaattggataataccagaccgatttattgccttctgtggacctcattcaagagccagacttgaaagtggttaccaccaacattctcccgagacttatattcaatattttaagaatcacaatgttactaccattattcgtctgaataaaaggatgtatgatgccaaacgctttacggatgctggcttcgatcaccatgatcttttctttgcggatggcagcacccctactgatgccattgtcaaaagatttctggatatctgtgaaaatgctgagggtgccattgcagtacattgtaaagctggccttggtcgcacaggcactctgatagcctgctacatcatgaagcattacaggatgacagcagccgagaccattgcgtgggtaaggatctgcagacctggcttggtgatcgggcctcagcagcagtttttggtgatgaagcaaacaagcctctggctggaaggggactattttcgtcagaggttaaaggggcaggagaatggacaacacagagcagccttctccaaacttctctctggtgttgatgacatttccataaatggggtcgagaatcaagaccagcaagaacccaaaccttacagtgatgacgacgaaatcaatggagtgacacaaggtgatagaagtcgggccctgaaaaggcgaagacaatcaaaaacaaacgatattcttctcccatctcccctggctgtgctgacctttacactgtgtagtgttgtcatctggtggattgtttgtgactacattcttcccatcctgctattctgactcaaagatttcagaacatagtagccatcaggaccccctgacagatagctgcttctctccatttcaaggactaaaatggttttgcattaagtaaaaacctgtgaccagaactgaaggaagactctaggaactgaaaactgcaacagaaattagcacaatttgaaaacaaaacaaaattgcaaaagacttagttgctttccacctaagaagctaatcaatggggaaaatgtccacggggtttcagtaatgaacttttgagtttgggtgcaagcaaatgtaccaagaccagctcagtcagggagaccctaccccagtggtgctagaggaattaaagacacacacacagaaatacagaggtgtaaagtgggaaatcaggggtctcacagccttcagagctgagagccccgaacagagatttacccacatattgattaacagcaaacaagtcattagcattgtttctatagatattaaattaactaaaagtatcccttatgggaaacgaagggatgggcctaattaaaggcataggttgggctagttaactgcggcaggagcacgtccttaaggcacagatggctcatgctattgtttgtggcttaagaatgcctttaagcagttttccactctgggctgggtgggccaggtgttccttgccctcattccggtaaacccacacccttccagcgtgggcattagggccattatgaacatgttacagtgctgcagagattttatttatggccagttttggggccagtttatggctggattttggggggcttgctcccaaaaagaatgactcaaagaaaggcccagctctcaagctgaatgacaaaaatgctgttgtaaatttagtctcaggtgtaaatacccaagccctctggtactcagggagctggctggtctgtggtgcatgtgtgtccttgtgatggcaagcattgtagttgatggccttcagaagaattgaggatctgatggaggttttttaatgtatttattttctgttcagcttgtgaccctgtgtcaaaatttgtaaagatacaaaaggcattactgaaatggtactttctgtaatttgatactatttggctttaccatcttcacttgactgtttgtaatactgtagtaatattaactctgataagtacccaagctgcttgtcttctaccaaagagtgctttattaacaagaatctgtgaaaaccacattttaaacactgttgcatgttgtaataccaggtgataccttggtaacctaaaacttgcaagagaatattagtggtagctttagaagactcaggaggagaaactgacttcagagctggaagatgttgcaagtcattcctttttctgtcctttagggactgaagaactgggaggttgcccattgtttggttgccagtcatacaaattaaaatcatatttccttccatgc

SEQ ID NO: 5173 - protein, 447 aa, Homo sapiens
MRSSTLQDPRRRDPQDDVYVDITDRLRFAILYSRPKSASNVHYFSIDNELEYENFSEDFGPLNLAMVYRYCCKINKKLKSITMLRKKIVHFTGSDQRKQANAAFLVGCYMVIYLGRTPEAAYRILIFGDTPYIPFRDAAYGSCNFYITLLDCFHAVKKAMQYGFLNFNSFNLDEYEHYEKAENGDLNWIIPDRFIAFCGPHSRARLESGYHQHSPETYIQYFKNHNVTTIIRLNKRMYDAKRFTDAGFDHHDLFFADGSTPTDAIVKRFLDICENAEGAIAVHCKAGLGRTGTLIACYIMKHYRMTAAETIAWVRICRPGLVIGPQQQFLVMKQTSLWLEGDYFRQRLKGQENGQHRAAFSKLLSGVDDISINGVENQDQQEPKPYSDDDEINGVTQGDRSRALKRRRQSKTNDILLPSPLAVLTFTLCSVVIWWIVCDYILPILLF

SEQ ID NO: 5174 - DNA, 702 bp, Homo sapiens
agtacatgcatgcatgcgggtgttgagagtaaaaatcctttgatgccgagaagccacacaggcgtggacctgcttcgccaagcagaaagcgggagagtgacgtgatgtcacgcagagcttggtcctgctggagatttggggaagtctcaaggaaagtccagaattggctagttggatgaagcatgcctgagctgaggcttgaatgcttttgaaaatcagcaaacacaactacagtctccatgatgtaaaccaatctgctggactacttccaatttcagctccgacacatgaagagcttggaagtcatcattcccatccttcacaaaaagtaaaaaccaaacaaactgaaaatttgtgacttttcttgggtccctcagagaataaaggtttcaggcaaactgccagcttgacatctggagagagaggaaaatccaaagagacatagccaagatctgtttacctgaacctgatgacaacagaatgatcaactagtagaaaaacttaaataataattttgatgacttgctggaggcagagtgtgaatttgcctgagagtgagagacctggtatttggtgattacagcatacagggctctgtctgggtgctatcattgtccactgttgtgcaaagcccagactgcatcctctaggataagcacctaagtgaggaggaaccctgggcccctaggtgatgaccatgcc

SEQ ID NO: 5175 - protein, 51 aa, Homo sapiens
MLLKISKHNYSLHDVNQSAGLLPISAPTHEELGSHHSHPSQKVKTKQTENL

SEQ ID NO: 5176 - DNA, 6431 bp, Homo sapiens
gcagtgcccgggctcccgctgcagccgcccggggacacgccgtgcaccctccggctcggggctttctcggcggcggcggcggcagcagcagcagcgttagcggcggcggcgagagcagcgttcccggctgcgcttctccctcaggcggggcggcgagagaagcggcggcggcggcggcggcacaccggtgtctctcccgctggagatttctttctgctttcctcatcgactgactgactcaccccctcccttttttgaggaagggtgacctcttctctgggactggaaaaaatatttttgtgaggaggggggcgggtggcagcgacagggtttgcttcttctcttctttcatctccctctcctcccccctcgaagaccgaaaagcaaaccccacaactgctccagcagcatcctccttcccttcctccgcctcccttctcctccgccgctcgcagtttcgccctctcttccgctaatgattgcattattatgctcccctctctggggggtctcgcccctcttgggtcgctccggagccccggcctcccctggctgcatttcttaaaaatttgggagcctgggagtgagttttctccgaggcgtgtgtgagaggcggcgggggtgttttcctgcgcgaggggcgggtgaagttcattgcccccacttttcccgcgacctttttcggacccgattttggatcgagttgaggggggcgcgggcgttttcggggggcggggggcgcggcggagaatggccgcggggagggctccccggagcctcccagtctcttgatcaaagcattccgctattctgatttattgcttgcttggtgagttatttttttttcctctaaaggagacctgtgtgttcagccattactttgctcggcgctgctcccaggcatctccgaccctcggtgctgtggggagccccacacttgggtcggggcggagggaagccgtgaagggggagggagggctcggtgtcaatttttttttgtgtggctgcggccgtagcctgtggcgggcaagcggggagaccccggcgcagcagaaccatggatggcccgacgcggggccatggactccgcaaaaagcggcggtcgcggtcgcagcgagaccgggagaggcgctcccggggcgggctgggggccggcgcggccggcggcggcggggctggccggacccgggcgctctcactcgcctcgtcgtcgggctccgacaaggaagacaatgggaagcccccgtcctccgccccgtcccggcccagacccccgcggaggaagcggagagagtccacctcggcagaagaggacatcattgatggatttgccatgaccagctttgtcacttttgaagcgctggagaaagatgtagcacttaagcctcaggaacgtgtggagaaacgccagacgcccctgaccaagaagaaacgagaagcacttaccaatggcttgtcctttcattcaaagaagagcagactcagccacccacaccactacagctcagatcgagaaaatgaccgcaatctctgccagcaccttgggaagagaaagaaaatgccgaaggcactcagacagctcaagccaggacagaacagctgcagggacagtgacagtgaaagtgccagtggagaatccaagggcttccaccggagcagctctcgggaaaggctcagtgatagttcagctccttccagcttgggaacaggctacttcagatccggagttaggtgttggcacgctaccagaacatgacagccaggatgcagggccgattgtccccaagatatcgggtctagagagaagccaggagaagagccaggactgttgcaaagagccaatctttgagcctgtggtgcttaaagacccctgccctcaggtcgcacagccaataccccagccgcagacggagccccaactccgagctccttctccggaccctgacttggtgcagcgcacagaggccccacctcaacccccacctctgagtacacagccaccacagggccctcctgaggcccagctccagcctgccccgcagcctcaggtgcagaggccacccaggccacagtcccccacccagctgctccatcagaacctcccacctgtgcaggcccacccctctgctcagagcctctcccagccattgtcagcctacaacagcagtagcttaagcctcaacagtttaagcagcagcagaagcagcactccagcgaagaatatgtttgcccctcccactgctctgcctcctccaccaccactgacatcaggaagtctgcaggtggccggacacccggccgggagcacttactcagagcaagacatcttgcgacaggaactgaacactcgttttttggcctctcagagtgctgaccgcggggcttccctgggccctccgccctacctgcggaccgagttccatcagcaccagcaccagcaccagcacacccaccagcacacgcaccagcacaccttcacgccgttcccccacgccatcccacccaccgccatcatgccgacgccagcacctcccatgtttgacaaataccctacaaaagttgacccattctaccggcacagtctcttccattcctatcctcctgcagtgtcgggcatcccccctatgatcccacccactggcccttttggttcactacaaggagcatttcagccgaagttgacagatcctttcagacctatgttaaggaaaccagggaagtggtgtgctatgcatgttcacatcgcctggcagatttaccaccaccaacagaaagtcaagaaacagatgcagtcagacccacataagctggactttggactgaaacctgagttcctgagccgccctccaggccccagtctttttggagccatccaccacccccatgacctggcacggccttcaactttgttctctgccgctggtgctgcacacccaactgggaccccttttgggccacctcctcatcacagcaacttcctcaaccctgctgcccacctagagccttttaatcggccgtctacattcacaggcctagcagcagttggtggcaatgccttcgggggacttggaaatccttccgttacacccaactcaatgttcggccacaaggatggccccagtgtgcagaactttagcaaccctcacgaaccctggaaccggctgcaccgaacgcctccgtcgttcccgacccctccgccctggctgaagccaggggagctggagcgcagcgcgtccgctgcagctcatgacagagatagagatgtagataaacgagactcatctgttagtaaagatgacaaagaaagggaaagcgtcgagaagagacactccagccacccttcaccagcacctgtcctcccggtgaatgccctgggacatacccgcagctccactgaacagatccgggctcatctgaacactgaggctcgggagaaggacaaacccaaagagagggagagagaccactcggaatcccgcaaggacctggccgccgacgagcacaaggcgaaagagggccacctgcccgagaaggacgggcacggccacgaggggcgcgccgcgggcgaagaggccaagcagctggcccgggtgccgtctccctacgtgcggaccccggtggtggagagtgccaggcccaacagcacctcgagccgggaggccgagccgcgcaagggtgagccggcctacgagaaccccaagaagagctccgaggtcaaggtgaaggaggagcggaaggaagaccatgacctgcctccagaggccccgcagacccaccgggcctcggagccgccgcctcccaactcctcgtccagcgtgcacccggggcccctggcctcgatgcccatgacggtgggggtgacgggcattcaccccatgaacagcatcagcagcctggacaggactcgcatgatgacccccttcatgggcatcagccccctcccgggcggagagcgcttcccgtacccttctttccactgggaccccatccgggaccccttgagggatccttaccgagaacttgacattcaccggagagacccgctgggcagggacttcctgctaaggaacgacccgctccaccggctctcgactccccggctgtacgaagccgaccgctccttcagggaccgggagcctcacgactacagccaccaccaccaccaccaccaccacccgctgtctgtggaccctcggcgggagcacgagcggggaggccacctggacgagcgggagcgcttgcacatgctcagagaagactacgagcacacgcggctccactccgtgcaccccgcctccctcgacggacacctcccccaccccagcctcatcaccccgggactccccagcatgcactatccccgcatcagccccaccgcgggcaaccagaacggactcctcaacaagacccctccgacagcagcgctgagcgcacctcccccgctcatctccacgctggggggccgcccggtctctcccagaaggacgactcctctgtccgcagagataagggagaggcccccttcccacacgctgaaggatatcgaggcccgataagccgagaacaggagcaagaacgaggaagaagaaaccctaggcagacaccaggccaggcttgagagacagaactcctgcatggctcacacagactgggggggaaagccccaccccttccccttgtaaaaaatgtatagactcagtgcacattttgaaatgttttgtatattatatgttgagatttttcagatcttttagcccagtcatatgttctcacgtctcctactttttgtttctcgtataaaactttttgatttgaaccaaaacagtgaagatgacaacacacaccaattggatgataattgtagcgggggcggtgggggggagaagtccacgccatccatcatgcaaaattctttcagatgaggtgggaaggccgtgtacatagttatgtaaaaagagattgcttcatgagctaatggttcatatatgcaaaagggtaagatgaaagctttactttgtacaaatgtaaatagataaagtaacataatacattaatacttcttaaaatgtgctatttgcaaacttacttaatatcagtgaacacagtcggctaaagctgtgttcccatatattgttatagacagctaaacccttcaactatgcaatgaatgttcgggcttttcacaaaagcccgcctaactcaaaggagccttttcaaatccatttacagcatacttaaggtcatattttccctgaacaagcgcttacgtgatatgactctgttttccttgcttgttttttttcaaacggagaaacatcctgttttgcaaattggaccccaggctggaacttagcatctgaagttgccgcttgtgggctctgggggaaagtgtagccccggagaggtaactgaggacatgagcaaccagtgccagggagggtgggatttgccagatgccaaaatcaggggacgggtggtggtgtctgtcagacacacacaggtcgccagtgacttcacacacacctcatgtgagaaccatgccttttttagtgtgtcctatttcatacctgtacacacttcctcgttttgtaatgagatttacttacacccaaacagatcctgaaagaaagcttcaagttttctcagatgatggatatgttttcactgtattcaataactgacggatgtaaggtgcacgtttcctgatgtgacgcactgtattccagctggtgatcaagtctgggaacagccgtaacaggtcaaccttgtggagccatcgcgagttagagggtgaaagatggcagaaaaaaaagtcttgtgtgtgagtgtgttttttgagtttgcatcaatcttaatgtctcttcataatacttttataatacattaagcctcttgtctacatatttggagagaatatgactttactagcagagaaatacaatatatcttgtctactggactgtaaaatatatgtatgaaataaaattagttccatttggtcttctagtatattaaagtgctatctgacgttgttatcctgtttttgcaaaaaaaaaaaaaaaaaaaagttaactacagaccattgtttctaataagcagagagatctattttagtagtaaactgaaggtttagttgtgagcttcagattttgtgaactccagatgttgtgcggtgtttttttttttttttaagacaacaactaaaaaaaatgcaaggaatatgtacactggaactgtagtggtagctttcagtattgtaaagagattgttctatacggacctttttgctgtttatcctgtatgtaataaagtcctttctagatcctatgtgaaaagaaaagtgaagcaactgaatcttcagcatgttctcatcggcggagccttcttgtgtaatgtaaactgtgccatgttattaaaaaatgtgaactaag

SEQ ID NO: 5177 - protein, 1035 aa, Homo sapiens
MACPFIQRRADSATHTTTAQIEKMTAISASTLGRERKCRRHSDSSSQDRTAAGTVTVKVPVENPRASTGAALGKGSVIVQLLPAWEQATSDPELGVGTLPEHDSQDAGPIVPKISGLERSQEKSQDCCKEPIFEPVVLKDPCPQVAQPIPQPQTEPQLRAPSPDPDLVQRTEAPPQPPPLSTQPPQGPPEAQLQPAPQPQVQRPPRPQSPTQLLHQNLPPVQAHPSAQSLSQPLSAYNSSSLSLNSLSSSRSSTPAKNMFAPPTALPPPPPLTSGSLQVAGHPAGSTYSEQDILRQELNTRFLASQSADRGASLGPPPYLRTEFHQHQHQHQHTHQHTHQHTFTPFPHAIPPTAIMPTPAPPMFDKYPTKVDPFYRHSLFHSYPPAVSGIPPMIPPTGPFGSLQGAFQPKLTDPFRPMLRKPGKWCAMHVHIAWQIYHHQQKVKKQMQSDPHKLDFGLKPEFLSRPPGPSLFGAIHHPHDLARPSTLFSAAGAAHPTGTPFGPPPHHSNFLNPAAHLEPFNRPSTFTGLAAVGGNAFGGLGNPSVTPNSMFGHKDGPSVQNFSNPHEPWNRLHRTPPSFPTPPPWLKPGELERSASAAAHDRDRDVDKRDSSVSKDDKERESVEKRHSSHPSPAPVLPVNALGHTRSSTEQIRAHLNTEAREKDKPKERERDHSESRKDLAADEHKAKEGHLPEKDGHGHEGRAAGEEAKQLARVPSPYVRTPVVESARPNSTSSREAEPRKGEPAYENPKKSSEVKVKEERKEDHDLPPEAPQTHRASEPPPPNSSSSVHPGPLASMPMTVGVTGIHPMNSISSLDRTRMMTPFMGISPLPGGERFPYPSFHWDPIRDPLRDPYRELDIHRRDPLGRDFLLRNDPLHRLSTPRLYEADRSFRDREPHDYSHHHHHHHHPLSVDPRREHERGGHLDERERLHMLREDYEHTRLHSVHPASLDGHLPHPSLITPGLPSMHYPRISPTAGNQNGLLNKTPPTAALSAPPPLISTLGGRPVSPRRTTPLSAEIRERPPSHTLKDIEAR

SEQ ID NO: 5178 - DNA, 6630 bp, Homo sapiens
gcagtgcccgggctcccgctgcagccgcccggggacacgccgtgcaccctccggctcggggctttctcggcggcggcggcggcagcagcagcagcgttagcggcggcggcgagagcagcgttcccggctgcgcttctccctcaggcggggcggcgagagaagcggcggcggcggcggcggcacaccggtgtctctcccgctggagatttctttctgctttcctcatcgactgactgactcaccccctcccttttttgaggaagggtgacctcttctctgggactggaaaaaatatttttgtgaggaggggggcgggtggcagcgacagggtttgcttcttctcttctttcatctccctctcctcccccctcgaagaccgaaaagcaaaccccacaactgctccagcagcatcctccttcccttcctccgcctcccttctcctccgccgctcgcagtttcgccctctcttccgctaatgattgcattattatgctcccctctctggggggtctcgcccctcttgggtcgctccggagccccggcctcccctggctgcatttcttaaaaatttgggagcctgggagtgagttttctccgaggcgtgtgtgagaggcggcgggggtgttttcctgcgcgaggggcgggtgaagttcattgcccccacttttcccgcgacctttttcggacccgattttggatcgagttgaggggggcgcgggcgttttcggggggcggggggcgcggcggagaatggccgcggggagggctccccggagcctcccagtctcttgatcaaagcattccgctattctgatttattgcttgcttggtgagttatttttttttcctctaaaggagacctgtgtgttcagccattactttgctcggcgctgctcccaggcatctccgaccctcggtgctgtggggagccccacacttgggtcggggcggagggaagccgtgaagggggagggagggctcggtgtcaatttttttttgtgtggctgcggccgtagcctgtggcgggcaagcggggagaccccggcgcagcagaaccatggatggcccgacgcggggccatggactccgcaaaaagcggcggtcgcggtcgcagcgagaccgggagaggcgctcccggggcgggctgggggccggcgcggccggcggcggcggggctggccggacccgggcgctctcactcgcctcgtcgtcgggctccgacaaggaagacaatgggaagcccccgtcctccgccccgtcccggcccagacccccgcggaggaagcggagagagtccacctcggcagaagaggacatcattgatggatttgccatgaccagctttgtcacttttgaagcgctggagaaagatgtagcacttaagcctcaggaacgtgtggagaaacgccagacgcccctgaccaagaagaaacgagaagcacttaccaatggcttgtcctttcattcaaagaagagcagactcagccacccacaccactacagctcagatcgagaaaatgaccgcaatctctgccagcaccttgggaagagaaagaaaatgccgaaggcactcagacagctcaagccaggacagaacagctgcagggacagtgacagtgaaagtgccagtggagaatccaagggcttccaccggagcagctctcgggaaaggctcagtgatagttcagctccttccagcttgggaacaggctacttcagatccggagttaggtgttggcacgctaccagaacatgacagccaggatgcagggccgattgtccccaagatatcgggtctagagagaagccaggagaagagccaggactgttgcaaagagccaatctttgagcctgtggtgcttaaagacccctgccctcaggtcgcacagccaataccccagccgcagacggagccccaactccgagctccttctccggaccctgacttggtgcagcgcacagaggccccacctcaacccccacctctgagtacacagccaccacagggccctcctgaggcccagctccagcctgccccgcagcctcaggtgcagaggccacccaggccacagtcccccacccagctgctccatcagaacctcccacctgtgcaggcccacccctctgctcagagcctctcccagccattgtcagcctacaacagcagtagcttaagcctcaacagtttaagcagcagcagaagcagcactccagcgaagaatatgtttgcccctcccactgctctgcctcctccaccaccactgacatcaggaagtctgcaggtggccggacacccggccgggagcacttactcagagcaagacatcttgcgacaggaactgaacactcgttttttggcctctcagagtgctgaccgcggggcttccctgggccctccgccctacctgcggaccgagttccatcagcaccagcaccagcaccagcacacccaccagcacacgcaccagcacaccttcacgccgttcccccacgccatcccacccaccgccatcatgccgacgccagcacctcccatgtttgacaaataccctacaaaagttgacccattctaccggcacagtctcttccattcctatcctcctgcagtgtcgggcatcccccctatgatcccacccactggcccttttggttcactacaaggagcatttcagccgaagttgacagatcctttcagacctatgttaaggaaaccagggaagtggtgtgctatgcatgttcacatcgcctggcagatttaccaccaccaacagaaagtcaagaaacagatgcagtcagacccacataagctggactttggactgaaacctgagttcctgagccgccctccaggccccagtctttttggagccatccaccacccccatgacctggcacggccttcaactttgttctctgccgctggtgctgcacacccaactgggaccccttttgggccacctcctcatcacagcaacttcctcaaccctgctgcccacctagagccttttaatcggccgtctacattcacaggcctagcagcagttggtggcaatgccttcgggggacttggaaatccttccgttacacccaactcaatgttcggccacaaggatggccccagtgtgcagaactttagcaaccctcacgaaccctggaaccggctgcaccgaacgcctccgtcgttcccgacccctccgccctggctgaagccaggggagctggagcgcagcgcgtccgctgcagctcatgacagagatagagatgtagataaacgagactcatctgttagtaaagatgacaaagaaagggaaagcgtcgagaagagacactccagccacccttcaccagcacctgtcctcccggtgaatgccctgggacatacccgcagctccactgaacagatccgggctcatctgaacactgaggctcgggagaaggacaaacccaaagagagggagagagaccactcggaatcccgcaaggacctggccgccgacgagcacaaggcgaaagagggccacctgcccgagaaggacgggcacggccacgaggggcgcgccgcgggcgaagaggccaagcagctggcccgggtgccgtctccctacgtgcggaccccggtggtggagagtgccaggcccaacagcacctcgagccgggaggccgagccgcgcaagggtgagccggcctacgagaaccccaagaagagctccgaggtcaaggtgaaggaggagcggaaggaagaccatgacctgcctccagaggccccgcagacccaccgggcctcggagccgccgcctcccaactcctcgtccagcgtgcacccggggcccctggcctcgatgcccatgacggtgggggtgacgggcattcaccccatgaacagcatcagcagcctggacaggactcgcatgatgacccccttcatgggcatcagccccctcccgggcggagagcgcttcccgtacccttctttccactgggaccccatccgggaccccttgagggatccttaccgagaacttgacattcaccggagagacccgctgggcagggacttcctgctaaggaacgacccgctccaccggctctcgactccccggctgtacgaagccgaccgctccttcagggaccgggagcctcacgactacagccaccaccaccaccaccaccaccacccgctgtctgtggaccctcggcgggagcacgagcggggaggccacctggacgagcgggagcgcttgcacatgctcagagaagactacgagcacacgcggctccactccgtgcaccccgcctccctcgacggacacctcccccaccccagcctcatcaccccgggactccccagcatgcactatccccgcatcagccccaccgcgggcaaccagaacggactcctcaacaagacccctccgacagcagcgctgagcgcacctcccccgctcatctccacgctggggggccgcccggtctctcccagaaggacgactcctctgtccgcagagataagggagaggcccccttcccacacgctgaaggatatcgaggcccgataagccgagaacaggagcaagaacgaggaagaagaaaccctaggcagacaccaggccaggcttgagagacagaactcctgcatggctcacacagactgggggggaaagccccaccccttccccttgtaaaaaatgtatagactcagtgcacattttgaaatgttttgtatattatatgttgagatttttcagatcttttagcccagtcatatgttctcacgtctcctactttttgtttctcgtataaaactttttgatttgaaccaaaacagtgaagatgacaacacacaccaattggatgataattgtagcgggggcggtgggggggagaagtccacgccatccatcatgcaaaattctttcagatgaggtgggaaggccgtgtacatagttatgtaaaaagagattgcttcatgagctaatggttcatatatgcaaaagggtaagatgaaagctttactttgtacaaatgtaaatagataaagtaacataatacattaatacttcttaaaatgtgctatttgcaaacttacttaatatcagtgaacacagtcggctaaagctgtgttcccatatattgttatagacagctaaacccttcaactatgcaatgaatgttcgggcttttcacaaaagcccgcctaactcaaaggagccttttcaaatccatttacagcatacttaaggtcatattttccctgaacaagcgcttacgtgatatgactctgttttccttgcttgttttttttcaaacggagaaacatcctgttttgcaaattggaccccaggctggaacttagcatctgaagttgccgcttgtgggctctgggggaaagtgtagccccggagaggtaactgaggacatgagcaaccagtgccagggagggtgggatttgccagatgccaaaatcaggggacgggtggtggtgtctgtcagacacacacaggtcgccagtgacttcacacacacctcatgtgagaaccatgccttttttagtgtgtcctatttcatacctgtacacacttcctcgttttgtaatgagatttacttacacccaaacagatcctgaaagaaagcttcaagttttctcagatgatggatatgttttcactgtattcaataactgacggatgtaaggtgcacgtttcctgatgtgacgcactgtattccagctggtgatcaagtctgggaacagccgtaacaggtcaaccttgtggagccatcgcgagttagagggtgaaagatggcagaaaaaaaagtcttgtgtgtgagtgtgttttttgagtttgcatcaatcttaatgtctcttcataatacttttataatacattaagcctcttgtctacatatttggagagaatatgactttactagcagagaaatacaatatatcttgtctactggactgtaaaatatatgtatgaaataaaattagttccatttggtcttctagtatattaaagtgctatctgacgttgttatcctgtttttgcaaaaaaaaaaaaaaaaaaaagttaactacagaccattgtttctaataagcagagagatctattttagtagtaaactgaaggtttagttgtgagcttcagattttgtgaactccagatgttgtgcggtgtttttttttttttttaagacaacaactaaaaaaaatgcaaggaatatgtacactggaactgtagtggtagctttcagtattgtaaagagattgttctatacggacctttttgctgtttatcctgtatgtaataaagtcctttctagatcctatgtgaaaagaaaagtgaagcaactgaatcttcagcatgttctcatcggcggagccttcttgtgtaatgtaaactgtgccatgttattaaaaaatgtgaactaagcttccagctgcttgtttgtgtgaggtgaccatcattaccttagggaagaagccatacctgtacaagaccgggctcttgaaaagaaacacctcgaacccagcccgtgtaagaacagaaggctcacctgcagtggctgaccaccctacccaactcggttagtgtctcaccaatttgttactataaacatttgcaccccaca

SEQ ID NO: 5179 - protein, 1035 aa, Homo sapiens; identical to SEQ ID NO: 5177

SEQ ID NO: 5180 - DNA, 6390 bp, Homo sapiens
cgctcgcagtttcgccctctcttccgctaatgattgcattattatgctcccctctctggggggtctcgcccctcttgggtcgctccggagccccggcctcccctggctgcatttcttaaaaatttgggagcctgggagtgagttttctccgaggcgtgtgtgagaggcggcgggggtgttttcctgcgcgaggggcgggtgaagttcattgcccccacttttcccgcgacctttttcggacccgattttggatcgagttgaggggggcgcgggcgttttcggggggcggggggcgcggcggagaatggccgcggggagggctccccggagcctcccagtctcttgatcaaagcattccgctattctgatttattgcttgcttggtgagttatttttttttcctctaaaggagacctgtgtgttcagccattactttgctcggcgctgctcccaggcatctccgaccctcggtgctgtggggagccccacacttgggctcctcgcctctcgccctcgctccccgtccctcctcccctctctccgccccttcccccttttctttctcctctctttcttcccctctctcccttctttcggccgccgtctcccccgcgccctcctcggggcggagggaagccgtgaagggggagggagggctcggtgtcaatttttttttgtgtggctgcggccgtagcctgtggcgggcaagcggggagaccccggcgcagcagaaccatggatggcccgacgcggggccatggactccgcaaaaagcggcggtcgcggtcgcagcgagaccgggagaggcgctcccggggcgggctgggggccggcgcggccggcggcggcggggctggccggacccgggcgctctcactcgcctcgtcgtcgggctccgacaaggaagacaatgggaagcccccgtcctccgccccgtcccggcccagacccccgcggaggaagcggagagagtccacctcggcagaagaggacatcattgatggatttgccatgaccagctttgtcacttttgaagcgctggagaaagatgtagcacttaagcctcaggaacgtgtggagaaacgccagacgcccctgaccaagaagaaacgagaagcacttaccaatggcttgtcctttcattcaaagaagagcagactcagccacccacaccactacagctcagatcgagaaaatgaccgcaatctctgccagcaccttgggaagagaaagaaaatgccgaaggcactcagacagctcaagccaggacagaacagctgcagggacagtgacagtgaaagtgccagtggagaatccaagggcttccaccggagcagctctcgggaaaggctcagtgatagttcagctccttccagcttgggaacaggctacttctgtgacagtgacagtgaccaggaagagaaggcatcagatgccagctctgaaaaactcttcaacactgttattgtaaacaaagatccggagttaggtgttggcacgctaccagaacatgacagccaggatgcagggccgattgtccccaagatatcgggtctagagagaagccaggagaagagccaggactgttgcaaagagccaatctttgagcctgtggtgcttaaagacccctgccctcaggtcgcacagccaataccccagccgcagacggagccccaactccgagctccttctccggaccctgacttggtgcagcgcacagaggccccacctcaacccccacctctgagtacacagccaccacagggccctcctgaggcccagctccagcctgccccgcagcctcaggtgcagaggccacccaggccacagtcccccacccagctgctccatcagaacctcccacctgtgcaggcccacccctctgctcagagcctctcccagccattgtcagcctacaacagcagtagcttaagcctcaacagtttaagcagcagcagaagcagcactccagcgaagactcagcccgccccacctcacatctcccaccacccctctgcctccccgttccccctctccctgcccaaccacagccccctgcacagcttcacacccaccctccagccccccgcacactcacatcaccccaatatgtttgcccctcccactgctctgcctcctccaccaccactgacatcaggaagtctgcaggtggccggacacccggccgggagcacttactcagagcaagacatcttgcgacaggaactgaacactcgttttttggcctctcagagtgctgaccgcggggcttccctgggccctccgccctacctgcggaccgagttccatcagcaccagcaccagcaccagcacacccaccagcacacgcaccagcacaccttcacgccgttcccccacgccatcccacccaccgccatcatgccgacgccagcacctcccatgtttgacaaataccctacaaaagttgacccattctaccggcacagtctcttccattcctatcctcctgcagtgtcgggcatcccccctatgatcccacccactggcccttttggttcactacaaggagcatttcagccgaagacatccaaccctatcgatgtcgctgctcggcctgggacagtcccacacactttactccaaaaggacccgaggttgacagatcctttcagacctatgttaaggaaaccagggaagtggtgtgctatgcatgttcacatcgcctggcagatttaccaccaccaacagaaagtcaagaaacagatgcagtcagacccacataagctggactttggactgaaacctgagttcctgagccgccctccaggccccagtctttttggagccatccaccacccccatgacctggcacggccttcaactttgttctctgccgctggtgctgcacacccaactgggaccccttttgggccacctcctcatcacagcaacttcctcaaccctgctgcccacctagagccttttaatcggccgtctacattcacaggcctagcagcagttggtggcaatgccttcgggggacttggaaatccttccgttacacccaactcaatgttcggccacaaggatggccccagtgtgcagaactttagcaaccctcacgaaccctggaaccggctgcaccgaacgcctccgtcgttcccgacccctccgccctggctgaagccaggggagctggagcgcagcgcgtccgctgcagctcatgacagagatagagatgtagataaacgagactcatctgttagtaaagatgacaaagaaagggaaagcgtcgagaagagacactccagccacccttcaccagcacctgtcctcccggtgaatgccctgggacatacccgcagctccactgaacagatccgggctcatctgaacactgaggctcgggagaaggacaaacccaaagagagggagagagaccactcggaatcccgcaaggacctggccgccgacgagcacaaggcgaaagagggccacctgcccgagaaggacgggcacggccacgaggggcgcgccgcgggcgaagaggccaagcagctggcccgggtgccgtctccctacgtgcggaccccggtggtggagagtgccaggcccaacagcacctcgagccgggaggccgagccgcgcaagggtgagccggcctacgagaaccccaagaagagctccgaggtcaaggtgaaggaggagcggaaggaagaccatgacctgcctccagaggccccgcagacccaccgggcctcggagccgccgcctcccaactcctcgtccagcgtgcacccggggcccctggcctcgatgcccatgacggtgggggtgacgggcattcaccccatgaacagcatcagcagcctggacaggactcgcatgatgacccccttcatgggcatcagccccctcccgggcggagagcgcttcccgtacccttctttccactgggaccccatccgggaccccttgagggatccttaccgagaacttgacattcaccggagagacccgctgggcagggacttcctgctaaggaacgacccgctccaccggctctcgactccccggctgtacgaagccgaccgctccttcagggaccgggagcctcacgactacagccaccaccaccaccaccaccaccacccgctgtctgtggaccctcggcgggagcacgagcggggaggccacctggacgagcgggagcgcttgcacatgctcagagaagactacgagcacacgcggctccactccgtgcaccccgcctccctcgacggacacctcccccaccccagcctcatcaccccgggactccccagcatgcactatccccgcatcagccccaccgcgggcaaccagaacggactcctcaacaagacccctccgacagcagcgctgagcgcacctcccccgctcatctccacgctggggggccgcccggtctctcccagaaggacgactcctctgtccgcagagataagggagaggcccccttcccacacgctgaaggatatcgaggcccgataagccgagaacaggagcaagaacgaggaagaagaaaccctaggcagacaccaggccaggcttgagagacagaactcctgcatggctcacacagactgggggggaaagccccaccccttccccttgtaaaaaatgtatagactcagtgcacattttgaaatgttttgtatattatatgttgagatttttcagatcttttagcccagtcatatgttctcacgtctcctactttttgtttctcgtataaaactttttgatttgaaccaaaacagtgaagatgacaacacacaccaattggatgataattgtagcgggggcggtgggggggagaagtccacgccatccatcatgcaaaattctttcagatgaggtgggaaggccgtgtacatagttatgtaaaaagagattgcttcatgagctaatggttcatatatgcaaaagggtaagatgaaagctttactttgtacaaatgtaaatagataaagtaacataatacattaatacttcttaaaatgtgctatttgcaaacttacttaatatcagtgaacacagtcggctaaagctgtgttcccatatattgttatagacagctaaacccttcaactatgcaatgaatgttcgggcttttcacaaaagcccgcctaactcaaaggagccttttcaaatccatttacagcatacttaaggtcatattttccctgaacaagcgcttacgtgatatgactctgttttccttgcttgttttttttcaaacggagaaacatcctgttttgcaaattggaccccaggctggaacttagcatctgaagttgccgcttgtgggctctgggggaaagtgtagccccggagaggtaactgaggacatgagcaaccagtgccagggagggtgggatttgccagatgccaaaatcaggggacgggtggtggtgtctgtcagacacacacaggtcgccagtgacttcacacacacctcatgtgagaaccatgccttttttagtgtgtcctatttcatacctgtacacacttcctcgttttgtaatgagatttacttacacccaaacagatcctgaaagaaagcttcaagttttctcagatgatggatatgttttcactgtattcaataactgacggatgtaaggtgcacgtttcctgatgtgacgcactgtattccagctggtgatcaagtctgggaacagccgtaacaggtcaaccttgtggagccatcgcgagttagagggtgaaagatggcagaaaaaaaagtcttgtgtgtgagtgtgttttttgagtttgcatcaatcttaatgtctcttcataatacttttataatacattaagcctcttgtctacatatttggagagaatatgactttactagcagagaaatacaatatatcttgtctactggactgtaaaatatatgtatgaaataaaattagttccatttggtcttctagtatattaaagtgctatctgacgttgttatcctgtttttgcaaaaaaaaaaaaaaaaaaaagttaactacagaccattgtttctaataagcagagagatctattttagtagtaaactgaaggtttagttgtgagcttcagattttgtgaactccagatgttgtgcggtgtttttttttttttttaagacaacaactaaaaaaaatgcaaggaatatgtacactggaactgtagtggtagctttcagtattgtaaagagattgttctatacggacctttttgctgtttatcctgtatgtaataaagtcctttctagatcctatgtgaaaagaaaagtgaagcaactgaatcttcagcatgttctcatcggcggagccttcttgtgtaatgtaaactgtgccatgttattaaaaaatgtgaactaag

SEQ ID NO: 5181 - protein, 1259 aa, Homo sapiens; identical to SEQ ID NO: 683

SEQ ID NO: 5182 - DNA, 6318 bp, Homo sapiens
cgctcgcagtttcgccctctcttccgctaatgattgcattattatgctcccctctctggggggtctcgcccctcttgggtcgctccggagccccggcctcccctggctgcatttcttaaaaatttgggagcctgggagtgagttttctccgaggcgtgtgtgagaggcggcgggggtgttttcctgcgcgaggggcgggtgaagttcattgcccccacttttcccgcgacctttttcggacccgattttggatcgagttgaggggggcgcgggcgttttcggggggcggggggcgcggcggagaatggccgcggggagggctccccggagcctcccagtctcttgatcaaagcattccgctattctgatttattgcttgcttggtgagttatttttttttcctctaaaggagacctgtgtgttcagccattactttgctcggcgctgctcccaggcatctccgaccctcggtgctgtggggagccccacacttgggctcctcgcctctcgccctcgctccccgtccctcctcccctctctccgccccttcccccttttctttctcctctctttcttcccctctctcccttctttcggccgccgtctcccccgcgccctcctcggggcggagggaagccgtgaagggggagggagggctcggtgtcaatttttttttgtgtggctgcggccgtagcctgtggcgggcaagcggggagaccccggcgcagcagaaccatggatggcccgacgcggggccatggactccgcaaaaagcggcggtcgcggtcgcagcgagaccgggagaggcgctcccggggcgggctgggggccggcgcggccggcggcggcggggctggccggacccgggcgctctcactcgcctcgtcgtcgggctccgacaaggaagacaatgggaagcccccgtcctccgccccgtcccggcccagacccccgcggaggaagcggagagagtccacctcggcagaagaggacatcattgatggatttgccatgaccagctttgtcacttttgaagcgctggagaaagatgtagcacttaagcctcaggaacgtgtggagaaacgccagacgcccctgaccaagaagaaacgagaagcacttaccaatggcttgtcctttcattcaaagaagagcagactcagccacccacaccactacagctcagatcgagaaaatgaccgcaatctctgccagcaccttgggaagagaaagaaaatgccgaaggcactcagacagctcaagccaggacagaacagctgcagggacagtgacagtgaaagtgccagtggagaatccaagggcttccaccggagcagctctcgggaaaggctcagtgatagttcagctccttccagcttgggaacaggctacttctgtgacagtgacagtgaccaggaagagaaggcatcagatgccagctctgaaaaactcttcaacactgttattgtaaacaaagatccggagttaggtgttggcacgctaccagaacatgacagccaggatgcagggccgattgtccccaagatatcgggtctagagagaagccaggagaagagccaggactgttgcaaagagccaatctttgagcctgtggtgcttaaagacccctgccctcaggtcgcacagccaataccccagccgcagacggagccccaactccgagctccttctccggaccctgacttggtgcagcgcacagaggccccacctcaacccccacctctgagtacacagccaccacagggccctcctgaggcccagctccagcctgccccgcagcctcaggtgcagaggccacccaggccacagtcccccacccagctgctccatcagaacctcccacctgtgcaggcccacccctctgctcagagcctctcccagccattgtcagcctacaacagcagtagcttaagcctcaacagtttaagcagcagcagaagcagcactccagcgaagactcagcccgccccacctcacatctcccaccacccctctgcctccccgttccccctctccctgcccaaccacagccccctgcacagcttcacacccaccctccagccccccgcacactcacatcaccccaatatgtttgcccctcccactgctctgcctcctccaccaccactgacatcaggaagtctgcaggtggccggacacccggccgggagcacttactcagagcaagacatcttgcgacaggaactgaacactcgttttttggcctctcagagtgctgaccgcggggcttccctgggccctccgccctacctgcggaccgagttccatcagcaccagcaccagcaccagcacacccaccagcacacgcaccagcacaccttcacgccgttcccccacgccatcccacccaccgccatcatgccgacgccagcacctcccatgtttgacaaataccctacaaaagttgacccattctaccggcacagtctcttccattcctatcctcctgcagtgtcgggcatcccccctatgatcccacccactggcccttttggttcactacaaggagcatttcagccgaagttgacagatcctttcagacctatgttaaggaaaccagggaagtggtgtgctatgcatgttcacatcgcctggcagatttaccaccaccaacagaaagtcaagaaacagatgcagtcagacccacataagctggactttggactgaaacctgagttcctgagccgccctccaggccccagtctttttggagccatccaccacccccatgacctggcacggccttcaactttgttctctgccgctggtgctgcacacccaactgggaccccttttgggccacctcctcatcacagcaacttcctcaaccctgctgcccacctagagccttttaatcggccgtctacattcacaggcctagcagcagttggtggcaatgccttcgggggacttggaaatccttccgttacacccaactcaatgttcggccacaaggatggccccagtgtgcagaactttagcaaccctcacgaaccctggaaccggctgcaccgaacgcctccgtcgttcccgacccctccgccctggctgaagccaggggagctggagcgcagcgcgtccgctgcagctcatgacagagatagagatgtagataaacgagactcatctgttagtaaagatgacaaagaaagggaaagcgtcgagaagagacactccagccacccttcaccagcacctgtcctcccggtgaatgccctgggacatacccgcagctccactgaacagatccgggctcatctgaacactgaggctcgggagaaggacaaacccaaagagagggagagagaccactcggaatcccgcaaggacctggccgccgacgagcacaaggcgaaagagggccacctgcccgagaaggacgggcacggccacgaggggcgcgccgcgggcgaagaggccaagcagctggcccgggtgccgtctccctacgtgcggaccccggtggtggagagtgccaggcccaacagcacctcgagccgggaggccgagccgcgcaagggtgagccggcctacgagaaccccaagaagagctccgaggtcaaggtgaaggaggagcggaaggaagaccatgacctgcctccagaggccccgcagacccaccgggcctcggagccgccgcctcccaactcctcgtccagcgtgcacccggggcccctggcctcgatgcccatgacggtgggggtgacgggcattcaccccatgaacagcatcagcagcctggacaggactcgcatgatgacccccttcatgggcatcagccccctcccgggcggagagcgcttcccgtacccttctttccactgggaccccatccgggaccccttgagggatccttaccgagaacttgacattcaccggagagacccgctgggcagggacttcctgctaaggaacgacccgctccaccggctctcgactccccggctgtacgaagccgaccgctccttcagggaccgggagcctcacgactacagccaccaccaccaccaccaccaccacccgctgtctgtggaccctcggcgggagcacgagcggggaggccacctggacgagcgggagcgcttgcacatgctcagagaagactacgagcacacgcggctccactccgtgcaccccgcctccctcgacggacacctcccccaccccagcctcatcaccccgggactccccagcatgcactatccccgcatcagccccaccgcgggcaaccagaacggactcctcaacaagacccctccgacagcagcgctgagcgcacctcccccgctcatctccacgctggggggccgcccggtctctcccagaaggacgactcctctgtccgcagagataagggagaggcccccttcccacacgctgaaggatatcgaggcccgataagccgagaacaggagcaagaacgaggaagaagaaaccctaggcagacaccaggccaggcttgagagacagaactcctgcatggctcacacagactgggggggaaagccccaccccttccccttgtaaaaaatgtatagactcagtgcacattttgaaatgttttgtatattatatgttgagatttttcagatcttttagcccagtcatatgttctcacgtctcctactttttgtttctcgtataaaactttttgatttgaaccaaaacagtgaagatgacaacacacaccaattggatgataattgtagcgggggcggtgggggggagaagtccacgccatccatcatgcaaaattctttcagatgaggtgggaaggccgtgtacatagttatgtaaaaagagattgcttcatgagctaatggttcatatatgcaaaagggtaagatgaaagctttactttgtacaaatgtaaatagataaagtaacataatacattaatacttcttaaaatgtgctatttgcaaacttacttaatatcagtgaacacagtcggctaaagctgtgttcccatatattgttatagacagctaaacccttcaactatgcaatgaatgttcgggcttttcacaaaagcccgcctaactcaaaggagccttttcaaatccatttacagcatacttaaggtcatattttccctgaacaagcgcttacgtgatatgactctgttttccttgcttgttttttttcaaacggagaaacatcctgttttgcaaattggaccccaggctggaacttagcatctgaagttgccgcttgtgggctctgggggaaagtgtagccccggagaggtaactgaggacatgagcaaccagtgccagggagggtgggatttgccagatgccaaaatcaggggacgggtggtggtgtctgtcagacacacacaggtcgccagtgacttcacacacacctcatgtgagaaccatgccttttttagtgtgtcctatttcatacctgtacacacttcctcgttttgtaatgagatttacttacacccaaacagatcctgaaagaaagcttcaagttttctcagatgatggatatgttttcactgtattcaataactgacggatgtaaggtgcacgtttcctgatgtgacgcactgtattccagctggtgatcaagtctgggaacagccgtaacaggtcaaccttgtggagccatcgcgagttagagggtgaaagatggcagaaaaaaaagtcttgtgtgtgagtgtgttttttgagtttgcatcaatcttaatgtctcttcataatacttttataatacattaagcctcttgtctacatatttggagagaatatgactttactagcagagaaatacaatatatcttgtctactggactgtaaaatatatgtatgaaataaaattagttccatttggtcttctagtatattaaagtgctatctgacgttgttatcctgtttttgcaaaaaaaaaaaaaaaaaaaagttaactacagaccattgtttctaataagcagagagatctattttagtagtaaactgaaggtttagttgtgagcttcagattttgtgaactccagatgttgtgcggtgtttttttttttttttaagacaacaactaaaaaaaatgcaaggaatatgtacactggaactgtagtggtagctttcagtattgtaaagagattgttctatacggacctttttgctgtttatcctgtatgtaataaagtcctttctagatcctatgtgaaaagaaaagtgaagcaactgaatcttcagcatgttctcatcggcggagccttcttgtgtaatgtaaactgtgccatgttattaaaaaatgtgaactaag

SEQ ID NO: 5183 - protein, 1235 aa, Homo sapiens
MDGPTRGHGLRKKRRSRSQRDRERRSRGGLGAGAAGGGGAGRTRALSLASSSGSDKEDNGKPPSSAPSRPRPPRRKRRESTSAEEDIIDGFAMTSFVTFEALEKDVALKPQERVEKRQTPLTKKKREALTNGLSFHSKKSRLSHPHHYSSDRENDRNLCQHLGKRKKMPKALRQLKPGQNSCRDSDSESASGESKGFHRSSSRERLSDSSAPSSLGTGYFCDSDSDQEEKASDASSEKLFNTVIVNKDPELGVGTLPEHDSQDAGPIVPKISGLERSQEKSQDCCKEPIFEPVVLKDPCPQVAQPIPQPQTEPQLRAPSPDPDLVQRTEAPPQPPPLSTQPPQGPPEAQLQPAPQPQVQRPPRPQSPTQLLHQNLPPVQAHPSAQSLSQPLSAYNSSSLSLNSLSSSRSSTPAKTQPAPPHISHHPSASPFPLSLPNHSPLHSFTPTLQPPAHSHHPNMFAPPTALPPPPPLTSGSLQVAGHPAGSTYSEQDILRQELNTRFLASQSADRGASLGPPPYLRTEFHQHQHQHQHTHQHTHQHTFTPFPHAIPPTAIMPTPAPPMFDKYPTKVDPFYRHSLFHSYPPAVSGIPPMIPPTGPFGSLQGAFQPKLTDPFRPMLRKPGKWCAMHVHIAWQIYHHQQKVKKQMQSDPHKLDFGLKPEFLSRPPGPSLFGAIHHPHDLARPSTLFSAAGAAHPTGTPFGPPPHHSNFLNPAAHLEPFNRPSTFTGLAAVGGNAFGGLGNPSVTPNSMFGHKDGPSVQNFSNPHEPWNRLHRTPPSFPTPPPWLKPGELERSASAAAHDRDRDVDKRDSSVSKDDKERESVEKRHSSHPSPAPVLPVNALGHTRSSTEQIRAHLNTEAREKDKPKERERDHSESRKDLAADEHKAKEGHLPEKDGHGHEGRAAGEEAKQLARVPSPYVRTPVVESARPNSTSSREAEPRKGEPAYENPKKSSEVKVKEERKEDHDLPPEAPQTHRASEPPPPNSSSSVHPGPLASMPMTVGVTGIHPMNSISSLDRTRMMTPFMGISPLPGGERFPYPSFHWDPIRDPLRDPYRELDIHRRDPLGRDFLLRNDPLHRLSTPRLYEADRSFRDREPHDYSHHHHHHHHPLSVDPRREHERGGHLDERERLHMLREDYEHTRLHSVHPASLDGHLPHPSLITPGLPSMHYPRISPTAGNQNGLLNKTPPTAALSAPPPLISTLGGRPVSPRRTTPLSAEIRERPPSHTLKDIEAR

SEQ ID NO: 5184 - DNA, 6517 bp, Homo sapiens
cgctcgcagtttcgccctctcttccgctaatgattgcattattatgctcccctctctggggggtctcgcccctcttgggtcgctccggagccccggcctcccctggctgcatttcttaaaaatttgggagcctgggagtgagttttctccgaggcgtgtgtgagaggcggcgggggtgttttcctgcgcgaggggcgggtgaagttcattgcccccacttttcccgcgacctttttcggacccgattttggatcgagttgaggggggcgcgggcgttttcggggggcggggggcgcggcggagaatggccgcggggagggctccccggagcctcccagtctcttgatcaaagcattccgctattctgatttattgcttgcttggtgagttatttttttttcctctaaaggagacctgtgtgttcagccattactttgctcggcgctgctcccaggcatctccgaccctcggtgctgtggggagccccacacttgggctcctcgcctctcgccctcgctccccgtccctcctcccctctctccgccccttcccccttttctttctcctctctttcttcccctctctcccttctttcggccgccgtctcccccgcgccctcctcggggcggagggaagccgtgaagggggagggagggctcggtgtcaatttttttttgtgtggctgcggccgtagcctgtggcgggcaagcggggagaccccggcgcagcagaaccatggatggcccgacgcggggccatggactccgcaaaaagcggcggtcgcggtcgcagcgagaccgggagaggcgctcccggggcgggctgggggccggcgcggccggcggcggcggggctggccggacccgggcgctctcactcgcctcgtcgtcgggctccgacaaggaagacaatgggaagcccccgtcctccgccccgtcccggcccagacccccgcggaggaagcggagagagtccacctcggcagaagaggacatcattgatggatttgccatgaccagctttgtcacttttgaagcgctggagaaagatgtagcacttaagcctcaggaacgtgtggagaaacgccagacgcccctgaccaagaagaaacgagaagcacttaccaatggcttgtcctttcattcaaagaagagcagactcagccacccacaccactacagctcagatcgagaaaatgaccgcaatctctgccagcaccttgggaagagaaagaaaatgccgaaggcactcagacagctcaagccaggacagaacagctgcagggacagtgacagtgaaagtgccagtggagaatccaagggcttccaccggagcagctctcgggaaaggctcagtgatagttcagctccttccagcttgggaacaggctacttctgtgacagtgacagtgaccaggaagagaaggcatcagatgccagctctgaaaaactcttcaacactgttattgtaaacaaagatccggagttaggtgttggcacgctaccagaacatgacagccaggatgcagggccgattgtccccaagatatcgggtctagagagaagccaggagaagagccaggactgttgcaaagagccaatctttgagcctgtggtgcttaaagacccctgccctcaggtcgcacagccaataccccagccgcagacggagccccaactccgagctccttctccggaccctgacttggtgcagcgcacagaggccccacctcaacccccacctctgagtacacagccaccacagggccctcctgaggcccagctccagcctgccccgcagcctcaggtgcagaggccacccaggccacagtcccccacccagctgctccatcagaacctcccacctgtgcaggcccacccctctgctcagagcctctcccagccattgtcagcctacaacagcagtagcttaagcctcaacagtttaagcagcagcagaagcagcactccagcgaagactcagcccgccccacctcacatctcccaccacccctctgcctccccgttccccctctccctgcccaaccacagccccctgcacagcttcacacccaccctccagccccccgcacactcacatcaccccaatatgtttgcccctcccactgctctgcctcctccaccaccactgacatcaggaagtctgcaggtggccggacacccggccgggagcacttactcagagcaagacatcttgcgacaggaactgaacactcgttttttggcctctcagagtgctgaccgcggggcttccctgggccctccgccctacctgcggaccgagttccatcagcaccagcaccagcaccagcacacccaccagcacacgcaccagcacaccttcacgccgttcccccacgccatcccacccaccgccatcatgccgacgccagcacctcccatgtttgacaaataccctacaaaagttgacccattctaccggcacagtctcttccattcctatcctcctgcagtgtcgggcatcccccctatgatcccacccactggcccttttggttcactacaaggagcatttcagccgaagttgacagatcctttcagacctatgttaaggaaaccagggaagtggtgtgctatgcatgttcacatcgcctggcagatttaccaccaccaacagaaagtcaagaaacagatgcagtcagacccacataagctggactttggactgaaacctgagttcctgagccgccctccaggccccagtctttttggagccatccaccacccccatgacctggcacggccttcaactttgttctctgccgctggtgctgcacacccaactgggaccccttttgggccacctcctcatcacagcaacttcctcaaccctgctgcccacctagagccttttaatcggccgtctacattcacaggcctagcagcagttggtggcaatgccttcgggggacttggaaatccttccgttacacccaactcaatgttcggccacaaggatggccccagtgtgcagaactttagcaaccctcacgaaccctggaaccggctgcaccgaacgcctccgtcgttcccgacccctccgccctggctgaagccaggggagctggagcgcagcgcgtccgctgcagctcatgacagagatagagatgtagataaacgagactcatctgttagtaaagatgacaaagaaagggaaagcgtcgagaagagacactccagccacccttcaccagcacctgtcctcccggtgaatgccctgggacatacccgcagctccactgaacagatccgggctcatctgaacactgaggctcgggagaaggacaaacccaaagagagggagagagaccactcggaatcccgcaaggacctggccgccgacgagcacaaggcgaaagagggccacctgcccgagaaggacgggcacggccacgaggggcgcgccgcgggcgaagaggccaagcagctggcccgggtgccgtctccctacgtgcggaccccggtggtggagagtgccaggcccaacagcacctcgagccgggaggccgagccgcgcaagggtgagccggcctacgagaaccccaagaagagctccgaggtcaaggtgaaggaggagcggaaggaagaccatgacctgcctccagaggccccgcagacccaccgggcctcggagccgccgcctcccaactcctcgtccagcgtgcacccggggcccctggcctcgatgcccatgacggtgggggtgacgggcattcaccccatgaacagcatcagcagcctggacaggactcgcatgatgacccccttcatgggcatcagccccctcccgggcggagagcgcttcccgtacccttctttccactgggaccccatccgggaccccttgagggatccttaccgagaacttgacattcaccggagagacccgctgggcagggacttcctgctaaggaacgacccgctccaccggctctcgactccccggctgtacgaagccgaccgctccttcagggaccgggagcctcacgactacagccaccaccaccaccaccaccaccacccgctgtctgtggaccctcggcgggagcacgagcggggaggccacctggacgagcgggagcgcttgcacatgctcagagaagactacgagcacacgcggctccactccgtgcaccccgcctccctcgacggacacctcccccaccccagcctcatcaccccgggactccccagcatgcactatccccgcatcagccccaccgcgggcaaccagaacggactcctcaacaagacccctccgacagcagcgctgagcgcacctcccccgctcatctccacgctggggggccgcccggtctctcccagaaggacgactcctctgtccgcagagataagggagaggcccccttcccacacgctgaaggatatcgaggcccgataagccgagaacaggagcaagaacgaggaagaagaaaccctaggcagacaccaggccaggcttgagagacagaactcctgcatggctcacacagactgggggggaaagccccaccccttccccttgtaaaaaatgtatagactcagtgcacattttgaaatgttttgtatattatatgttgagatttttcagatcttttagcccagtcatatgttctcacgtctcctactttttgtttctcgtataaaactttttgatttgaaccaaaacagtgaagatgacaacacacaccaattggatgataattgtagcgggggcggtgggggggagaagtccacgccatccatcatgcaaaattctttcagatgaggtgggaaggccgtgtacatagttatgtaaaaagagattgcttcatgagctaatggttcatatatgcaaaagggtaagatgaaagctttactttgtacaaatgtaaatagataaagtaacataatacattaatacttcttaaaatgtgctatttgcaaacttacttaatatcagtgaacacagtcggctaaagctgtgttcccatatattgttatagacagctaaacccttcaactatgcaatgaatgttcgggcttttcacaaaagcccgcctaactcaaaggagccttttcaaatccatttacagcatacttaaggtcatattttccctgaacaagcgcttacgtgatatgactctgttttccttgcttgttttttttcaaacggagaaacatcctgttttgcaaattggaccccaggctggaacttagcatctgaagttgccgcttgtgggctctgggggaaagtgtagccccggagaggtaactgaggacatgagcaaccagtgccagggagggtgggatttgccagatgccaaaatcaggggacgggtggtggtgtctgtcagacacacacaggtcgccagtgacttcacacacacctcatgtgagaaccatgccttttttagtgtgtcctatttcatacctgtacacacttcctcgttttgtaatgagatttacttacacccaaacagatcctgaaagaaagcttcaagttttctcagatgatggatatgttttcactgtattcaataactgacggatgtaaggtgcacgtttcctgatgtgacgcactgtattccagctggtgatcaagtctgggaacagccgtaacaggtcaaccttgtggagccatcgcgagttagagggtgaaagatggcagaaaaaaaagtcttgtgtgtgagtgtgttttttgagtttgcatcaatcttaatgtctcttcataatacttttataatacattaagcctcttgtctacatatttggagagaatatgactttactagcagagaaatacaatatatcttgtctactggactgtaaaatatatgtatgaaataaaattagttccatttggtcttctagtatattaaagtgctatctgacgttgttatcctgtttttgcaaaaaaaaaaaaaaaaaaaagttaactacagaccattgtttctaataagcagagagatctattttagtagtaaactgaaggtttagttgtgagcttcagattttgtgaactccagatgttgtgcggtgtttttttttttttttaagacaacaactaaaaaaaatgcaaggaatatgtacactggaactgtagtggtagctttcagtattgtaaagagattgttctatacggacctttttgctgtttatcctgtatgtaataaagtcctttctagatcctatgtgaaaagaaaagtgaagcaactgaatcttcagcatgttctcatcggcggagccttcttgtgtaatgtaaactgtgccatgttattaaaaaatgtgaactaagcttccagctgcttgtttgtgtgaggtgaccatcattaccttagggaagaagccatacctgtacaagaccgggctcttgaaaagaaacacctcgaacccagcccgtgtaagaacagaaggctcacctgcagtggctgaccaccctacccaactcggttagtgtctcaccaatttgttactataaacatttgcaccccaca

SEQ ID NO: 5185 - protein, 1235 aa, Homo sapiens; identical to SEQ ID NO: 5183

SEQ ID NO: 5186 - DNA, 6589 bp, Homo sapiens
cgctcgcagtttcgccctctcttccgctaatgattgcattattatgctcccctctctggggggtctcgcccctcttgggtcgctccggagccccggcctcccctggctgcatttcttaaaaatttgggagcctgggagtgagttttctccgaggcgtgtgtgagaggcggcgggggtgttttcctgcgcgaggggcgggtgaagttcattgcccccacttttcccgcgacctttttcggacccgattttggatcgagttgaggggggcgcgggcgttttcggggggcggggggcgcggcggagaatggccgcggggagggctccccggagcctcccagtctcttgatcaaagcattccgctattctgatttattgcttgcttggtgagttatttttttttcctctaaaggagacctgtgtgttcagccattactttgctcggcgctgctcccaggcatctccgaccctcggtgctgtggggagccccacacttgggctcctcgcctctcgccctcgctccccgtccctcctcccctctctccgccccttcccccttttctttctcctctctttcttcccctctctcccttctttcggccgccgtctcccccgcgccctcctcggggcggagggaagccgtgaagggggagggagggctcggtgtcaatttttttttgtgtggctgcggccgtagcctgtggcgggcaagcggggagaccccggcgcagcagaaccatggatggcccgacgcggggccatggactccgcaaaaagcggcggtcgcggtcgcagcgagaccgggagaggcgctcccggggcgggctgggggccggcgcggccggcggcggcggggctggccggacccgggcgctctcactcgcctcgtcgtcgggctccgacaaggaagacaatgggaagcccccgtcctccgccccgtcccggcccagacccccgcggaggaagcggagagagtccacctcggcagaagaggacatcattgatggatttgccatgaccagctttgtcacttttgaagcgctggagaaagatgtagcacttaagcctcaggaacgtgtggagaaacgccagacgcccctgaccaagaagaaacgagaagcacttaccaatggcttgtcctttcattcaaagaagagcagactcagccacccacaccactacagctcagatcgagaaaatgaccgcaatctctgccagcaccttgggaagagaaagaaaatgccgaaggcactcagacagctcaagccaggacagaacagctgcagggacagtgacagtgaaagtgccagtggagaatccaagggcttccaccggagcagctctcgggaaaggctcagtgatagttcagctccttccagcttgggaacaggctacttctgtgacagtgacagtgaccaggaagagaaggcatcagatgccagctctgaaaaactcttcaacactgttattgtaaacaaagatccggagttaggtgttggcacgctaccagaacatgacagccaggatgcagggccgattgtccccaagatatcgggtctagagagaagccaggagaagagccaggactgttgcaaagagccaatctttgagcctgtggtgcttaaagacccctgccctcaggtcgcacagccaataccccagccgcagacggagccccaactccgagctccttctccggaccctgacttggtgcagcgcacagaggccccacctcaacccccacctctgagtacacagccaccacagggccctcctgaggcccagctccagcctgccccgcagcctcaggtgcagaggccacccaggccacagtcccccacccagctgctccatcagaacctcccacctgtgcaggcccacccctctgctcagagcctctcccagccattgtcagcctacaacagcagtagcttaagcctcaacagtttaagcagcagcagaagcagcactccagcgaagactcagcccgccccacctcacatctcccaccacccctctgcctccccgttccccctctccctgcccaaccacagccccctgcacagcttcacacccaccctccagccccccgcacactcacatcaccccaatatgtttgcccctcccactgctctgcctcctccaccaccactgacatcaggaagtctgcaggtggccggacacccggccgggagcacttactcagagcaagacatcttgcgacaggaactgaacactcgttttttggcctctcagagtgctgaccgcggggcttccctgggccctccgccctacctgcggaccgagttccatcagcaccagcaccagcaccagcacacccaccagcacacgcaccagcacaccttcacgccgttcccccacgccatcccacccaccgccatcatgccgacgccagcacctcccatgtttgacaaataccctacaaaagttgacccattctaccggcacagtctcttccattcctatcctcctgcagtgtcgggcatcccccctatgatcccacccactggcccttttggttcactacaaggagcatttcagccgaagacatccaaccctatcgatgtcgctgctcggcctgggacagtcccacacactttactccaaaaggacccgaggttgacagatcctttcagacctatgttaaggaaaccagggaagtggtgtgctatgcatgttcacatcgcctggcagatttaccaccaccaacagaaagtcaagaaacagatgcagtcagacccacataagctggactttggactgaaacctgagttcctgagccgccctccaggccccagtctttttggagccatccaccacccccatgacctggcacggccttcaactttgttctctgccgctggtgctgcacacccaactgggaccccttttgggccacctcctcatcacagcaacttcctcaaccctgctgcccacctagagccttttaatcggccgtctacattcacaggcctagcagcagttggtggcaatgccttcgggggacttggaaatccttccgttacacccaactcaatgttcggccacaaggatggccccagtgtgcagaactttagcaaccctcacgaaccctggaaccggctgcaccgaacgcctccgtcgttcccgacccctccgccctggctgaagccaggggagctggagcgcagcgcgtccgctgcagctcatgacagagatagagatgtagataaacgagactcatctgttagtaaagatgacaaagaaagggaaagcgtcgagaagagacactccagccacccttcaccagcacctgtcctcccggtgaatgccctgggacatacccgcagctccactgaacagatccgggctcatctgaacactgaggctcgggagaaggacaaacccaaagagagggagagagaccactcggaatcccgcaaggacctggccgccgacgagcacaaggcgaaagagggccacctgcccgagaaggacgggcacggccacgaggggcgcgccgcgggcgaagaggccaagcagctggcccgggtgccgtctccctacgtgcggaccccggtggtggagagtgccaggcccaacagcacctcgagccgggaggccgagccgcgcaagggtgagccggcctacgagaaccccaagaagagctccgaggtcaaggtgaaggaggagcggaaggaagaccatgacctgcctccagaggccccgcagacccaccgggcctcggagccgccgcctcccaactcctcgtccagcgtgcacccggggcccctggcctcgatgcccatgacggtgggggtgacgggcattcaccccatgaacagcatcagcagcctggacaggactcgcatgatgacccccttcatgggcatcagccccctcccgggcggagagcgcttcccgtacccttctttccactgggaccccatccgggaccccttgagggatccttaccgagaacttgacattcaccggagagacccgctgggcagggacttcctgctaaggaacgacccgctccaccggctctcgactccccggctgtacgaagccgaccgctccttcagggaccgggagcctcacgactacagccaccaccaccaccaccaccaccacccgctgtctgtggaccctcggcgggagcacgagcggggaggccacctggacgagcgggagcgcttgcacatgctcagagaagactacgagcacacgcggctccactccgtgcaccccgcctccctcgacggacacctcccccaccccagcctcatcaccccgggactccccagcatgcactatccccgcatcagccccaccgcgggcaaccagaacggactcctcaacaagacccctccgacagcagcgctgagcgcacctcccccgctcatctccacgctggggggccgcccggtctctcccagaaggacgactcctctgtccgcagagataagggagaggcccccttcccacacgctgaaggatatcgaggcccgataagccgagaacaggagcaagaacgaggaagaagaaaccctaggcagacaccaggccaggcttgagagacagaactcctgcatggctcacacagactgggggggaaagccccaccccttccccttgtaaaaaatgtatagactcagtgcacattttgaaatgttttgtatattatatgttgagatttttcagatcttttagcccagtcatatgttctcacgtctcctactttttgtttctcgtataaaactttttgatttgaaccaaaacagtgaagatgacaacacacaccaattggatgataattgtagcgggggcggtgggggggagaagtccacgccatccatcatgcaaaattctttcagatgaggtgggaaggccgtgtacatagttatgtaaaaagagattgcttcatgagctaatggttcatatatgcaaaagggtaagatgaaagctttactttgtacaaatgtaaatagataaagtaacataatacattaatacttcttaaaatgtgctatttgcaaacttacttaatatcagtgaacacagtcggctaaagctgtgttcccatatattgttatagacagctaaacccttcaactatgcaatgaatgttcgggcttttcacaaaagcccgcctaactcaaaggagccttttcaaatccatttacagcatacttaaggtcatattttccctgaacaagcgcttacgtgatatgactctgttttccttgcttgttttttttcaaacggagaaacatcctgttttgcaaattggaccccaggctggaacttagcatctgaagttgccgcttgtgggctctgggggaaagtgtagccccggagaggtaactgaggacatgagcaaccagtgccagggagggtgggatttgccagatgccaaaatcaggggacgggtggtggtgtctgtcagacacacacaggtcgccagtgacttcacacacacctcatgtgagaaccatgccttttttagtgtgtcctatttcatacctgtacacacttcctcgttttgtaatgagatttacttacacccaaacagatcctgaaagaaagcttcaagttttctcagatgatggatatgttttcactgtattcaataactgacggatgtaaggtgcacgtttcctgatgtgacgcactgtattccagctggtgatcaagtctgggaacagccgtaacaggtcaaccttgtggagccatcgcgagttagagggtgaaagatggcagaaaaaaaagtcttgtgtgtgagtgtgttttttgagtttgcatcaatcttaatgtctcttcataatacttttataatacattaagcctcttgtctacatatttggagagaatatgactttactagcagagaaatacaatatatcttgtctactggactgtaaaatatatgtatgaaataaaattagttccatttggtcttctagtatattaaagtgctatctgacgttgttatcctgtttttgcaaaaaaaaaaaaaaaaaaaagttaactacagaccattgtttctaataagcagagagatctattttagtagtaaactgaaggtttagttgtgagcttcagattttgtgaactccagatgttgtgcggtgtttttttttttttttaagacaacaactaaaaaaaatgcaaggaatatgtacactggaactgtagtggtagctttcagtattgtaaagagattgttctatacggacctttttgctgtttatcctgtatgtaataaagtcctttctagatcctatgtgaaaagaaaagtgaagcaactgaatcttcagcatgttctcatcggcggagccttcttgtgtaatgtaaactgtgccatgttattaaaaaatgtgaactaagcttccagctgcttgtttgtgtgaggtgaccatcattaccttagggaagaagccatacctgtacaagaccgggctcttgaaaagaaacacctcgaacccagcccgtgtaagaacagaaggctcacctgcagtggctgaccaccctacccaactcggttagtgtctcaccaatttgttactataaacatttgcaccccaca

SEQ ID NO: 5187 - protein, 1259 aa, Homo sapiens; identical to SEQ ID NO: 683

SEQ ID NO: 5188 - DNA, 4394 bp, Homo sapiens
caggccttgcccaaagctctttgagatgtcaactaaaggaacatggcctcctcatctctaaatacacctggctaacagtaactatcaatggcacgcccggaagctatgctgtcattctgaatagatctgtttgacttatcacttaaaagtaagactcagataactgaaatgacctgaagagatggtatttcagaatatttgggtgaccacatttatctcttcagtgttttcacacattaaaacagaaattcagattttaattaacccagtgaatttgcctgaaaatatgctccctggaacacaactaagtcgtgcttatgataaagatgtggctggaaagggagatgtctaccgttttctgaataaaacataagattttgccatcgatgcaagttctggtgtaatcactgctaccaaaatttttaattatgaaacagatccaataaggtttcttctgattgttgatactgggaggctctatagacatgttttgaccattaatattattgatgttcccgaatctccaaactgtactgctgatcccaaattttcttcaggcacagttggagagaatgaagaaacaaaatcatatgggattgcaagagttgggtctgctggatttctttttaaagggagacatgagtaattttacaacatggagaatccatttgatgaggaggctgaagacaaataaagtagtacaccattgagacacagttatctggaccaaagaaaggagcaaactcttttggaacggatcctataagtgatgttgttagattaagaggtgaagatcccctggatttggatactggatatcatgccatttcctttggattctattaatgtgactgagaagaaatctgttggagaaattatagcaagagtaaaagcaacagatcgagatgaagatagcagtatcatttattcctttaagactcagcagaaaatgttttgtttggaccccttcacaggaacaatcactcttcttcagcctttgaatcttgacaacccaagtaactccaaaatctactctttggaaactgaggcaacagataatgggaataataccagcagctatacgtttacagtttttgtggagaatgtagatgatcctatttcctgtgatccaagtttttcaacaggagcagtcttccaaaattatagtaaactttaaaaagatacacgtggatctcaagaaggtcattttgacccgatttctactacaagcttggctgaaccagcataaactgctagagcagtaccaagatcgggatgtcttcctcttccatcatctgggctgtgggccttgggacataagagaagcgaggacaagaagtcactttctgtttaaagtagggcaactctgtgggtctctgtgaccaagaattaccaaagacattgacatgattttcaagctgctgatttgacacacacatattcaattcatttactgggtttaattatccagttgctataattaaccagaacaaatcactaaattagagaatctgcctacacatgttcagtttgaaacaaaggttcaaaataagcaagtcctagtcgcaccaaagttgttctataacatccttagaaagtcctgtaaagagacccttacaggactacccagtctagattgtgatacaatattcactggatttgatatccaagattcagctgcacagtaaacattaagccttttttcttttaaaaaaaagtattcgtagaatcacataacaggtaaagaaactatcagtagtctaaatgtgcatttatgttatttgattttgggattacacagaatcatagttggtagcattggaaggaggatgaggggcgatggttggaaaaaggcaagtagcatttgttgagcatttgagagatgtgcatttcttcctgtcttcacaggctgtgctctacttttttgtacatgattgtgaaaggagacaaaaagcttcaatatcctaatataaaagaataaaagtagaaatcatatcttagtggccattgactttgagcaattatatcccattctatacagtagcccaaagtttaaaggtaggaatatcaacctgaattatgatggctcttttaaatgttgatgttaatgggagtaagtatttgtaggggttttttgtttctctgaaacaaatatgaagaagatcattttaaggaaaatacagcatggtaatttacggtaccagcatgaagcaagaagtgaaagaaagacatttgaatttaaattattgttcatgattgtgtaattgtataggtgtttcagtgtctgttcctgaaaacattcctgcatctacttttatatatatgattctttcaagagatccagatctaggacaggaagttgaagtaagtttttttattttcatctatttatttttgcccaacttggatgagaaaaaaaacccaaaagagtgctcaatttttaatgcacaaaatattattttgccaggctgttaattaaagtattctttatgtgtatggtagtcactgaagtgagagaggagacttaaacctttgggactagtaacatagaattaaaatgctctggcttcaaaatgaaagaaacagatttcaaatggtctgaaagcattgtgaaaaactagagcttacatctattggcatttatctgatgacatttacgagcatgaatagaatgttctttcattgttcattgccttttattcatcccaatcaggcatattttctttattatacatacaatgtgagtaaaggatattttaggccttcatattaattctggttttagcaataattcataaagaggagagaataaattttaggtgacaaaatggttacagcttaagtgggggtaaagaagaaatttaagataattcatcactgtgtattttctcagaaatttttctggtatacatatgacctttaatctaattatatttgtaagaaaaaaattgttttcttgatgatgcaatatatcataaatctgattaatacactggaatactctgcccgaaatttagtgagtcaaattctccatagaagagactaacttttttttctgtttgttcatgcttgctataaagatacacataaatatcacttgggaatatggttgaaactaaagtttgggagaaagctctgtggagaatttagtctatatgtaatttttctggttacctgattataatgagatattgattaatccacttgattacattttttgctcatgtgaatttcagactgaggacagattacaacacaggaacaatgtaattcctggcatatcaggttcagctcatctatttgtgtgaatgtgttagtgtgtgtgttgggaggatagagttaggatattggggtacgtgggtgtgtgcatttaaactagaatatgtccatatgtgtgaaggatgggtgtctacaaaagtatccattataattatgtgcttacatgcatagtttccattaccaaaaattaatgtaatatctagattttattgtaaaagtcattaggaaagagaaaacaaacatttggaaaatgatgatgtttaacaaatctaaaaccataataatgggggaaaacaaagagattattttcataaggacatttaagaggattttagtctaatataagccaacttttgttgttcacttacaggcaaatgaaagatggttaatatgaccatcaaaatggctattatgcattctttggaaatggcattgggtatcagatcttccaggttttattgcagggtttttttgagctggaatctggatgtgagtgtttataatataatttctttatgaaatccttttcaaaatctttaatatttgtcttgataacaatggagagaaacatgccgatgcccataaaaataatagctttgtccaaggcaatattttatttttgccatgcagaaaatcaattcagagatggaatcaaacggcttcttccaaataattcagttcatgtgcctcctttagatatacttcctgagtattcaagagggaacagcttttttttaatattggaaaaatctgtaaatgcaacactagaaagtaaactaattatgaaattattgaaagctattcaccaaaaatgctctaatattttagtataaaatgcattggaaaaaaatacaactaaaacgtgaaagaatatatagattatttttgaagtctggaactgaaagtaagttcagattttaatttataggcagtcttcgcaaaatttattttggtttacatcttgccaaatcgttgcatcaaagctgtcagttcagaattcatgcttactcaataatgtattaaccatgtttgtgtgtgtatgtgtgtgttgcagtttttaatattaaattcttcaattaatgccactgcctactttgctttggattcgcataatg

SEQ ID NO: 5189 - protein, 118 aa, Homo sapiens
MPFPLDSINVTEKKSVGEIIARVKATDRDEDSSIIYSFKTQQKMFCLDPFTGTITLLQPLNLDNPSNSKIYSLETEATDNGNNTSSYTFTVFVENVDDPISCDPSFSTGAVFQNYSKL

SEQ ID NO: 5190 - DNA, 5991 bp, Homo sapiens
gaggaaaggagggggctggaagagagtaaagggctgttgttaaacagtttcttaccgtaagagggagttcagacctagatctttccagttaatcacacaacaaacttagctcatcgcaataaaaagcagctcagagccgactggctcttttaggcactgactccgaacaggattctttcacccaggcatctcctccagagggatccgccagcccgtccagcagcaccatgtgggtgaccaaactcctgccagccctgctgctgcagcatgtcctcctgcatctcctcctgctccccatcgccatcccctatgcagagggacaaaggaaaagaagaaatacaattcatgaattcaaaaaatcagcaaagactaccctaatcaaaatagatccagcactgaagataaaaaccaaaaaagtgaatactgcagaccaatgtgctaatagatgtactaggaataaaggacttccattcacttgcaaggcttttgtttttgataaagcaagaaaacaatgcctctggttccccttcaatagcatgtcaagtggagtgaaaaaagaatttggccatgaatttgacctctatgaaaacaaagactacattagaaactgcatcattggtaaaggacgcagctacaagggaacagtatctatcactaagagtggcatcaaatgtcagccctggagttccatgataccacacgaacacagctttttgccttcgagctatcggggtaaagacctacaggaaaactactgtcgaaatcctcgaggggaagaagggggaccctggtgtttcacaagcaatccagaggtacgctacgaagtctgtgacattcctcagtgttcagaagttgaatgcatgacctgcaatggggagagttatcgaggtctcatggatcatacagaatcaggcaagatttgtcagcgctgggatcatcagacaccacaccggcacaaattcttgcctgaaagatatcccgacaagggctttgatgataattattgccgcaatcccgatggccagccgaggccatggtgctatactcttgaccctcacacccgctgggagtactgtgcaattaaaacatgcgctgacaatactatgaatgacactgatgttcctttggaaacaactgaatgcatccaaggtcaaggagaaggctacaggggcactgtcaataccatttggaatggaattccatgtcagcgttgggattctcagtatcctcacgagcatgacatgactcctgaaaatttcaagtgcaaggacctacgagaaaattactgccgaaatccagatgggtctgaatcaccctggtgttttaccactgatccaaacatccgagttggctactgctcccaaattccaaactgtgatatgtcacatggacaagattgttatcgtgggaatggcaaaaattatatgggcaacttatcccaaacaagatctggactaacatgttcaatgtgggacaagaacatggaagacttacatcgtcatatcttctgggaaccagatgcaagtaagctgaatgagaattactgccgaaatccagatgatgatgctcatggaccctggtgctacacgggaaatccactcattccttgggattattgccctatttctcgttgtgaaggtgataccacacctacaatagtcaatttagaccatcccgtaatatcttgtgccaaaacgaaacaattgcgagttgtaaatgggattccaacacgaacaaacataggatggatggttagtttgagatacagaaataaacatatctgcggaggatcattgataaaggagagttgggttcttactgcacgacagtgtttcccttctcgagacttgaaagattatgaagcttggcttggaattcatgatgtccacggaagaggagatgagaaatgcaaacaggttctcaatgtttcccagctggtatatggccctgaaggatcagatctggttttaatgaagcttgccaggcctgctgtcctggatgattttgttagtacgattgatttacctaattatggatgcacaattcctgaaaagaccagttgcagtgtttatggctggggctacactggattgatcaactatgatggcctattacgagtggcacatctctatataatgggaaatgagaaatgcagccagcatcatcgagggaaggtgactctgaatgagtctgaaatatgtgctggggctgaaaagattggatcaggaccatgtgagggggattatggtggcccacttgtttgtgagcaacataaaatgagaatggttcttggtgtcattgttcctggtcgtggatgtgccattccaaatcgtcctggtatttttgtccgagtagcatattatgcaaaatggatacacaaaattattttaacatataaggtaccacagtcatagctgaagtaagtgtgtctgaagcacccaccaatacaactgtcttttacatgaagatttcagagaatgtggaatttaaaatgtcacttacaacaatcctaagacaactactggagagtcatgtttgttgaaattctcattaatgtttatgggtgttttctgttgttttgtttgtcagtgttattttgtcaatgttgaagtgaattaaggtacatgcaagtgtaataacatatctcctgaagatacttgaatggattaaaaaaacacacaggtatatttgctggatgataaagatttcatgggaaaaaaaatcaattaatctgtctaagctgctttctgatgttggtttcttaataatgagtaaaccacaaattaaatgttattttaacctcaccaaaacaatttataccttgtgtccctaaattgtagccctatattaaattatattacatttcatatgctatatgttatagttcattcatttctcttcaccatgtatcctgcaatactggtacacgaacacactttttacaaaaccacatacccatgtacacatgcctaggtacacatgtgcatgcactacagtttaaattatggtgtacctaatgtaacccctaaatattttagaagtatgtacctatagttttacctcaaaaaaaccagaaatctctaaagaccagtagaaatattaaaaaatgatgcaagatcaaaatgattagctaattctccatacataatctgcagatgatcttctttggttggcatttcaggtgtggccatcacccagagttaaataacacctaatctaggtgtttacatgtattcattatcctagttatttcatgtagtttctaattcttaaaggaaagagggtaatagttctatttgtgtaatttgtttcctccaaacttaaggccacttatttacacaagatatttgtagatctattttcctaaagcatttcttaagtgctcagatcagtatctaattgaagaagtttaaaagtgttttggtcattaaaaatgtacttaaataggttaaatctaagccttgctgctgtgattggcttctagctcactgcctttaaattttaaaaaatttaagaggaaaatttccaagtctccaaagttttataaatacccttcatcaagtcatgcattaaagtatatattggagaaaaaaataaaaatacttttctcaacctggaagattttagcctaataaagcttttttgaagtaaaagacaacttgtaaaaggaaagaaactagtttgtctcaactctgtattcatttattttttttttgaagtagagtggaatctgttgaatcagatattttatcaagatatgtttattttttcttatttcattttacaaagttcactcctaatgccatatgtaacagacatttaaattttgtgttctgtataacagccaaattatcatatttatcattgtatttgtcatgcttagctaaagatcatgtatttgttgagaaatagaataacaaaaagtaataggataggctttgaatttttgcagaaatcttcctgtacaaaacacctttaaaaataattttttgaatggtgtgaatccagtagtcccatttctctgacttagttttcttgagtgatttttatcaaggccaagtccccaaacaattccctaccagctctttagagtactgttcaatctggactaaaatggttttaagtttatggagagcttagtccacagaatatagggcggcgagtccagaaatgcttatacaatttttttttcataataagatatgtgctggcatcaagaaacttaaagtggaagcaaaaagacatccaactagttgctggtctctatcatcttatctgatggtatttctattttccttatataatacaccattttagtaagaactcctagaaatttcaagagcatattgccaaaatataaagtatatttcatagtttcttctggctgaaccagtgaaattttattattgcatattaatgatatttgtaaaacttttataaaaattgtcataattttaaatactcacattttaaaaatacttctttaatgactcttcctctaaatttcctggaaatacagataaagattagctagatacaagatacagctaagtatttagacattttgaggctagtatttttcattttattaaaggctaaaaacaataccaccaataaatcatcaaacaaaccgtacaaagtaattctctctttgggaggctcctttcgtgatagagggacatgggtggaattgacaatgaaacttagatgaacaaggtccatgttattttaggtggtagaacagggtagagtcatgtcattatttgctggtggaagacactatttaccaggtgttctttgctgaataaatcattaaacatttttaaaaatccaacaatccactttattttgtgtcattgacaaaaggatcttttaaatcagaaggtttcaatgcaatttttggtttggctgtttgaataatggttatgtactgttataattgtagacattttctcacgtctaccaggaattgaagtgtaaaactaaaatatttttcataatgcctctgccgtgcagaaggaatgataatccttttgtatacttctttaattttattgtaaaatgtgtaatgacttttacctatatgctgtgggcaggtcctcagtaaaatctattgagtcaatttctagtattaacaggcttttgcttgctatctaagtgtttcaaattatgggaagtgtgagacactggaaggcaagaaaattaacaataatggcatgtgatagcaaaattgtatttcacttattcctgtgaatatttcttgttggtaccaatggtactgtacaaagtgaatgttatagccacaacattctcttgaaaagaacactgtcaagaagtgggaaattgctgtcaggcatttcattgttgtttttaaacttttttaaaagaaatactggttttgcaatatagagatcatgtggtaaagaattttaataagatcttatactaaaaagccttaaatcaatttattgagattcaaaaaatactattataattaattacatcccatacatataggcaaactcatttaaaaaataaaactaattttggtaaaagtacatggcctttgtttttaaaatacataattttaaaataaatcacttgtcatgataaagtccaaaaagaagttatcattcaacattcaactaaggttggagctaagaatttactaatacaaaaaaagttaaaattttttggaccatatatatcttgacagtgtaacttttaagtaggttcatttccatttgcacagaaagtttctgtctttaggaaactgaaaatgaaatactgtggatgctatgactgtttgtcttgtatgtaaataggaaattaataagctgcctattgagtggtatagctgtatgcttacccaaaaaagggaacactgtggttatgacttgtattataaactttctgtagttaataaagttgttatttttataaccatgattatattattattattaataaaatattttatcaaaatgctta

SEQ ID NO: 5191 - protein, 728 aa, Homo sapiens; identical to SEQ ID NO: 685

SEQ ID NO: 5192 - DNA, 2866 bp, Homo sapiens
gaggaaaggagggggctggaagagagtaaagggctgttgttaaacagtttcttaccgtaagagggagttcagacctagatctttccagttaatcacacaacaaacttagctcatcgcaataaaaagcagctcagagccgactggctcttttaggcactgactccgaacaggattctttcacccaggcatctcctccagagggatccgccagcccgtccagcagcaccatgtgggtgaccaaactcctgccagccctgctgctgcagcatgtcctcctgcatctcctcctgctccccatcgccatcccctatgcagagggacaaaggaaaagaagaaatacaattcatgaattcaaaaaatcagcaaagactaccctaatcaaaatagatccagcactgaagataaaaaccaaaaaagtgaatactgcagaccaatgtgctaatagatgtactaggaataaaggacttccattcacttgcaaggcttttgtttttgataaagcaagaaaacaatgcctctggttccccttcaatagcatgtcaagtggagtgaaaaaagaatttggccatgaatttgacctctatgaaaacaaagactacattagaaactgcatcattggtaaaggacgcagctacaagggaacagtatctatcactaagagtggcatcaaatgtcagccctggagttccatgataccacacgaacacagctttttgccttcgagctatcggggtaaagacctacaggaaaactactgtcgaaatcctcgaggggaagaagggggaccctggtgtttcacaagcaatccagaggtacgctacgaagtctgtgacattcctcagtgttcagaagttgaatgcatgacctgcaatggggagagttatcgaggtctcatggatcatacagaatcaggcaagatttgtcagcgctgggatcatcagacaccacaccggcacaaattcttgcctgaaagatatcccgacaagggctttgatgataattattgccgcaatcccgatggccagccgaggccatggtgctatactcttgaccctcacacccgctgggagtactgtgcaattaaaacatgcgctgacaatactatgaatgacactgatgttcctttggaaacaactgaatgcatccaaggtcaaggagaaggctacaggggcactgtcaataccatttggaatggaattccatgtcagcgttgggattctcagtatcctcacgagcatgacatgactcctgaaaatttcaagtgcaaggacctacgagaaaattactgccgaaatccagatgggtctgaatcaccctggtgttttaccactgatccaaacatccgagttggctactgctcccaaattccaaactgtgatatgtcacatggacaagattgttatcgtgggaatggcaaaaattatatgggcaacttatcccaaacaagatctggactaacatgttcaatgtgggacaagaacatggaagacttacatcgtcatatcttctgggaaccagatgcaagtaagctgaatgagaattactgccgaaatccagatgatgatgctcatggaccctggtgctacacgggaaatccactcattccttgggattattgccctatttctcgttgtgaaggtgataccacacctacaatagtcaatttagaccatcccgtaatatcttgtgccaaaacgaaacaattgcgagttgtaaatgggattccaacacgaacaaacataggatggatggttagtttgagatacagaaataaacatatctgcggaggatcattgataaaggagagttgggttcttactgcacgacagtgtttcccttctcgagacttgaaagattatgaagcttggcttggaattcatgatgtccacggaagaggagatgagaaatgcaaacaggttctcaatgtttcccagctggtatatggccctgaaggatcagatctggttttaatgaagcttgccaggcctgctgtcctggatgattttgttagtacgattgatttacctaattatggatgcacaattcctgaaaagaccagttgcagtgtttatggctggggctacactggattgatcaactatgatggcctattacgagtggcacatctctatataatgggaaatgagaaatgcagccagcatcatcgagggaaggtgactctgaatgagtctgaaatatgtgctggggctgaaaagattggatcaggaccatgtgagggggattatggtggcccacttgtttgtgagcaacataaaatgagaatggttcttggtgtcattgttcctggtcgtggatgtgccattccaaatcgtcctggtatttttgtccgagtagcatattatgcaaaatggatacacaaaattattttaacatataaggtaccacagtcatagctgaagtaagtgtgtctgaagcacccaccaatacaactgtcttttacatgaagatttcagagaatgtggaatttaaaatgtcacttacaacaatcctaagacaactactggagagtcatgtttgttgaaattctcattaatgtttatgggtgttttctgttgttttgtttgtcagtgttattttgtcaatgttgaagtgaattaaggtacatgcaagtgtaataacatatctcctgaagatacttgaatggattaaaaaaacacacaggtatatttgctggatgataaagatttcatgggaaaaaaaatcaattaatctgtctaagctgctttctgatgttggtttcttaataatgagtaaaccacaaattaaatgttattttaacctcaccaaaacaatttataccttgtgtccctaaattgtagccctatattaaattatattacatttc

SEQ ID NO: 5193 - protein, 728 aa, Homo sapiens; identical to SEQ ID NO: 685

SEQ ID NO: 5194 - DNA, 1351 bp, Homo sapiens
gaggaaaggagggggctggaagagagtaaagggctgttgttaaacagtttcttaccgtaagagggagttcagacctagatctttccagttaatcacacaacaaacttagctcatcgcaataaaaagcagctcagagccgactggctcttttaggcactgactccgaacaggattctttcacccaggcatctcctccagagggatccgccagcccgtccagcagcaccatgtgggtgaccaaactcctgccagccctgctgctgcagcatgtcctcctgcatctcctcctgctccccatcgccatcccctatgcagagggacaaaggaaaagaagaaatacaattcatgaattcaaaaaatcagcaaagactaccctaatcaaaatagatccagcactgaagataaaaaccaaaaaagtgaatactgcagaccaatgtgctaatagatgtactaggaataaaggacttccattcacttgcaaggcttttgtttttgataaagcaagaaaacaatgcctctggttccccttcaatagcatgtcaagtggagtgaaaaaagaatttggccatgaatttgacctctatgaaaacaaagactacattagaaactgcatcattggtaaaggacgcagctacaagggaacagtatctatcactaagagtggcatcaaatgtcagccctggagttccatgataccacacgaacacagctttttgccttcgagctatcggggtaaagacctacaggaaaactactgtcgaaatcctcgaggggaagaagggggaccctggtgtttcacaagcaatccagaggtacgctacgaagtctgtgacattcctcagtgttcagaagttgaatgcatgacctgcaatggggagagttatcgaggtctcatggatcatacagaatcaggcaagatttgtcagcgctgggatcatcagacaccacaccggcacaaattcttgcctgaaagatatcccgacaagggctttgatgataattattgccgcaatcccgatggccagccgaggccatggtgctatactcttgaccctcacacccgctgggagtactgtgcaattaaaacatgcgagacataacatgggctctcaactgatggtgaacttcttctggtgagtgacagaggctgcagtgaagaataatgagtctaatagaagtttatcacagatgtctctaatctttatagctgatccctacctctctcgctgtctttgtacccagcctgcattctgtttcgatctgtcttttagcagtccatacaatcatttttctacatgctggcccttacctagcttttctgaatttacaataaaaactattttttaacgtg

SEQ ID NO: 5195 - protein, 290 aa, Homo sapiens; identical to SEQ ID NO: 687

SEQ ID NO: 5196 - DNA, 2079 bp, Homo sapiens
gaggaaaggagggggctggaagagagtaaagggctgttgttaaacagtttcttaccgtaagagggagttcagacctagatctttccagttaatcacacaacaaacttagctcatcgcaataaaaagcagctcagagccgactggctcttttaggcactgactccgaacaggattctttcacccaggcatctcctccagagggatccgccagcccgtccagcagcaccatgtgggtgaccaaactcctgccagccctgctgctgcagcatgtcctcctgcatctcctcctgctccccatcgccatcccctatgcagagggacaaaggaaaagaagaaatacaattcatgaattcaaaaaatcagcaaagactaccctaatcaaaatagatccagcactgaagataaaaaccaaaaaagtgaatactgcagaccaatgtgctaatagatgtactaggaataaaggacttccattcacttgcaaggcttttgtttttgataaagcaagaaaacaatgcctctggttccccttcaatagcatgtcaagtggagtgaaaaaagaatttggccatgaatttgacctctatgaaaacaaagactacattagaaactgcatcattggtaaaggacgcagctacaagggaacagtatctatcactaagagtggcatcaaatgtcagccctggagttccatgataccacacgaacacagctttttgccttcgagctatcggggtaaagacctacaggaaaactactgtcgaaatcctcgaggggaagaagggggaccctggtgtttcacaagcaatccagaggtacgctacgaagtctgtgacattcctcagtgttcagaaggtaaataaacctgaatgccatgtgggccattctattccccctatgtgtagaactgtaactcacattaaaggttaacagcaacgaatcaatcataacaaatatgttgttcgtgcaaatgcaactacaaataattatttaaacatttttatacaatgtttttaaaactgttggattatcaccagattaatgcaaaataacagagcgagttatcagtttgaatttcaacactgcctgagacatccctctggggaaagtgaaagagagggtttacttacctactgtcttgagctcacatacctcaaaatctactactgtgtggcacctgaaaggagttgaatgaagcttagcctttcattagcaatgttaattctattcaaccagcacctgcttccacagaaattctgtccaaactatcatgaagtggtgtgacaagggtatatggacccagaagataatacaatataagaagggatcactggaagcttgaccccatgcacattttggtgaaaatgtgcctagaatcaaatgtgacacgtaggctggaactgagtaccattcagaataggatctgaagagatcaaagcaatggagaccaccaaactgtcttgaaggcatgtctatggaccttaagtccatgtctatgttttcagctcttctcacagcataaaagggcattgtccttacttttgcagtggaaaactgaatggctgacaagatggaagagtaaccatttcagcattgtatgtggtttcatttttcttagttatctggctactgaatagccggatttttcagttctgtcagaaactctaaatttccaaaaatctaagtgaaacatggatgaaactctgttagaaaattgttaggattttggagtatttggggagggggactactggaatgctgtccaagttttatactaagatatcttacctgtttgttattaaccaaatatttttaaaaatatttcctccataaatattcatttaatattaggttgatatttatcacataaaaagtaaaggctactgttagctaattgtcacagagaaggatttgttttctgttgttagtgaatttgaaatccttgactttatgtgctacagccagttccatctctgtttgtaaattcttactttccattccatatcatattctgttccctataacctcttcattgttttcttttcttttaaaaataataaacttttctatgatcacgttttg

SEQ ID NO: 5197 - protein, 210 aa, Homo sapiens; identical to SEQ ID NO: 693

SEQ ID NO: 5198 - DNA, 714 bp, Homo sapiens
gaaatctagtatattgtcaagtaaaatcactttcttgtagatgatccttaggattttttttatatatgagccttaaaaacatttctccaatgtttatttttttaaaacattttgtatttaatagagggacaaaggaaaagaagaaatacaattcatgaattcaaaaaatcagcaaagactaccctaatcaaaatagatccagcactgaagataaaaaccaaaaaagtgaatactgcagaccaatgtgctaatagatgtactaggaataaaggacttccattcacttgcaaggcttttgtttttgataaagcaagaaaacaatgcctctggttccccttcaatagcatgtcaagtggagtgaaaaaagaatttggccatgaatttgacctctatgaaaacaaagactacattagaaactgcatcattggtaaaggacgcagctacaagggaacagtatctatcactaagagtggcatcaaatgtcagccctggagttccatgataccacacgaacacaggtaagaacagtatgaagaaaagagatgaagcctctgtcttttttacatgttaacagtctcatattagtccttcagaataattctacaatcctaaaataacttagccaacttgctgaattgtattacggcaaggtttatatgaattcatgactgatatttagcaaatgattaattaatatgttaataaaatgtagcc

SEQ ID NO: 5199 - protein, 58 aa, Homo sapiens
MSSGVKKEFGHEFDLYENKDYIRNCIIGKGRSYKGTVSITKSGIKCQPWSSMIPHEHR

SEQ ID NO: 5200 - DNA, 924 bp, Homo sapiens
tagggtcttaggagagttggacacattcaaaacacaatatgtgattaagaagattaaagattaatacttattgatggattactatgtgccaaacttccaaccgaatcctgacaacaattccttaagatgtggaaactgcagttcactgaggttgacatttccgggttcatacaacaaggatggggatgaatgactgtaactgcagacctttacaaggacaatgagagctcctaatggaggcgctaaggcagctggcccagaggcagtaaagttggcaacctcattggctccccttgagagtccggcccaccacaaccattcttttagatatgcatggtcacttagatctgctttcatggttcctatcctgtttggcaccatgacaagaaaacaaacaagttatggacttagaagatatagacttatggtggagacagagacatggaataataacccaaagtagctcatcttcctagaggcctattcttcctcttcctccagccattgcctgtttgacatgagatgtgtccttcgataagtcagtagtggattacctcaaggcaggggacaactaaggctccaatagaaaggatgaattgcaagaatgggacagagatcatattctcaaaaggactttttaataaaaactcactgaaagcaattaatttttcttgatgatttaattttctgcctggacaaagctgctgttttaactgtgtttacaaagcttctactgctggccatggcttctggaattggtctctgatggctggatctttcacactggagccctggttttgattatccaagagatgaaagaatcactccctaaaccttccgttgtccactacagagcttctcttccaccccaccatgctgcctttcctgtcaggatgacaacagcaaagacagcaataataaaag

SEQ ID NO: 5201 - protein, 80 aa, Homo sapiens
MRAPNGGAKAAGPEAVKLATSLAPLESPAHHNHSFRYAWSLRSAFMVPILFGTMTRKQTSYGLRRYRLMVETETWNNNPK

SEQ ID NO: 5202 - DNA, 486 bp, Homo sapiens
agggtcttaggagagttggacacattcaaaacacaatatgtgattaagaagattaaagattaatacttattgatggattactatgtgccaaacttccaaccgaatcctgacaacaattccttaagatgtggaaactgcagttcactgaggttgacatttccgggttcatacaacaaggatgggcatgattgtgaggcctccccacccacatggaatgagttccccagctatcccccagtggcttggagattcccatttcaagagtgtagagttctacccagaaggtggctgcgtggacagtgactacattctcagctccatgcctatttggatggtctgaggccttcactcctcacccttcctggatgtggttgcgccagaggggatgatttagtgagcagatggtaccaggaaaaccaagggtattgcatccagctgtgtgtacacagattggtgaattcaagcctctgatctaggatctgaaat

SEQ ID NO: 5203 - protein, 76 aa, Homo sapiens
MDYYVPNFQPNPDNNSLRCGNCSSLRLTFPGSYNKDGHDCEASPPTWNEFPSYPPVAWRFPFQECRVLPRRWLRGQ

SEQ ID NO: 5204 - DNA, 908 bp, Homo sapiens
ggtcttaggagagttggacacattcaaaacacaatatgtgattaagaagattaaagattaatacttattgatggattactatgtgccaaacttccaaccgaatcctgacaacaattccttaagatgtggaaactgcagttcactgaggttgacatttccgggttcatacaacaaggatgggtttggcaccatgacaagaaaacaaacaagttatggacttagaagatatagacttatggtggagacagagacatggaataataacccaaagtagctcatcttcctagagctgatgccatcgaaacctgatcatctatcaatcttagttttagtggtgaagactcatggtggattttgcctagcagttcataatttgtctcaagggtgcctgagtgtctcagcgtctccagaaagcccttcgtggttgtttctggaatgagtcccagtgctcacctcacacaggcctattcttcctcttcctccagccattgcctgtttgacatgagatgtgtccttcgataagtcagtagtggattacctcaaggcaggggacaactaaggctccaatagaaaggatgaattgcaagaatgggacagagatcatattctcaaaaggactttttaataaaaactcactgaaagcaattaatttttcttgatgatttaattttctgcctggacaaagctgctgttttaactgtgtttacaaagcttctactgctggccatggcttctggaattggtctctgatggctggatctttcacactggagccctggttttgattatccaagagatgaaagaatcactccctaaaccttccgttgtccactacagagcttctcttccaccccaccatgctgcctttcctgtcaggatgacaacagcaaagacagcaataataaaag

SEQ ID NO: 5205 - protein, 67 aa, Homo sapiens
MDYYVPNFQPNPDNNSLRCGNCSSLRLTFPGSYNKDGFGTMTRKQTSYGLRRYRLMVETETWNNNPK

SEQ ID NO: 5206 - DNA, 669 bp, Homo sapiens
ctatgtgaagattgtgcctgcttcctctttgccttccaccatgattggaagtttcctgagaccttcccagcagcagaagcctatacagtctgcagaactgtgagcagattaaacctcttttcttaataaattacccagtctcagagttccccagctatcccccagtggcttggagattcccatttcaagagtgtagagttctacccagaaggtggctgcgtggacagtgactacattctcagctccatgcctatttgggtgaggccctgtgatgaatggtcatcagtggaatatgagcagaagtgttatgtgtcagaagaagacatgccttctccatcctttcttttcccctaccctctggtttgtgttggtttccagggtgtccttgggaggggtttgggccataatttcaaaagacacagtgctaaataccacaatcccaaatgttgaaatctggaaagatcaaaatctctaaaggaaggcacacatttaagatggcaaagccactgtgcctttgtccctaaataagagtggggcaactgtgcctttcaccactctgctgttaaccagttatacacacaatgaactgttacgttagcaaaaaaaatgtttcttgtaaaggccactgaaattgtggagtttgtctgttacagtaactagcagtactct

SEQ ID NO: 5207 - protein, 67 aa, Homo sapiens
MPIWVRPCDEWSSVEYEQKCYVSEEDMPSPSFLFPYPLVCVGFQGVLGRGLGHNFKRHSAKYHNPKC

SEQ ID NO: 5208 - DNA, 814 bp, Homo sapiens
ctatgtgaagattgtgcctgcttcctctttgccttccaccatgattggaagtttcctgagaccttcccagcagcagaagcctatacagtctgcagaactagttccccagctatcccccagtggcttggagattcccatttcaagagtgtagagttctacccagaaggtggctgcgtggacagtgactacattctcagctccatgcctatttgggtgaggccctgtgatgaatggtcatcagtggaatatgagcagaagtgttatgtgtcagaagaagacatgccttctccatcctttcttttcccctaccctctggtttgtgttggtttccagggtgtccttgggaggggtttgggccataatttcaaaagacacagtgctaaataccacaatcccaaatgttgaaatctggaaagatcaaaatctctaaaggaaggcacacatttaagatggcaaagccactgtgcctttgtccctaaataagagtggggcaactgtgcctttcaccactctgctgttaaccagttatacacacaatgaactgttacgttagcaaaaaaaatgtttcttgtaaaggccactgaaattgtggagtttgtctgttacagtaactagcagtactctaactaaaatgagcgtctttcataatagagatgagaattcagatttctactattctctgacaaatctccataacacttatttaccaaaccactgattttaattgtgctgaacggaaatgatcatggagagtcacttttccaatgacctctctgtcccttggttttccattgtttaaggtgaatgataattt

SEQ ID NO: 5209 - protein, 36 aa, Homo sapiens
MIGSFLRPSQQQKPIQSAELVPQLSPSGLEIPISRV

SEQ ID NO: 5210 - DNA, 622 bp, Homo sapiens
aagattgtgcctgcttcctctttgccttccaccatgattggaagtttcctgagaccttcccagcagcagaagcctatacagtctgcagaactagttccccagctatcccccagtggcttggagattcccatttcaagagtgtagagttctacccagaaggtggctgcgtggacagtgactacattctcagctccatgcctatttggatggtctgaggccttcactcctcacccttcctggatgtggttgcgccagaggtgagtaggagaaagaatgcttttgagaaaggtaccttgagaatttatcttgacaactcctcctcatcctaggctttgcactttctctgtccctgaaacttcaaggtgttgttcctcttaatatttcaagtctaaaccctgaatccaagacccgaaaggaaaggaagttttgcccacaaagcagctcccacagcaaatgatgaatgctccaagtgctttctggggggaaaaaaaacgctgaaacagagtttagtcactagagtaaatccccacagaaaaagaaataaatctctgtgacatctgctaatgtctgccatttccttaaacacctctacctgtccagtttccgtacctcttttcccctt

SEQ ID NO: 5211 - protein, 36 aa, Homo sapiens; identical to SEQ ID NO: 5209

SEQ ID NO: 5212 - DNA, 3177 bp, Homo sapiens
ctgggctgaggcggaggcaggggagttgcagcgcgcgaggctccgtgagtgtgtctcctgcgcgctgagaggcggggggaggcggaggaccaggaggaggaggaggaggaggaggagggggagaatgcccggagccgccgccgctgccgccgccgccgccgccgcgatgctcccggctcaggaggctgccaagctgtaccacaccaactatgtgcggaactcgcgggccatcggcgtgctgtgggccatcttcaccatctgctttgccatcgtcaacgtggtgtgcttcatccagccctactggataggcgacggcgtggacaccccgcaagccggctatttcgggctcttccactactgcatcggcaacggcttctcccgggagctgacctgcaggggcagcttcacggacttctccacgctgccctcgggcgccttcaaagccgcctccttctttatcggcctctccatgatgctcatcattgcctgcatcatttgctttaccctcttcttcttctgcaacacggccactgtgtacaagatatgtgcctggatgcagctcacctccgctgcctgccttgtgcttggctgtatgattttccctgatggctgggactcagatgaagtaaaacggatgtgtggagaaaagacagacaagtacactcttggggcttgctcagtccgctgggcatacatcctggctattattggaattttggatgccctgatcctctcatttctagcatttgtgcttggtaatcgacaagacagcttgatggcagaggaactgaaggcagaaaacaaagttctgctaagccaatattctctagaatgagcacaaaacaaatcgaataacagctaaacaaatcgaataacagctaaacgaatcgaataacagcttttgtacatcaacatcaagaaggaatacgcctgagagagatcagagtatatagatgaatatgaacaagaatggaacattcacttgtcaacgcactttctaaatctagatcagcagagatgggagtgattttctggaaagagatgtgatcatggattaaacaccagctcattggaaactcattggatgagatcagaaaacgttcatgaaaaatcatattcaggaaataaggaagaggaatataaatgctctagagttaacatgtaaaatatatacgtactgaggtttgtaaactgtcctttttaaatcaaactgaaaacaaaaagctttaacctttcaacagaatttttaaaaaggcagttagttctaaattattcctatctcaatagccaagaggctgatcaagcgtcatttattgaggaagcatcttagaaaatgcctctgaatgttttcataggagccgtgacctttggttcttcatctctaccattcatttacttcactgtgtaattagttacaaccactcagttattaagagacgtaacgcttcaaactttttaccaagtctgtgttctgtttaatctgtccatacaagttattactgagaaagtgtttatgccatatactattactccatcaagctgtatattacaggaagtacatctttacatcataggttcccaagcaacatagatttccctatctttcaggaaacagcatcaaggaactctgaaaaatatagaaaaagttcattttcaccttggaagctcacgtgtaatattataggctactatcaaataaacactttttttctaattctccctagtatatgcataggaatttaatatactttataaataagtatctaaaatgtctcctacttttttcctatttctttgccatacatgttatcagaaatccatgtcttctatttcccttactgatgggcactcatttttatttttttaaaaatcattccattaaacatatttctaaataatagtaagtggtactaacaaaataaataataatttaatagccttagaaataaatgactgtatacttatacaggttgaaaaaaactcggtaggaataagttacctttttgtttactaatgttggtttcaaaaatactcagattcattttagttggctgacatctggaagtagttaacaactaaccagtggacttcaacaatcatttgctcccaggcttcccccatcatcaccctcaccacatatcctgctaatatccaacaacaaacaaatatttaatattgaaatagcccattgcctgagaatgaacacaagctaaaatacatgcaagggtacttaatggaagccaaaccatgttctatacctaaggagaaaacatggacatgtagaatgcttttattcatgtattcaaaatcagaacaaatcagtgtatatcactagaacatcagatggaggataacacaagaagtgatacagatcagggttcacttctcttaccctctctctgttaggaccacattcctattttagccaaatgtttctggtacgggccatcttttcaccataaatggcattatgtttcaaatggctaaaagcatattatgggtatgctcaaaggagtaaaacccaattcacagagatgtggcttttctaaagaaccaaattaagggaatacttagtatctacaactaaagtattagtcattctgaggattatttgttgctttaagtattagctccctactacatccataacaccctacttactaaatttaattacacacaacttttcaagaattcgtattttatttgaagggaggtacctgtctactttatctacaataaaaacaaagggtattggctttctctaatccatgcaaactacaaattccatcgggagtcctacatcactaacagtggtatgaacaaaactaagaaagtacttcctatccacatgtgaatgttttaaaaaagtttttgccataaaacctaagtgtaatttagcataccacagtgctctgaagatgggtcattgacgatgtaccatttgtatataggtaatacacatgtaaatcactaattgttaattaaatataagaagtaggtttttatctttttaaaaaaaaaacaaaaaaggtgactccctttctcattctgttctgttgtattgcgtccaaaagttgtgtgtaatttttttaaggtccaagaaatgtaaagaaatttgttggaatacctgaatttctgtaaaaaaataaaaataaaaataagattttgttacttaaa

SEQ ID NO: 5213 - protein, 236 aa, Homo sapiens; identical to SEQ ID NO: 695

SEQ ID NO: 5214 - DNA, 732 bp, Homo sapiens
gaatgcccggagccgccgccgctgccgccgccgccgccgccgcgatgctcccggctcaggaggctgccaagctgtaccacaccaactatgtgcggaactcgcgggccatcggcgtgctgtgggccatcttcaccatctgctttgccatcgtcaacgtggtgtgcttcatccagccctactggataggcgacggcgtggacaccccgcaagccggctatttcgggctcttccactactgcatcggcaacggcttctcccgggagctgacctgcaggggcagcttcacggacttctccacgctgccctcgggcgccttcaaagccgcctccttctttatcggcctctccatgatgctcatcattgcctgcatcatttgctttaccctcttcttcttctgcaacacggccactgtgtacaagatatgtgcctggatgcagctcacctccgctgcctgccttgtgcttggctgtatgattttccctgatggctgggactcagatgaagtaaaacggatgtgtggagaaaagacagacaagtacactcttggggcttgctcagtccgctgggcatacatcctggctattattggaattttggatgccctgatcctctcatttctagcatttgtgcttggtaatcgacaagacagcttgatggcagaggaactgaaggcagaaaacaaagatgatggaaatgcttaaggcaaactaaggtagtgtgagaccacaccat

SEQ ID NO: 5215 - protein, 232 aa, Homo sapiens
MPGAAAAAAAAAAAMLPAQEAAKLYHTNYVRNSRAIGVLWAIFTICFAIVNVVCFIQPYWIGDGVDTPQAGYFGLFHYCIGNGFSRELTCRGSFTDFSTLPSGAFKAASFFIGLSMMLIIACIICFTLFFFCNTATVYKICAWMQLTSAACLVLGCMIFPDGWDSDEVKRMCGEKTDKYTLGACSVRWAYILAIIGILDALILSFLAFVLGNRQDSLMAEELKAENKDDGNA

SEQ ID NO: 5216 - DNA, 1653 bp, Homo sapiens
cacaaattccctctgtctcctccagaatccagaaaagaataattacgatattttcaaaatggaaagttcccatgccaaagactttgccttcttcaccaaactatgatttcgtgatgttcttaaaggtagtgtacaccaggtttttacattcttattttgaatgtagttttagtgtttgtgtgatttgtttttcagcctggcctgcagactagcaacccaagacttatactgcccaatttgacagctcatttttattttagtttcaccatatacatgaattggacttacaattccagaaaaattaaaggctcaagaatggggcatgagtacacactgtgtgctaaggaaagaatatttggattgaattgaacccctgcagaacgtggactatttagagacctgaatttggccttgggtgaatacctgccttgggttggccaactagcagtcaacagcaatgagccaaaagagacaaaccaagtttcaaaatggcaaatcaaagacttcagaaaatagctcagctaaacgtgagaaaggaatggttgtcaatagcaaagagatttctgatgcagtcgggcaatcaaaatttgttctagagaaccttcggcattacacagtccatccaaatttggcccagtactataagcctttgaaggccactgccctgcagaaattcctggctcaaaacaggaaaaacaccagcttcatgttaaaagtaacacagtatgaccaggataagacgttactgattatgaccaacaacccacctccctgctcaatcacccagcaagacaaggagagtgcatcaaaatatttttccaaggagttactgctcaaggtcatggaaagtcatcatcagcacaaacccactgagaacctctggctgccccgcatgcctcagaaaaaaaagttaagatctaagctgaaaccaatcttccctttgatactgtcggatgatcccacatccaagcgagaacaatggtttaggttttccactgacaatgatttcaagagcgaagggaagtattcaaaagtctacgctttgaggacacagaagaaaatgtaccctcagctcacctttgctccagtccatgagagagatatgaggaaagatgcttccaagaagtcagcgagtgaaaggccaatttccaaagtgattcgggaaccactgacactcgcatcgctcttggaagacatgcccaccagaaccgcgcccggggagagcgccttccgcaacgggagggccccgcagtggattatcaaaaaggccacggtcatcgggtgaacacagacccctcagtcctcccgcctcgctctcttgagactgaggggtccgcagaagtcgccacccaaataaaaccacattcctgctgctgcgggcgtgggctcccgggtcgcaagccgggagggtcgagccgaagtctccggcgggccgcaagaggagaagggggcgtggctgcgtcccgggggccgagggcggccggggagggcgggccttggccccgagtgaaggcgcggcggcccaaccggcgtgagagcgcggggccggccttcctgcagcctcttccgctcgccggctgcggcgcctgggacggttgcggtgggtctgggcgctgggaagtcgtccaagatgattaaaaaattcgacaagaa

SEQ ID NO: 5217 - protein, 275 aa, Homo sapiens; identical to SEQ ID NO: 697

SEQ ID NO: 5218 - DNA, 2048 bp, Homo sapiens
gaatgcataagatacaaagcactgggaggggggcacaaatatgtttaaaatttacatttccacttttaagggactcacagcttaagaggcagacaagacccgcacataagaaaagtgaaaacagaactacaagacactatacaatgacatgcacaaaacccagtgactatagtctagagtttgggattgcattaatctagaaaatcttctctttaaaggaatgacctgagtagtaacataaagaaagaagattcagggctgggcatggtggctcatgcctgtaatcccagcactttgggaggctgaggtgggtggatcacaaggtcaagagatcgagaccatcctggccaacatggtgaaaccccgtctctactaaaaatacaaaaattagctgggcatggtggcaggcgcctgtagtcccagctactctggaggctgaggcaggaaaatcacttgaaccagggagacagaggttgcagtgaactgagactgtgccactgcactccagccttgtgacagtgtgaggctccgtcagaagaaagagaaggagaaggagaaggagaagattcaaatggctgaagagattggggacagcattttaaaatccagaaaagaataattacgatattttcaaaatggaaagttcccatgccaaagactttgccttcttcaccaaactatgatttcgtgatgttcttaaaggctcaagaatggggcatgagtacacactgtgtgctaaggaaagaatatttggattgaattgaacccctgcagaacgtggactatttagagacctgaatttggccttgggtgaatacctgccttgggttggccaactagcagtcaacagcaatgagccaaaagagacaaaccaagtttcaaaatggcaaatcaaagacttcagaaaatagctcagctaaacgtgagaaaggaatggttgtcaatagcaaagagatttctgatgcagtcgggcaatcaaaatttgttctagagaaccttcggcattacacagtccatccaaatttggcccagtactataagcctttgaaggccactgccctgcagaaattcctggctcaaaacaggaaaaacaccagcttcatgttaaaagtaacacagtatgaccaggataagacgttactgattatgaccaacaacccacctccctgctcaatcacccagcaagacaaggagagtgcatcaaaatatttttccaaggagttactgctcaaggtcatggaaagtcatcatcagcacaaacccactgagaacctctggctgccccgcatgcctcagaaaaaaaagttaagatctaagctgaaaccaatcttccctttgatactgtcggatgatcccacatccaagcgagaacaatggtttaggttttccactgacaatgatttcaagagcgaagggaagtattcaaaagtctacgctttgaggacacagaagaaaatgtaccctcagctcacctttgctccagtccatgagagagatatgaggaaagatgcttccaagaagtcagcgagtgaaaggccaatttccaaagtgattcgggaaccactgacactcgcatcgctcttggaagacatgcccaccagaaccgcgcccggggagagcgccttccgcaacgggagggccccgcagtggattatcaaaaaggccacggtcatcgggtgaacacagacccctcagtcctcccgcctcgctctcttgagactgaggggtccgcagaagtcgccacccaaataaaaccacattcctgctgctgcgggcgtgggctcccgggtcgcaagccgggagggtcgagccgaagtctccggcgggccgcaagaggagaagggggcgtggctgcgtcccgggggccgagggcggccggggagggcgggccttggccccgagtgaaggcgcggcggcccaaccggcgtgagagcgcggggccggccttcctgcagcctcttccgctcgccggctgcggcgcctgggacggttgcggtgggtctgggcgctgggaagtcgtccaagatgattaaaaaattcgacaagaa

SEQ ID NO: 5219 - protein, 275 aa, Homo sapiens; identical to SEQ ID NO: 697

SEQ ID NO: 5220 - DNA, 1372 bp, Homo sapiens
cacaaattccctctgtctcctccagaatccagaaaagaataattacgatattttcaaaatggaaagttcccatgccaaagactttgccttcttcaccaaactatgatttcgtgatgttcttaaaggtagtgtacaccaggtttttacattcttattttgaatgtagttttagtgtttgtgtgatttgtttttcagcctggcctgcagactagcaacccaagacttatactgcccaatttgacagctcatttttattttagtttcaccatatacatgaattggacttacaattccagaaaaattaaaggctcaagaatggggcatgagtacacactgtgtgctaaggaaagaatatttggattgaattgaacccctgcagaacgtggactatttagagacctgaatttggccttgggtgaatacctgccttgggttggccaactagcagtcaacagcaatgagccaaaagagacaaaccaagtttcaaaatggcaaatcaaagacttcagaaaatagctcagctaaacgtgagaaaggaatggttgtcaatagcaaagagatttctgatgcagtcgggcaatcaaaatttgttctagagaaccttcggcattacacagtccatccaaatttggcccagtactataagcctttgaaggccactgccctgcagaaattcctggctcaaaacaggaaaaacaccagcttcatgttaaaagtaacacagtatgaccaggataagacgttactgattatgaccaacaacccacctccctgctcaatcacccagcaagacaaggagagtgcatcaaaatatttttccaaggagttactgctcaaggtcatggaaagtcatcatcagcacaaacccactgagaacctctggctgccccgcatgcctcagaaaaaaaagttaagatctaagctgaaaccaatcttccctttgatactgtcggatgatcccacatccaagcgagaacaatggtttaggttttccactgacaatgatttcaagagcgaagggaagtattcaaaagtctacgctttgaggacacagaagaaaatgtaccctcagctcacctttgctccagtccatgagagagatatgaggaaagatgcttccaagaagtcagcgagtgaaaggccaatttccaaagtgattcgggaaccactgacactcgcatcgctcttggaagacatgcccaccagaaccgcgcccggggagagcgccttccgcaacgggagggccccgcagtggattatcaaaaaggccacggtcatcgggtgaacacagacccctcagtcctcccgcctcgctctcttgagactgaggggtccgcagaagtcgccacccaaataaaaccacattcctgct

SEQ ID NO: 5221 - protein, 275 aa, Homo sapiens; identical to SEQ ID NO: 697

SEQ ID NO: 5222 - DNA, 1477 bp, Homo sapiens
atgtcggccgccgtggcgtgcctggactacttcgccgccgagtgcctggtgtccatgtccgcgggcgccgtggttcaccgccgcccgccggaccccgagggcgcgggtggagccgcaggctcggaggtgggtgcggcgcatccggagtccgctctgccgggtccggggccatcggggcccgcgtcggtcccccagctcccgcaggtccccgcccccagccccggcgcgggcggcgccgcgccccacctgctggctgcaagcgtctgggcggacttgcgcggcagctctggcgagggctcctgggagaactcgggggaagctccacgcgcctcgtccggcttctccgacccgatcccgtgctccgtccagaccccgtgctccgagctggctcccgcctccggcgccgcggcggtctgcgctcccgagagctcctccgatgcgcccgccgtcccaagcgcgcctgctgccccgggcgcaccagcagcctctggtgggttctctggaggggccctaggggcaggccccgcccccgccgcggatcaggcgccccggaggaggtctgtcacacctgctgccaagcgccaccaatgccccttcccgggctgcaccaaagcctattacaagtcgtcgcacctcaagtcccaccagcgcacccacacgggtgagcgccctttctcctgcgactggctcgactgcgacaagaagtttacgcgttccgacgagctggcccgccactacaggacgcacacgggcgagaagcgcttctcctgccccctctgccccaagcagttctcccggagcgaccacctgaccaagcatgctcgccgccacccaacctatcatccagatatgatcgagtaccggggacgtcgtcgaactccccgcatcgacccgccactcaccagcgaggtggaaagctccgcctccggctccggtcccggcccggcgcccagcttcaccacctgcctgtaggacagtcattgctgtcagtcttaccctcaaggatgatcccccaggccgttgtccctgctttctctctgcccatccttctttcccagagtcattacaccaaggcacagactggttcctctgctctgagggtgggtccaggcagacatgtggactctggggaggtactgggggccggaaaatagcgggaattcttgcaacgtgtatatcatcctaaaagtgggggttgcctcaagacagcccccaggaactgataagaagggatgaactcccgtactctccagagtactgaagattctcccctccctggaaccagggatgtgaaactggaattctcagatgcctgaggagctcccagtctcaaaggactctggtgtctcacccatccaccaggcggaccttggagagggtgtcaggggtggcagtcttggaaatgtccaggactgggatggtgagaggcctttggaaacagaaatgatttctatttctgtaaacagcaatgtttact

SEQ ID NO: 5223 - protein, 323 aa, Homo sapiens; identical to SEQ ID NO: 699

SEQ ID NO: 5224 - DNA, 247 bp, Homo sapiens
cgcacccacacgggtgagcgccctttctcctgcgactggctcgactgcgacaagaagtttacgcgttccgacgagctggcccgccactacaggacgcacacgggcgagaagcgcttctcctgccccctctgccccaagcagttctcccggagcgaccacctgaccaagcatgctcgccgccacccaaccagcgaggtggaaagctccgcctccggctccggtcccggcccggcgcccagcttcacca

SEQ ID NO: 5225 - protein, 81 aa, Homo sapiens
RTHTGERPFSCDWLDCDKKFTRSDELARHYRTHTGEKRFSCPLCPKQFSRSDHLTKHARRHPTSEVESSASGSGPGPAPSF

SEQ ID NO: 5226 - DNA, 561 bp, Homo sapiens
gttttaggcactggtgatagagcagtgaacaaagcagtttctgccctcatggagcttacatcctaatgagagagcctgataacaagcaaagttgatcacacttaacaatatgtgcaggcaggaccgaaaaaaggtgtggtgccttccagcccataaatcaaagttttctcttgtcactgccgtgtaagaagtgccttttgcctcctgccatgattctgaggcttccccagccatgtggaactgtatctgtaaatggacaatttgggtgtgctgaaatcaaatgactgaccaaggcccataactgtgatcacagagatgacgccttgctgtgttgcccagggtggtctctaattcctggcctttagcaattctcccgccttggcctcctaaagcactggggttacaggcatgaaccactgtgcccagcctgcatgatgtaatctccaaattgagggcaggagagagagtggtctcacaacggaagggcaccagccactgagaagtcctaaggccgtgtttgagttctggctcatcttttttgctaatttgctcttatgcata

SEQ ID NO: 5227 - protein, 41 aa, Homo sapiens
CNLQIEGRRESGLTTEGHQPLRSPKAVFEFWLIFFANLLLC

SEQ ID NO: 5228 - DNA, 4396 bp, Homo sapiens
gatggagtgtttggaaggtgccagaaggttccggcaatggacttttaccgctacgaggtgtcgcccgtggccctgcagcgcctgcgcgtggcgttgcagaagctttccggcacaggtttcacgtggcaggatgactatactcagtatgtgatggaccaggaacttgcagacctcccgaaaacctacctgaggcgtcctgaagcatccagcccagccaggccctcaaaacacagcgttggcagcgagaggaggtacagtcgggagggcggtgctgccctggccaacgccctccgacgccacctgcccttcctggaggccctgtcccaggccccagcctcagacgtgctcgccaggacccatacggcgcaggacagaccccccgctgagggtgatgaccgcttctccgagagcatcctgacctatgtggcccacacgtctgcgctgacctaccctcccgggtcccggacccagctccgcgaggacctcctgccgcggaccctcggccagctccagccagatgagctcagccctaaggtggacagtggtgtggacagacaccatctgatggcggccctcagtgcctatgctgcccagaggcccccagctccccccggggagggcagcctggagccacagtaccttctgcgtgcaccctcaagaatgcccaggcctttgctggcaccagccgccccccagaagtggccttcacctctgggagattccgaagacccctccagcacaggcgatggagcacggattcataccctcctgaaggacctgcagaggcagccggctgaggtgaggggcctgagtggcctggagctggacggcatggctgagctgatggctggcctgatgcaaggcgtggaccatggagtagctcgaggcagccctgggagagcggccctgggagagtctggagaacaggcggatggccccaaggccaccctccgtggagacagctttccagatgacggagtgcaggacgacgatgatagactttaccaagaggtccatcgtctgagtgccacactcgggggcctcctgcaggaccacgggtctcgactcttacctggagccctcccctttgcaaggcccctcgacatggagaggaagaagtccgagcaccctgagtcttccctgtcttcagaagaggagactgccggagtggagaacgtcaagagccagacgtattccaaagatctgctggggcagcagccgcattcggagcccggggccgctgcgtttggggagctccaaaaccagatgcctgggccctcgaaggaggagcagagccttccagcgggtgctcaggaggccctcagcgacggcctgcaattggaggtccagccttccgaggaagaggcgcggggctacatcgtgacagacagagaggttctcggaccagcagtgaccttcaaagtgagcgccaatgtccaaaacgtgaccactgaggatgtggagaaggccacaggaaaagcaaactcaagttcctgcctcctcaggcggagcaagaagactccaccaagttcatcgcgctcaccctggtctccctcgcctgcatcctgggcgtcctcctggcctctggcctcatctactgcctccgccatagctctcagcacaggctgaaggagaagctctcgggactagggggcgacccaggtgcagatgccactgccgcctaccaggagctgtgccgccagcgtatggccacgcggccaccagaccgacctgagggcccgcacacgtcacgcatcagcagcgtctcatcccagttcagcgacgggccgatccccagcccctccgcacgcagcagcgcctcatcctggtccgaggagcctgtgcagtccaacatggacatctccaccggccacatgatcctgtcctacatggaggaccacctgaagaacaagaaccggctggagaaggagtgggaagcgctgtgcgcctaccaggcggagcccaacagctcgttcgtggcccagagggaggagaacgtgcccaagaaccgctccctggccgtgctgacctatgaccactcccgggtcctgctgaaggcggagaacagccacagccactcagactacatcaacgctagccccatcatggatcacgacccgaggaaccccgcgtacatcgccacccagggaccgctgcccgccaccgtggctgacttttggcagatggtgtgggagagcggctgcgtggtgatcgtcatgctgacacccctcgcggagaacggcgtccggcagtgctaccactactggccggatgaaggctccaatctctaccacatctatgaggtgaacctggtctccgagcacatctggtgtgaggacttcctggtgaggagcttctatctgaagaacctgcagaccaacgagacgcgcaccgtgacgcagttccacttcctgagttggtatgaccgaggagtcccttcctcctcaaggtccctcctggacttccgcagaaaagtaaacaagtgctacaggggccgttcttgtccaataattgttcattgcagtgacggtgcaggccggagcggcacctacgtcctgatcgacatggttctcaacaagatggccaaaggtgctaaagagattgatatcgcagcgaccctggagcacttgagggaccagagacccggcatggtccagacgaaggagcagtttgagttcgcgctgacagccgtggctgaggaggtgaacgccatcctcaaggcccttccccagtgagcggcagcctcaggggcctcaggggagcccccaccccacggatgttgtcaggaatcatgatctgactttaattgtgtgtcttctattataactgcatagtaatagggcccttagctctcccgtagtcagcgcagtttagcagttaaaagtgtatttttgtttaatcaaacaataataaagagagatttgtggaaaaatccagttacgggtggaggggaatcggttcatcaattttcacttgcttaaaaaaaatactttttcttaaagcacccgttcaccttcttggttgaagttgtgttaacaatgcagtagccagcacgttcgaggcggtttccaggaagagtgtgcttgtcatctgccactttcgggagggtggatccactgtgcaggagtggccggggaagctggcagcactcagtgaggccgcccggcacacaaggcacgtttggcatttctctttgagagagtttatcattgggagaagccgcagggacagaactgaacgtcctgcagcttcggggcaagtgagacaatcacagctcctcgctgcgtctccatcaacactgcgccgggtaccatggacggccccgtcagccacacctgtcagcccaagcagagtgattcaggggctccccgggggcagacacctgtgcaccccatgagtagtgcccacttgaggctggcactcccctgacctcacctttgcaaagttacagatgcaccccaacattgagatgtgtttttaatgttaaaatattgatttctacgttatgaaaacagatgcccccgtgaatgcttacctgtgagataaccacaaccaggaagaacaaatctgggcattgagcaagctatgagggtccccgggagcacacgaaccctgccaggcccccgctggctcctccaggcacgtcccggacctgtggggccccagagaggggacatttccctcctgggagagaaggagatcagggcaactcggagagggctgcgagcatttccctcccgggagaggagatcagggcgacctgcacgcactgcgtagagcctggaagggaagtgagaaaccagccgaccggccctgcccctcttcccgggatcacttaatgaaccacgtgttttgacatcatgtaaacctaagcacgtagagatgattcggatttgacaaaataacatttgagtatccgattcgccatcaccccctaccccagaaataggacaattcacttcattgaccaagatgatcacatggaaggcggcacagaggcagctgtgtgggctgcagatttcctgtgtggggttcagcgtagaaaacgcacctccatcccgcccttcccacagcattcctccatcttagatagatggtactctccaaaggccctaccagagggaacacggcctactgagcggacagaatgatgccaaaatattgcttatgtctctacatggtattgtaatgaatatctgctttaatatagctatcatttcttttccaaaattacttctctctatctggaatttaattaatcgaaatgaatttatctgaatataggaagcatatgcctacttgtaatttctaactccttatgtttgaagagaaacctccggtgtgagatatacaaatatatttaattgtgtcatattaaacttctgatttcacattc

SEQ ID NO: 5229 - protein, 530 aa, Homo sapiens
MDFYRYEVSPVALQRLRVALQKLSGTGFTWQDDYTQYVMDQELADLPKTYLRRPEASSPARPSKHSVGSERRYSREGGAALANALRRHLPFLEALSQAPASDVLARTHTAQDRPPAEGDDRFSESILTYVAHTSALTYPPGSRTQLREDLLPRTLGQLQPDELSPKVDSGVDRHHLMAALSAYAAQRPPAPPGEGSLEPQYLLRAPSRMPRPLLAPAAPQKWPSPLGDSEDPSSTGDGARIHTLLKDLQRQPAEVRGLSGLELDGMAELMAGLMQGVDHGVARGSPGRAALGESGEQADGPKATLRGDSFPDDGVQDDDDRLYQEVHRLSATLGGLLQDHGSRLLPGALPFARPLDMERKKSEHPESSLSSEEETAGVENVKSQTYSKDLLGQQPHSEPGAAAFGELQNQMPGPSKEEQSLPAGAQEALSDGLQLEVQPSEEEARGYIVTDREVLGPAVTFKVSANVQNVTTEDVEKATGKANSSSCLLRRSKKTPPSSSRSPWSPSPASWASSWPLASSTASAIALSTG

SEQ ID NO: 5230 - DNA, 4899 bp, Homo sapiens
ccccttttatgcgtccgcagcccttttgggttctgagctgcggcaagctttaagcaagtgttttaattttctttagttcacttagctaagtcttcaacagattaactaacgttcgtaccttggtagaattatagccagattttgcaaagagcttgtgaaatgacagccagatggctgtggaatctgaatattcactgctgagaaccgaagccagctttcctactatgaagatgttctgtgtgagccacaccttgcccagggtggaagtgatgtttgtttcaggtccacagacgagggagaggacggagccagtggaccctcggtggcagtgtctggtgcagatgtgggcagggatggagtgtttggaaggtgccagaaggttccggcaatggacttttaccgctacgaggtgtcgcccgtggccctgcagcgcctgcgcgtggcgttgcagaagctttccggcacaggtttcacgtggcaggatgactatactcagtatgtgatggaccaggaacttgcagacctcccgaaaacctacctgaggcgtcctgaagcatccagcccagccaggccctcaaaacacagcgttggcagcgagaggaggtacagtcgggagggcggtgctgccctggccaacgccctccgacgccacctgcccttcctggaggccctgtcccaggccccagcctcagacgtgctcgccaggacccatacggcgcaggacagaccccccgctgagggtgatgaccgcttctccgagagcatcctgacctatgtggcccacacgtctgcgctgacctaccctcccgggtcccggacccagctccgcgaggacctcctgccgcggaccctcggccagctccagccagatgagctcagccctaaggtggacagtggtgtggacagacaccatctgatggcggccctcagtgcctatgctgcccagaggcccccagctccccccggggagggcagcctggagccacagtaccttctgcgtgcaccctcaagaatgcccaggcctttgctggcaccagccgccccccagaagtggccttcacctctgggagattccgaagacccctccagcacaggcgatggagcacggattcataccctcctgaaggacctgcagaggcagccggctgaggtgaggggcctgagtggcctggagctggacggcatggctgagctgatggctggcctgatgcaaggcgtggaccatggagtagctcgaggcagccctgggagagcggccctgggagagtctggagaacaggcggatggccccaaggccaccctccgtggagacagctttccagatgacggagtgcaggacgacgatgatagactttaccaagaggtccatcgtctgagtgccacactcgggggcctcctgcaggaccacgggtctcgactcttacctggagccctcccctttgcaaggcccctcgacatggagaggaagaagtccgagcaccctgagtcttccctgtcttcagaagaggagactgccggagtggagaacgtcaagagccagacgtattccaaagatctgctggggcagcagccgcattcggagcccggggccgctgcgtttggggagctccaaaaccagatgcctgggccctcgaaggaggagcagagccttccagcgggtgctcaggaggccctcagcgacggcctgcaattggaggtccagccttccgaggaagaggcgcggggctacatcgtgacagacagagaccccctgcgccccgaggaaggaaggcggctggtggaggacgtcgcccgcctcctgcaggtgcccagcagtgcgttcgctgacgtggaggttctcggaccagcagtgaccttcaaagtgagcgccaatgtccaaaacgtgaccactgaggatgtggagaaggccacagttgacaacaaagacaaactggaggaaacctctggactgaaaattcttcaaaccggagtcgggtcgaaaagcaaactcaagttcctgcctcctcaggcggagcaagaagactccaccaagttcatcgcgctcaccctggtctccctcgcctgcatcctgggcgtcctcctggcctctggcctcatctactgcctccgccatagctctcagcacaggctgaaggagaagctctcgggactagggggcgacccaggtgcagatgccactgccgcctaccaggagctgtgccgccagcgtatggccacgcggccaccagaccgacctgagggcccgcacacgtcacgcatcagcagcgtctcatcccagttcagcgacgggccgatccccagcccctccgcacgcagcagcgcctcatcctggtccgaggagcctgtgcagtccaacatggacatctccaccggccacatgatcctgtcctacatggaggaccacctgaagaacaagaaccggctggagaaggagtgggaagcgctgtgcgcctaccaggcggagcccaacagctcgttcgtggcccagagggaggagaacgtgcccaagaaccgctccctggccgtgctgacctatgaccactcccgggtcctgctgaaggcggagaacagccacagccactcagactacatcaacgctagccccatcatggatcacgacccgaggaaccccgcgtacatcgccacccagggaccgctgcccgccaccgtggctgacttttggcagatggtgtgggagagcggctgcgtggtgatcgtcatgctgacacccctcgcggagaacggcgtccggcagtgctaccactactggccggatgaaggctccaatctctaccacatctatgaggtgaacctggtctccgagcacatctggtgtgaggacttcctggtgaggagcttctatctgaagaacctgcagaccaacgagacgcgcaccgtgacgcagttccacttcctgagttggtatgaccgaggagtcccttcctcctcaaggtccctcctggacttccgcagaaaagtaaacaagtgctacaggggccgttcttgtccaataattgttcattgcagtgacggtgcaggccggagcggcacctacgtcctgatcgacatggttctcaacaagatggccaaaggtgctaaagagattgatatcgcagcgaccctggagcacttgagggaccagagacccggcatggtccagacgaaggagcagtttgagttcgcgctgacagccgtggctgaggaggtgaacgccatcctcaaggcccttccccagtgagcggcagcctcaggggcctcaggggagcccccaccccacggatgttgtcaggaatcatgatctgactttaattgtgtgtcttctattataactgcatagtaatagggcccttagctctcccgtagtcagcgcagtttagcagttaaaagtgtatttttgtttaatcaaacaataataaagagagatttgtggaaaaatccagttacgggtggaggggaatcggttcatcaattttcacttgcttaaaaaaaatactttttcttaaagcacccgttcaccttcttggttgaagttgtgttaacaatgcagtagccagcacgttcgaggcggtttccaggaagagtgtgcttgtcatctgccactttcgggagggtggatccactgtgcaggagtggccggggaagctggcagcactcagtgaggccgcccggcacacaaggcacgtttggcatttctctttgagagagtttatcattgggagaagccgcagggacagaactgaacgtcctgcagcttcggggcaagtgagacaatcacagctcctcgctgcgtctccatcaacactgcgccgggtaccatggacggccccgtcagccacacctgtcagcccaagcagagtgattcaggggctccccgggggcagacacctgtgcaccccatgagtagtgcccacttgaggctggcactcccctgacctcacctttgcaaagttacagatgcaccccaacattgagatgtgtttttaatgttaaaatattgatttctacgttatgaaaacagatgcccccgtgaatgcttacctgtgagataaccacaaccaggaagaacaaatctgggcattgagcaagctatgagggtccccgggagcacacgaaccctgccaggcccccgctggctcctccaggcacgtcccggacctgtggggccccagagaggggacatttccctcctgggagagaaggagatcagggcaactcggagagggctgcgagcatttccctcccgggagaggagatcagggcgacctgcacgcactgcgtagagcctggaagggaagtgagaaaccagccgaccggccctgcccctcttcccgggatcacttaatgaaccacgtgttttgacatcatgtaaacctaagcacgtagagatgattcggatttgacaaaataacatttgagtatccgattcgccatcaccccctaccccagaaataggacaattcacttcattgaccaagatgatcacatggaaggcggcacagaggcagctgtgtgggctgcagatttcctgtgtggggttcagcgtagaaaacgcacctccatcccgcccttcccacagcattcctccatcttagatagatggtactctccaaaggccctaccagagggaacacggcctactgagcggacagaatgatgccaaaatattgcttatgtctctacatggtattgtaatgaatatctgctttaatatagctatcatttcttttccaaaattacttctctctatctggaatttaattaatcgaaatgaatttatctgaatataggaagcatatgcctacttgtaatttctaactccttatgtttgaagagaaacctccggtgtgagatatacaaatatatttaattgtgtcatattaaacttctgatttcacattc

SEQ ID NO: 5231 - protein, 949 aa, Homo sapiens
MDFYRYEVSPVALQRLRVALQKLSGTGFTWQDDYTQYVMDQELADLPKTYLRRPEASSPARPSKHSVGSERRYSREGGAALANALRRHLPFLEALSQAPASDVLARTHTAQDRPPAEGDDRFSESILTYVAHTSALTYPPGSRTQLREDLLPRTLGQLQPDELSPKVDSGVDRHHLMAALSAYAAQRPPAPPGEGSLEPQYLLRAPSRMPRPLLAPAAPQKWPSPLGDSEDPSSTGDGARIHTLLKDLQRQPAEVRGLSGLELDGMAELMAGLMQGVDHGVARGSPGRAALGESGEQADGPKATLRGDSFPDDGVQDDDDRLYQEVHRLSATLGGLLQDHGSRLLPGALPFARPLDMERKKSEHPESSLSSEEETAGVENVKSQTYSKDLLGQQPHSEPGAAAFGELQNQMPGPSKEEQSLPAGAQEALSDGLQLEVQPSEEEARGYIVTDRDPLRPEEGRRLVEDVARLLQVPSSAFADVEVLGPAVTFKVSANVQNVTTEDVEKATVDNKDKLEETSGLKILQTGVGSKSKLKFLPPQAEQEDSTKFIALTLVSLACILGVLLASGLIYCLRHSSQHRLKEKLSGLGGDPGADATAAYQELCRQRMATRPPDRPEGPHTSRISSVSSQFSDGPIPSPSARSSASSWSEEPVQSNMDISTGHMILSYMEDHLKNKNRLEKEWEALCAYQAEPNSSFVAQREENVPKNRSLAVLTYDHSRVLLKAENSHSHSDYINASPIMDHDPRNPAYIATQGPLPATVADFWQMVWESGCVVIVMLTPLAENGVRQCYHYWPDEGSNLYHIYEVNLVSEHIWCEDFLVRSFYLKNLQTNETRTVTQFHFLSWYDRGVPSSSRSLLDFRRKVNKCYRGRSCPIIVHCSDGAGRSGTYVLIDMVLNKMAKGAKEIDIAATLEHLRDQRPGMVQTKEQFEFALTAVAEEVNAILKALPQ

SEQ ID NO: 5232 - DNA, 3086 bp, Homo sapiens
gatggagtgtttggaaggtgccagaaggttccggcaatggacttttaccgctacgaggtgtcgcccgtggccctgcagcgcctgcgcgtggcgttgcagaagctttccggcacaggtttcacgtggcaggatgactatactcagtatgtgatggaccaggaacttgcagacctcccgaaaacctacctgaggcgtcctgaagcatccagcccagccaggccctcaaaacacagcgttggcagcgagaggaggtacagtcgggagggcggtgctgccctggccaacgccctccgacgccacctgcccttcctggaggccctgtcccaggccccagcctcagacgtgctcgccaggacccatacggcgcaggacagaccccccgctgagggtgatgaccgcttctccgagagcatcctgacctatgtggcccacacgtctgcgctgacctaccctcccgggtcccggacccagctccgcgaggacctcctgccgcggaccctcggccagctccagccagatgagctcagccctaaggtggacagtggtgtggacagacaccatctgatggcggccctcagtgcctatgctgcccagaggcccccagctccccccggggagggcagcctggagccacagtaccttctgcgtgcaccctcaagaatgcccaggcctttgctggcaccagccgccccccagaagtggccttcacctctgggagattccgaagacccctccagcacaggcgatggagcacggattcataccctcctgaaggacctgcagaggcagccggctgaggtgaggggcctgagtggcctggagctggacggcatggctgagctgatggctggcctgatgcaaggcgtggaccatggagtagctcgaggcagccctgggagagcggccctgggagagtctggagaacaggcggatggccccaaggccaccctccgtggagacagctttccagatgacggagtgcaggacgacgatgatagactttaccaagaggtccatcgtctgagtgccacactcgggggcctcctgcaggaccacgggtctcgactcttacctggagccctcccctttgcaaggcccctcgacatggagaggaagaagtccgagcaccctgagtcttccctgtcttcagaagaggagactgccggagtggagaacgtcaagagccagacgtattccaaagatctgctggggcagcagccgcattcggagcccggggccgctgcgtttggggagctccaaaaccagatgcctgggccctcgaaggaggagcagagccttccagcgggtgctcaggaggccctcagcgacggcctgcaattggaggtccagccttccgaggaagaggcgcggggctacatcgtgacagacagagaccccctgcgccccgaggaaggaaggcggctggtggaggacgtcgcccgcctcctgcaggtgcccagcagtgcgttcgctgacgtggaggttctcggaccagcagtgaccttcaaagtgagcgccaatgtccaaaacgtgaccactgaggatgtggagaaggccacagttgacaacaaagacaaactggaggaaacctctggactgaaaattcttcaaaccggagtcgggtcgaaaagcaaactcaagttcctgcctcctcaggcggagcaagaagactccaccaagttcatcgcgctcaccctggtctccctcgcctgcatcctgggcgtcctcctggcctctggcctcatctactgcctccgccatagctctcagcacaggctgaaggagaagctctcgggactagggggcgacccaggtgcagatgccactgccgcctaccaggagctgtgccgccagcgtatggccacgcggccaccagaccgacctgagggcccgcacacgtcacgcatcagcagcgtctcatcccagttcagcgacgggccgatccccagcccctccgcacgcagcagcgcctcatcctggtccgaggagcctgtgcagtccaacatggacatctccaccggccacatgatcctgtcctacatggaggaccacctgaagaacaagaaccggctggagaaggagtgggaagcgctgtgcgcctaccaggcggagcccaacagctcgttcgtggcccagagggaggagaacgtgcccaagaaccgctccctggccgtgctgacctatgaccactcccgggtcctgctgaaggcggagaacagccacagccactcagactacatcaacgctagccccatcatggatcacgacccgaggaaccccgcgtacatcgccacccagggaccgctgcccgccaccgtggctgacttttggcagatggtgtgggagagcggctgcgtggtgatcgtcatgctgacacccctcgcggagaacggcgtccggcagtgctaccactactggccggatgaaggctccaatctctaccacatctatgaggtgaacctggtctccgagcacatctggtgtgaggacttcctggtgaggagcttctatctgaagaacctgcagaccaacgagacgcgcaccgtgacgcagttccacttcctgagttggtatgaccgaggagtcccttcctcctcaaggtccctcctggacttccgcagaaaagtaaacaagtgctacaggggccgttcttgtccaataattgttcattgcagtgacggtgcaggccggagcggcacctacgtcctgatcgacatggttctcaacaagatggccaaaggtgctaaagagattgatatcgcagcgaccctggagcacttgagggaccagagacccggcatggtccagacgaaggagcagtttgagttcgcgctgacagccgtggctgaggaggtgaacgccatcctcaaggcccttccccagtgagcggcagcctcaggggcctcaggggagcccccaccccacggatgttgtcaggaatcatgatctgactttaattgtgtgtcttctattataactgcatagtaatagggcccttagctctcccgtagtcagcgcagtttagcagttaaaagtgtatttttgtttaatcaaacaataataaagagagatttgtggaaaaatcc

SEQ ID NO: 5233 - protein, 949 aa, Homo sapiens; identical to SEQ ID NO: 5231

SEQ ID NO: 5234 - DNA, 638 bp, Homo sapiens
accatcaggaaaggaaggcaggaaggggacggtctgtctccatggcaccgcggccacacttctcagctctcagcactgtccccgcgacggaggagccgccccagcacagctctaagcgctgtccccccgacagaggagctgccccagtctcactctcagcgctgtccccgacaacggaggagccgtcccagtctcagctctcagcgctgtccccgacgacggaggagctgccccagtctcactctcagcgctgtccccccgacagaggagctaccccagtctcagctctcagcgctgtccccgacaacggaggagccgtcccagtctcagctctcagcgctgtcccccacgacggaggagccgccccactctcagctctcagcgctgtcccccacgacggaggagccaccccagtctcactctcagcgctgtcccccacgacggaggagccaccccagtctcactctcagcactgtcccccacgacggaggagccgccccagtctcagctctcagcgctgtccccgacgacggaggagccgccccagcacatccagcgacatggcaggggcaccatcctgggaggctccggacacaggagttacctggacccagcaggggaaacacagctgctgctaa

SEQ ID NO: 5235 - protein, 198 aa, Homo sapiens; identical to SEQ ID NO: 707

SEQ ID NO: 5236 - DNA, 711 bp, Homo sapiens
cctaagagggcaagcgggtggtactttctgtattttaatattgtgttagaatctgggacatctgattgctgaaatgagatgttagttggtacagggaggggtttccaggacccgcacgcccttgcggagtgcctgctggagggagccggtgtgtccaggacacccttgcggagtgtctgctggagggagccagtgtgtcagtgagatggctatgcccctgggctgctgtgtcccaggtttcctcagtctctaaccctttgttctcacaggggatggactcttgcttcttttcccaactccaccaagagggaccgtcccaggacgtccttccccgggcatctggccctacagctgcctgaggtctccatcaccgttggcgccatcagtctgctgtgcagccagctgttggtttggagagcctgaagaactgcagttcacgtctcatctaaaggagctgaaatgatattgcagctttttcttttggttgcgtgcagtgagaatctgggagctgaacctgttatctgcatggtcttcagaaatcaggcaaatgatgaagtcccaaaagaccagaaatatatttcagaagatgccagttactactttaaatgtcaaaccaacatttcagaaataactttcaatgattatttcctgccaagaaggtgaacgctggagaccttaatggtggaagatggagggcgtctttccttctgt

SEQ ID NO: 5237 - protein, 67 aa, Homo sapiens
MILQLFLLVACSENLGAEPVICMVFRNQANDEVPKDQKYISEDASYYFKCQTNISEITFNDYFLPRR

SEQ ID NO: 5238 - DNA, 3834 bp, Homo sapiens
gattgctgaaatgagatgttagttggtacagggaggggtttccaggacccgcacgcccttgcggagtgcctgctggagggagccggtgtgtccaggacacccttgcggagtgtctgctggagggagccagtgtgtcagtgagatggctatgcccctgggctgctgtgtcccaggtttcctcagtctctaaccctttgttctcacaggggatggactcttgcttcttttcccaactccaccaagagggaccgtcccaggacgtccttccccgggcatctggccctacagctgcctgaggtctccatcaccgttggcgccatcagtctgctgtgcagccagctgttggtttggagagcctgaagaactgcagttcacgtctcatctaaaggagctgaaatgatattgcagctttttcttttggttgcgtgcagtgagaatctgggagctgaacctgttatctgcatggtcttcagaaatcaggcaaactcggaaaatgccaacgccaaaaatgctgatgggtgacaaagtgtcacaggtgtgatgcattacaaatctcaggacttttgttcactggatttgaaaggtcaagcttcacaggaaaatgatgaagtcccaaaagaccagaaatatatttcagaagatgccagttactactttaaatgtcaaaccaacatttcagaaataactttcaatgattatttcctgccaagaaggtgaacgctggagaccttaatggtggaagatggagggcgtctttccttctgttaagctgacaacttggcttccatcttgtgaggacctcaccctacctggtggcagaggacgtctgacgccctcaatcattgccgttacacttcccagcctggtggtcagtctcctggggtctgtgtgttaacaaaccatcgactggacaatcgcagttttccttatgaaggcttactttaaaaaggctctggattttcagaagcgaagtcgctttcatccccgattcagacccatcctagtggaggaaaaatcctaccagaagaagggctgaccataggaacttgccatttccttgaccccatcatatctgaggaaaaaacaacagaaaaggtcaaaacccacgtgtacgcccaacgtcctgattgacgactttgcctgcagcttctgctttcctgaaattcgctgctgcctttagaacccttgtctgcagccagtggggagttcaggacttaggcggagctgccccaccctcctgcttggcaccctgcaaatacatgccctcccttccatcgctgcagacctcagagtgggcgtccggtctcctgtgcgggatgagaatacacaccctcccttccatcgctgcagaccttagagtggatgtccggtctcctgtatgggatgagaatacacgccttcccttccatcgctgcagagtggacgtctggtctcctgtgtgggataatacacgccctcctttcaatcgctgcagacctcagagtggacgtccggtctcctgtgtgggataatacacgccctcctttcaatcgctgcggacctcagagtggatgtccggtctcctgtatgggatgagatacactccttcccttccactgctgcagacctcagagtggacgtccggtctcctgtgtgggatgagatacactccttcccttccactgctgcagacctcagagtggacgtccggtctcctttgtgggatgagaatacactccttcccttccatcactgcagacctcagagtggacgtccggtctcctgtgcgggacaagaatacactccttcccttccatcactgcagacctcagagtggacgtccagtctcctgtgcgggatgagatacactccttcccttccatcgctgcagacctcagagtggacgtccagtctctctgtgcgggccaagtgtacacagttttgttccgtcacaacttccacgacaggccagtgtgaggtttttgagctggtgctgactgaaaactgtcagctgcccaaggacctgggagctctgctccccactcctggtgtgcggtcttgcgcctggcctccctgcctaggttacatgcagtggtcatcccggtcgctcccacacccgtgtgggctctgggatcccctcttccagccagcccaggggacatctggctgtctcaggacccagccatctgtaaaaattaggcaggtcccttcagtatgctcctggtcaacaaagaaaaacttcaattttgagaatggcatctgtattccgaagtgttctctcagatgtttgagttccactaagtagattttcttagtctgctgtatcaatgacacagagagacgtgcattaaaacctcaaccatgtggatctatttcttttcagttaattttgcttcatgtatcttgaagctctgttatcaggtgcatgcacatttgggattgttatgctttcctgatgaactgaccttctttcattatgcaaggggaagaagatgctgcatacaggatggaatatccaggggaagacgtctaaggagagatgcccagctgggagtcctatgcaaggggaagaagatgctgcatacaggatgggatatccaggggaagatttctaagaagagatgcccagctgggagtcctatgcaaggggaagaagatgctgcatacaggatgggatatccaggggaagatttctaaggagagacacccggctggaagtcaagatatgtcagttgtttccattataataaaaccactcatgttagatgagctgaactttcccttttccccagttcttacgatcaaaaagtggctgtcctaaatttcatcactcaatatccttgctagagtcttcctttgtcagccaggctggagtgcaatgtgcaatggcacaatcttggctcactgcaacctctgtctcctgggctcaagcaattcttctgcctcagcctcctgagtagctgggattacaggtatgcaccaccatgcccaactaatttttgtatttcagtagagacgaggtttcaccatgttggccaggctggtctcgatctcctgacctcaggtaatctgcccaccttggcctctcaaagtgctgggattacagacatgagccatcatgcctggacataagtgagttttatattgtattataagactatgatacagtaaaaccatgaaatccaaatttataatatcacactacataatacaactgtaacctcaccgccctatcctgggatgtgtgtcatttttatagccaattatggcccccagctttagttttcttttgcttattggagagtgtaattctcccttattctttttgctttctacagtcttgtgtacatcagttatctgtttttgtccttttgccagtgttcaaagtgttatttttcgtatttacttaagctcctgcagggagattagaatttcttcccctaagaagaaataagtaatagcggagacctgctgggcactggtggcgccaggcttggctctggggctgcccatccatcctcacagcatggcgactggagggtcttgccctgaggtcccgtgtgcggagcagggcttggcattcactcctaggcactgctgactcagtctgtcctggtggtgctgggaggccgaaacccgtcatgcatgtaaaccgcggggccccgtctggcatggtgcacctgtgctgggagtgcctatagagtaggaaaagtattcctggacctttaaaaaacttaggccaaaaaagtgttttggttgaatctttggccaaattggaactgcaaactctgtattatctccccttttgtgaaattctatggaaaattcgagcaaataaatatgcatttcccagtg

SEQ ID NO: 5239 - protein, 148 aa, Homo sapiens
MRYTPSLPSLQTSEWTSSLSVRAKCTQFCSVTTSTTGQCEVFELVLTENCQLPKDLGALLPTPGVRSCAWPPCLGYMQWSSRSLPHPCGLWDPLFQPAQGTSGCLRTQPSVKIRQVPSVCSWSTKKNFNFENGICIPKCSLRCLSSTK

SEQ ID NO: 5240 - DNA, 4022 bp, Homo sapiens
gattgctgaaatgagatgttagttggtacagggaggggtttccaggacccgcacgcccttgcggagtgcctgctggagggagccggtgtgtccaggacacccttgcggagtgtctgctggagggagccagtgtgtcagtgagatggctatgcccctgggctgctgtgtcccaggtttcctcagtctctaaccctttgttctcacaggggatggactcttgcttcttttcccaactccaccaagagggaccgtcccaggacgtccttccccgggcatctggccctacagctgcctgaggtctccatcaccgttggcgccatcagtctgctgtgcagccagctgttggtttggagagcctgaagaactgcagttcacgtctcatctaaaggagctgaaatgatattgcagctttttcttttggttgcgtgcagtgagaatctgggagctgaacctgttatctgcatggtcttcagaaatcaggcaaactcggaaaatgccaacgccaaaaatgctgatgggtgacaaagtgtcacaggtgtgatgcattacaaatctcaggacttttgttcactggatttgaaaggtcaagcttcacaggaaaatgatgaagtcccaaaagaccagaaatatatttcagaagatgccagttactactttaaatgtcaaaccaacatttcagaaataactttcaatgattatttcctgccaagaaggtgaacgctggagaccttaatggtggaagatggagggcgtctttccttctgttaagctgacaacttggcttccatcttgtgaggacctcaccctacctggtggcagaggacgtctgacgccctcaatcattgccgttacacttcccagcctggtggtcagtctcctggggtctgtgtgttaacaaaccatcgactggacaatcgcagttttccttatgaaggcttactttaaaaaggctctggattttcagaagcgaagtcgctttcatccccgattcagacccatcctagtggaggaaaaatcctaccagaagaagggctgaccataggaacttgccatttccttgaccccatcatatctgaggaaaaaacaacagaaaaggtcaaaacccacgtgtacgcccaacgtcctgattgacgactttgcctgcagcttctgctttcctgaaattcgctgctgcctttagaacccttgtctgcagccagtggggagttcaggacttaggcggagctgccccaccctcctgcttggcaccctgcaaatacatgccctcccttccatcgctgcagacctcagagtgggcgtccggtctcctgtgcgggatgagaatacacaccctcccttccatcgctgcagaccttagagtggatgtccggtctcctgtatgggatgagaatacacgccttcccttccatcgctgcagagtggacgtctggtctcctgtgtgggataatacacgccctcctttcaatcgctgcagacctcagagtggacgtccggtctcctgtgtgggataatacacgccctcctttcaatcgctgcggacctcagagtggatgtccggtctcctgtatgggatgagatacactccttcccttccactgctgcagacctcagagtggacgtccggtctcctgtgtgggatgagatacactccttcccttccactgctgcagacctcagagtggacgtccggtctcctttgtgggatgagaatacactccttcccttccatcactgcagacctcagagtggacgtccggtctcctgtgcgggacaagaatacactccttcccttccatcactgcagacctcagagtggacgtccagtctcctgtgcgggatgagatacactccttcccttccatcgctgcagacctcagagtggacgtccagtctctctgtgcgggccaagtgtacacagttttgttccgtcacaacttccacgacaggccagtgtgaggtttttgagctggtgctgactgaaaactgtcagctgcccaaggacctgggagctctgctccccactcctggtgtgcggtcttgcgcctggcctccctgcctaggttacatgcagtggtcatcccggtcgctcccacacccgtgtgggctctgggatcccctcttccagccagcccaggggacatctggctgtctcaggacccagccatctgtaaaaattaggcaggtcccttcagtatgctcctggtcaacaaagaaaaacttcaattttgagaatggcatctgtattccgaagtgttctctcagatgtttgagttccactaagtagattttcttagtctgctgtatcaatgacacagagagacgtgcattaaaacctcaaccatgtggatctatttcttttcagttaattttgcttcatgtatcttgaagctctgttatcaggtgcatgcacatttgggattgttatgctttcctgatgaactgaccttctttcattatgcaaggggaagaagatgctgcatacaggatggaatatccaggggaagacgtctaaggagagatgcccagctgggagtcctatgcaaggggaagaagatgctgcatacaggatgggatatccaggggaagatttctaagaagagatgcccagctgggagtcctatgcaaggggaagaagatgctgcatacaggatgggatatccaggggaagatttctaaggagagacacccggctggaagtcaagatatgtcagttgtttccattataataaaaccactcatgttagatgagctgaactttcccttttccccagttcttacgatcaaaaagtggctgtcctaaatttcatcactcaatatccttgctagagtcttcctttgtcagccaggctggagtgcaatgtgcaatggcacaatcttggctcactgcaacctctgtctcctgggctcaagcaattcttctgcctcagcctcctgagtagctgggattacagggcgctgggtgcccttccagggtgacctcacgggtgcccactgcagttcctgcttctccccacgggaactgagcgtgccgctgggaacacagcactcactgtgcacagttctgcacatggacttatgtggacaccacctgcttgcattcatcccctcctcctcatctctcccttgctgagaggcagcgtgcctgccgaacgcttcgtgctgtttctgcaatgctcacttgcggtcacatagttagacatccggatgatggatagatgaggagacacagtgcagactgggcgtggctgaccaccacacgtgcccctggagccatgggccgccggcttcatttccagggtggtgttacaatcaaaagaatgaacacatcaagagtgatttcaagtccaaccccttccctgtgttttctgcacagcttggaggccgtgcccaggtcctggatgttcctggtgacctttcctctttgccctttgctctcccacttggagctccatgctactccctcctgttgtactgaacctggccctcgttgccccttacgagggaagtccttgtcctctcatggcttccttcttgtccccttccctcagactcttcgtaataattatacaatactaattccaaatggaaactggaggcatggagcctatgccggcgtctccagcttctccagaggtaggaatggacactcaggtctccactgcatgctggtggatttgggagagtgtgatccatccaagccatgcgaaaatctgcacgactgagtcatgggacagtggagctttgtgatatcgcgtgcttttaaatccgaaaggacagtcatgatttaaggatttgaaagtcacacatttaacatctggattcacagtcataggtcttaaaccatgatagcttgtgcttctgaggtgcactgaattcatgcgtggctttcctagactttatcccatggaaccttcacgtgtcaggctatgtagagccctgaatctcaaagggagagcttggtcccagcaggtctcattattttgtattatattttaatagtttattttccctcttgcttcttc

SEQ ID NO: 5241 - protein, 168 aa, Homo sapiens [sequence omitted]

SEQ ID NO: 5242 - DNA, 4678 bp, Homo sapiens
ggcctccctgcctaggttacatgcagtggtcatcccggtcgctcccacacccgtgtgggctctgggatcccctcttccagccagcccaggggacatctggctgtctcaggacccagccatctgtaaaaattaggcaggtcccttcagtatgctcctggtcaacaaagaaaaacttcaattttgagaatggcatctgtattccgaagtgttctctcagatgtttgagttccactaagtaggggaagaagatgctgcatacaggatggaatatccaggggaagacgtctaaggagagatgcccagctgggagtcctatgcaaggggaagaagatgctgcatacaggatgggatatccaggggaagatttctaagaagagatgcccagctgggagtcctatgcaaggggaagaagatgctgcatacaggatgggatatccaggggaagatttctaaggagagacacccggctggaagtcaagatatgtcagttgtttccattataataaaaccactcatgttagatgagctgaactttcccttttccccagttcttacgatcaaaaagtggctgtcctaaatttcatcactcaatatccttgctagagtcttcctttgtcagccaggctggagtgcaatgtgcaatggcacaatcttggctcactgcaacctctgtctcctgggctcaagcaattcttctgcctcagcctcctgagtagctgggattacagttccaggtactgaatagaagctttacaaaagatcccggtaccggtaatagccctggggcgcccacttcacggggcctgcaggaagtcctgggaagggactgtttccacaagtggaacaagtgggccccccactgccctcgctgcctgcccctctctcctcattaaaccttcagagaacacaaaggagccgagagccccttttctctccatcttccaaagaagacttttcagtataaaaggtgccctaaatcctttgtgatgccgcccacaagcagcgtgcgctgacacaaagcaacgccgccggccactgctgcctgcagacaagaggccgactcttgtcctcgtctcgggtcccaagaacgggagtaagtttgtggactggcacgcagacttgtgtgcggggcagcccctggagacacaggcagctgcgatgtgagtgtgtcaggcagaggttcagctttacgtcagtgttaaagaaaaaaacctgtgaagaaactattcaagacatgcaaaaggaagtgtttcccacgcacccagggcaggatgctcggtgaggggtggtggagccgtagagcaaacatccttcgagagccaaatgtgcgtgacctttgacctttccccttcaggagtgtacagtgagggaatactcgggtaagcacagaaacacctgcaaaaacaactcacacattcgccagcagggagtcggtcaaaccaaccaggcccaggctgtggaatgttaggcggcggttaaaagtcacgagatacgcaccttcagatgggaaagatggacaccacctgtctcagcgggagaaagacagctgcagaagcttcacacaatttagcccgattcccacgaataaacagaagaaagggcagacaagtttgtaccgacggaggaaggcactgggaccccgcttcagtcgggcacgagtttcccccagagaggggaggaggcaggcagaggacttcactttctatgtaatctttgcctacagagtttgacgttttgtaactgtcctgtataatttgtcatctgaaagcctgaaaaaaatagccaattaaaaagctgccattggtgatgagaaagaacgaagctattgccacgggtggaggaggggcttctgcagatcggcccccggccctgcaccttctgcctcccatcagggctgagtctcctcaggcggctgaatatttcccacctcaggcaaatggacactaagctcctgagtcagacaaaacagtgactccctggagggctgtgtgcccagccccttctcccccttcccacctgctttgctcttaggaaagtcaccaaaggctggttggtgtggctcattctaggtttgactccttaggaatgtggcttttaccagcgtgctgtatccctcctgacaacacagccatctggtggagcgtggagttcattggaaatgcattttatttgcttgtagcatacatgtggctaaggctcagcacacacggagattcgcatatgtgtgcacacgccccacgcacacacccacacacgcatgtgcatcacatgaacgcgcgtgcacacacacactcctgcactcagtcctgctctattaacaggttcttgggctctgcagagctgacagaggccgtgttgggtgcggcaggacaaggctgggcgtgcaggcgcctcctccacagggcactgctcatgcgtcacagctgccagacggaggctccccaatggcgacgctctgacaggggtccgtgactctcctcagggagaggtggctgtttccaatgtcctccctggtgccctgtggctggcaggaccctgcccaccctctccctccccgtccaagctctgttttcatctgaatgcagcagccacgactaacacgccaagtgtgtcctccatgctccagagcctcagatctggtcagagcaagttcttactcagcatgcagatgtgaagtcaggctttattgaagtatttacacagctcattcccgccacgtggaggagtctgcgacattccacacacaatgacagttaaagacacctgctgaccactgggtcctgcttcccctgctcaccaggcatctgtcaggaaacagccggcccctctaccaggagaaaccagtcagctccgctgaacagtggcacatgtgcggttgaggggagattgtcccctgagcacacctgatgactgatgactgcccacacccaaccaccgaccatcaacaaccagtgcctggtaaccacctgacacgtccactcacgcccacttcctcagcgtcccctctgggtcacagctcagtgtcggcacctggccactgacccaacaccttcagttaccacaaatctttgtttcctcaaaaacctgagagtaggtgggggatgctcccttttgtcctttgaaagctgggcaaggctgggggtgggtctgtccaaaccctacaggggaggaacagccgaggggccgcactgaacctggggtctgcagcgtccacctgcctccctctcgctccacatgctcagccgtcctttcctgggcacctggcctgggccgtttactccccagtatccgtctgtgatggatcctctgcggcccccagaaatggtgggttgttctgtagatccgaccgcctcacctgtctccccaaaccaacctcgggttcattctcccagaagtccagggatgagcttgttgcagcagaggggtgtggccggcgtggcccagggtgtgcaggacagggtgcggacctttggggattgaggggtctctggacactgctgctttgctgtcctaacagcccctctgtccggcctcattttaccggggatatgggttttgcaaaccaaggtgacactgacaggatgtgtgagcttccctgtggctgcctcccggcacagctgtcccgacctttgacatcgcgccccagctggggtctgtgatgccaccaatgcacaggaacaagacattcatttttaagggaaaagtggagtcaaatgtgctcagaacaactgagtcccacagtcggggcacctgggccagggctgggcagcttgctgaggtccatcgagcgctgtgggggccagggcttggcacacacatggagactgtgccctgatatccccacccttctgcagctggctcagcaacgtccccagacaccctccccacatctgcaaaccacccttcgcctgaaggagcagccgctagggctgctgagcgccagctctggggaggagggcttgaaacagttttatatgttgttaaaataattcttatcctaagattatttttgttaaaaagagaataggtttccggttcccactcagctgtatcccgcaccccacgtaaccccatcaccaggggcccgcaggcctggccgcagctggcctggggctgagcgtcaggctctgcggctcccacagggcggcaggtgacctcctgaggcagagccagagctgctgagggtcccacggaacacctgtgtggagaggtcccctccttcatgaccttgctctcctgatctggttgtctcctcagcccgccttccgtggggaggcaaaacagccctgtggagttgggtggggcagggctcagccgggccgggtgggcgccccaagagagaggacgggctgccctcctgttgatttctcctggtcctaacgtcaggggggccctgactggcttccctctgtcctgcagatgagggggctacccttatgggacctgggaggccgccctgatgtgggacggatgtcacccggtggtcgcccaggctcgtgctgggccacacaactgcgtttccacatttcctccttggctcccctattctcttgggccgggcgcagtggctcacgccttaatcccagcactttgggaggccgaggcgggcccatcacgaggtcaggagatcgagaccatcctggctaacatggtgaaaccctgtctctactaaaaatac

SEQ ID NO: 5243 - protein, 128 aa, Homo sapiens
MWLLPACCIPPDNTAIWWSVEFIGNAFYLLVAYMWLRLSTHGDSHMCAHAPRTHPHTHVHHMNARAHTHSCTQSCSINRFLGSAELTEAVLGAAGQGWACRRLLHRALLMRHSCQTEAPQWRRSDRGP

SEQ ID NO: 5244 - DNA, 1344 bp, Homo sapiens
ggcttttaccagcgtgctgtatccctcctgacaacacagccatctggtggagcgtggagttcattggaaatgcattttatttgcttgtagcatacatgtggctaaggctcagcacacacggagattcgcatatgtgtgcacacgccccacgcacacacccacacacgcatgtgcatcacatgaacgcgcgtgcacacacacactcctgcactcagtcctgctctattaacaggttcttgggctctgcagagctgacagaggccgtgttgggtgcggcaggacaaggctgggcgtgcaggcgcctcctccacagggcactgctcatgcgtcacagctgccagacggaggctccccaatggcgacgctctgacaggggtccgtgactctcctcagggagaggtggctgtttccaatgtcctccctggtgccctgtggctggcaggaccctgcccaccctctccctccccgtccaagctctgttttcatctgaatgcagcagccacgactaacacgccaagtgtgtcctccatgctccagagcctcagatctggtcagagcaagttcttactcagcatgcagatgtgaagtcaggctttattgaagtatttacacagctcattcccgccacgtggaggagtctgcgacattccacacacaatgacagttaaagacacctgctgaccactgggtcctgcttcccctgctcaccaggcatctgtcaggaaacagccggcccctctaccaggagaaaccagtcagctccgctgaacagtggcacatgtgcggttgaggggagattgtcccctgagcacacctgatgactgatgactgcccacacccaaccaccgaccatcaacaaccagtgcctggtaaccacctgacacgtccactcacgcccacttcctcagcgtcccctctgggtcacagctcagtggcggcaggtgacctcctgaggcagagccagagctgctgagggtcccacggaacacctgtgtggagaggtcccctccttcatgaccttgctctcctgatctggttgtctcctcagcccgccttccgtggggaggcaaaacagccctgtggagttgggtggggcagggctcagccgggccgggtgggcgccccaagagagaggacgggctgccctcctgttgatttctcctggtcctaacgtcaggggggccctgactggcttccctctgtcctgcagatgagggggctacccttatgggacctgggaggccgccctgatgtgggacggatgtcacccggtggtcgcccaggctcgtgctgggccacacaactgcgtttccacatttcctccttggctcccctattctcttg

SEQ ID NO: 5245 - protein, 51 aa, Homo sapiens
MTDDCPHPTTDHQQPVPGNHLTRPLTPTSSASPLGHSSVAAGDLLRQSQSC

SEQ ID NO: 5246 - DNA, 3943 bp, Homo sapiens
gtgcattgagcgcgctccagctgccgggacggagggggcggcccccgcgctcgggcgctcggctacagctgcggggcccgaggtctccgcgcactcgctcccggcccatgctggaggcggcggaaccgcggggacctaggacggaggcggcgggcgctgggcggcccccggcacgctgagctcgggatgcggacgctgctgcctcccgcgctgctgacctgctggctgctcgcccccgtgaacagcattcacccagaatgccgatttcatctggaaatacaggaggaagaaacaaaatgtgcagagcttctgaggtctcaaacagaaaaacacaaagcctgcagtggcgtctgggacaacatcacgtgctggcggcctgccaatgtgggagagaccgtcacggtgccctgcccaaaagtcttcagcaatttttacagcaaagcaggaaacataagcaaaaactgtacgagtgacggatggtcagagacgttcccagatttcgtcgatgcctgtggctacagcgacccggaggatgagagcaagatcacgttttatattctggtgaaggccatttatacactgggctacagtgtctctctgatgtctcttgcaacaggaagcataattctgtgcctcttcaggaagctgcactgcaccaggaattacatccacctgaacctgttcctgtccttcatcctgagagccatctcagtgctggtcaaggacgacgttctctactccagctctggcacgttgcactgccctgaccagccatcctcctgggtgggctgcaagctgagcctggtcttcctgcagtactgcatcatggccaacttcttctggctgctggtggaggggctctacctccacaccctcctggtggccatgctcccccctagaaggtgcttcctggcctacctcctgatcggatggggcctccccaccgtctgcatcggtgcatggactgcggccaggctctacttagaagacaccggttgctgggatacaaacgaccacagtgtgccctggtgggtcatacgaataccgattttaatttccatcatcgtcaattttgtccttttcattagtattatacgaattttgctgcagaagttaacatccccagatgtcggcggcaacgaccagtctcagtacaagaggctggccaagtccacgctcctgcttatcccgctgttcggcgtccactacatggtgtttgccgtgtttcccatcagcatctcctccaaataccagatactgtttgagctgtgcctcgggtcgttccagggcctggtggtggccgtcctctactgtttcctgaacagtgaggtgcagtgcgagctgaagcgaaaatggcgaagccggtgcccgaccccgtccgcgagccgggattacagggtctgcggttcctccttctcccgcaacggctcggagggcgccctgcagttccaccgcggctcccgcgcccagtccttcctgcaaacggagacctcggtcatctagccccacccctgcctgtcggacgcggcgggaggcccacggttcggggcttctgcggggctgagacgccggcttcctccttccagatgcccgagcaccgtgtcgggcaggtcagcgcggtcctgactccgtcaagctggttgtccactaaaccccatacctggaattggagtcgtgttgtcattgactcgatttaaactccagcatttagataatcttgtgcaaaatgtgtttcagccgtatagtggatccacttttttttttttttttttttttgagacggagtctcgctctgtcgcccaggctggactgcagtggcctgatctctgctccctgcaagctccgcctcccgggttcacgccattctcctgcctcagcctcccatagctgggactacaggcgcccgccaacacgcctggctaattttttgtatttttagtagagacagggtttcaccatgttagccaggatggtctcgatctcctgacctcgtgatgggcccgcctcggcctcccaaagtgctgggattaaggcgtgagccactgcgcccggcccaagagaataggggagccaaggaggaaatgtggaaacgcagttgtgtggcccagcacgagcctgggcgaccaccgggtgacatccgtcccacatcagggcggcctcccaggtcccataagggtagccccctcatctgcaggacagagggaagccagtcagggcccccctgacgttaggaccaggagaaatcaacaggagggcagcccgtcctctctcttggggcgcccacccggcccggctgagccctgccccacccaactccacagggctgttttgcctccccacggaaggcgggctgaggagacaaccagatcaggagagcaaggtcatgaaggaggggacctctccacacaggtgttccgtgggaccctcagcagctctggctctgcctcaggaggtcacctgccgccctgtgggagccgcagagcctgacgctcagccccaggccagctgcggccaggcctgcgggcccctggtgatggggttacgtggggtgcgggatacagctgagtgggaaccggaaacctattctctttttaacaaaaataatcttaggataagaattattttaacaacatataaaactgtttcaagccctcctccccagagctggcgctcagcagccctagcggctgctccttcaggcgaagggtggtttgcagatgtggggagggtgtctggggacgttgctgagccagctgcagaagggtggggatatcagggcacagtctccatgtgtgtgccaagccctggcccccacagcgctcgatggacctcagcaagctgcccagccctggcccaggtgccccgactgtgggactcagttgttctgagcacatttgactccacttttcccttaaaaatgaatgtcttgttcctgtgcattggtggcatcacagaccccagctggggcgcgatgtcaaaggtcgggacagctgtgccgggaggcagccacagggaagctcacacatcctgtcagtgtcaccttggtttgcaaaacccatatccccggtaaaatgaggccggacagaggggctgttaggacagcaaagcagcagtgtccagagacccctcaatccccaaaggtccgcaccctgtcctgcacaccctgggccacgccggccacacccctctgctgcaacaagctcatccctggacttctgggagaatgaacccgaggttggtttggggagacaggtgaggcggtcggatctacagaacaacccaccatttctgggggccgcagaggatccatcacagacggatactggggagtaaacggcccaggccaggtgcccaggaaaggacggctgagcatgtggagcgagagggaggcaggtggacgctgcagaccccaggttcagtgcggcccctcggctgttcctcccctgtagggtttggacagacccacccccagccttgcccagctttcaaaggacaaaagggagcatcccccacctactctcaggtttttgaggaaacaaagatttgtggtaactgaaggtgttgggtcagtggccaggtgccgacactgagctgtgacccagaggggacgctgaggaagtgggcgtgagtggacgtgtcaggtggttaccaggcactggttgttgatggtcggtggttgggtgtgggcagtcatcagtcatcaggtgtgctcaggggacaatctcccctcaaccgcacatgtgccactgttcagcggagctgactggtttctcctggtagaggggccggctgtttcctgacagatgcctggtgagcaggggaagcaggacccagtggtcagcaggtgtctttaactgtcattgtgtgtggaatgtcgcagactcctccacgtggcgggaatgagctgtgtaaatacttcaataaagcctgacttcacatctgc

SEQ ID NO: 5247 - protein, 438 aa, Homo sapiens; identical to SEQ ID NO: 709

SEQ ID NO: 5248 - DNA, 1542 bp, Homo sapiens
aaacttcactccccagggctcccatccctggtgacaaagatcacagcagctggcactgcagatgcctttgtgggaggcaccatctgatcatcccgccaaccctcctgcaaccctgcaaggacacaccagcctcccagggtgccaggaggagcctgccagagacccccagagcggcctgccccaaatcacctctgagagcagcagcttttctgaaggaagcctcccctcatggtcctcaggcccagcaggtgccaagctcaatgccagccacgagggcattggctcatcgagtgatgggaacggggacagcaaggcggccacagagagggtggtctcagccatggacacagtacggcggaagcatcccgagatcacgttttatattctggtgaaggccatttatacactgggctacagtgtctctctgatgtctcttgcaacaggaagcataattctgtgcctcttcaggaagctgcactgcaccaggaattacatccacctgaacctgttcctgtccttcatcctgagagccatctcagtgctggtcaaggacgacgttctctactccagctctggcacgttgcactgccctgaccagccatcctcctgggtgggctgcaagctgagcctggtcttcctgcagtactgcatcatggccaacttcttctggctgctggtggaggggctctacctccacaccctcctggtggccatgctcccccctagaaggtgcttcctggcctacctcctgatcggatggggcctccccaccgtctgcatcggtgcatggactgcggccaggctctacttagaagacaccggttgctgggatacaaacgaccacagtgtgccctggtgggtcatacgaataccgattttaatttccatcatcgtcaattttgtccttttcattagtattatacgaattttgctgcagaagttaacatccccagatgtcggcggcaacgaccagtctcagtacaagaggctggccaagtccacgctcctgcttatcccgctgttcggcgtccactacatggtgtttgccgtgtttcccatcagcatctcctccaaataccagatactgtttgagctgtgcctcgggtcgttccagggcctggtggtggccgtcctctactgtttcctgaacagtgaggtgcagtgcgagctgaagcgaaaatggcgaagccggtgcccgaccccgtccgcgagccgggattacagggtctgcggttcctccttctcccgcaacggctcggagggcgccctgcagttccaccgcggctcccgcgcccagtccttcctgcaaacggagacctcggtcatctagccccacccctgcctgtcggacgcggcgggaggcccacggttcggggcttctgcggggctgagacgccggcttcctccttccagatgcccgagcaccgtgtcgggcaggtcagcgcggtcctgactccgtcaagctggttgtccactaaaccccatacctggaattggagtcgtgttgtcattgactcgatttaaactccagcatttagataa

SEQ ID NO: 5249 - protein, 422 aa, Homo sapiens
MPLWEAPSDHPANPPATLQGHTSLPGCQEEPARDPQSGLPQITSESSSFSEGSLPSWSSGPAGAKLNASHEGIGSSSDGNGDSKAATERVVSAMDTVRRKHPEITFYILVKAIYTLGYSVSLMSLATGSIILCLFRKLHCTRNYIHLNLFLSFILRAISVLVKDDVLYSSSGTLHCPDQPSSWVGCKLSLVFLQYCIMANFFWLLVEGLYLHTLLVAMLPPRRCFLAYLLIGWGLPTVCIGAWTAARLYLEDTGCWDTNDHSVPWWVIRIPILISIIVNFVLFISIIRILLQKLTSPDVGGNDQSQYKRLAKSTLLLIPLFGVHYMVFAVFPISISSKYQILFELCLGSFQGLVVAVLYCFLNSEVQCELKRKWRSRCPTPSASRDYRVCGSSFSRNGSEGALQFHRGSRAQSFLQTETSVI

SEQ ID NO: 5250 - DNA, 2040 bp, Homo sapiens
tcccggcccatgctggaggcggcggaaccgcggggacctaggacggaggcggcgggcgctgggcggcccccggcacgctgagctcgggatgcggacgctgctgcctcccgcgctgctgacctgctggctgctcgcccccgtgagtgcgcccgcgacccccgccccacggcgcctcggacccggttctccccttccgagaagagcgctcctcccgccggtcttcgccttcctcccgggtgctggagcgcgggcggggtccgggagagggagcggggtcgcccggggtccggagcttcctcccggagagcgtgaagcgctgagctccggtcccgccgggttgcgggactcgggttgggaggctgcctgcgcccttccccgcgccccaccgtccggggtttgctggaaacgggatcgtttcttcctggacgcgtcaacgatgagctcgttcggggccgtcccgggagctgggagctgcgggcgcctgcgcgggctgcgcgtttcacggggagatcggggttggcgttggccgcagatgcctctcggtccctccctgtacttactggtgaacagcattcacccagaatgccgatttcatctggaaatacaggaggaagaaacaaaatgtgcagagcttctgaggtctcaaacagaaaaacacaaagcctgcagtggcgtctgggacaacatcacgtgctggcggcctgccaatgtgggagagaccgtcacggtgccctgcccaaaagtcttcagcaatttttacagcaaagcaggaaacataagcaaaaactgtacgagtgacggatggtcagagacgttcccagatttcgtcgatgcctgtggctacagcgacccggaggatgagagcaagatcacgttttatattctggtgaaggccatttatacactgggctacagtgtctctctgatgtctcttgcaacaggaagcataattctgtgcctcttcaggaagctgcactgcaccaggaattacatccacctgaacctgttcctgtccttcatcctgagagccatctcagtgctggtcaaggacgacgttctctactccagctctggcacgttgcactgccctgaccagccatcctcctgggtgggctgcaagctgagcctggtcttcctgcagtactgcatcatggccaacttcttctggctgctggtggaggggctctacctccacaccctcctggtggccatgctcccccctagaaggtgcttcctggcctacctcctgatcggatggggcctccccaccgtctgcatcggtgcatggactgcggccaggctctacttagaagacaccggttgctgggatacaaacgaccacagtgtgccctggtgggtcatacgaataccgattttaatttccatcatcgtcaattttgtccttttcattagtattatacgaattttgctgcagaagttaacatccccagatgtcggcggcaacgaccagtctcagtacaagaggctggccaagtccacgctcctgcttatcccgctgttcggcgtccactacatggtgtttgccgtgtttcccatcagcatctcctccaaataccagatactgtttgagctgtgcctcgggtcgttccagggcctggtggtggccgtcctctactgtttcctgaacagtgaggtgcagtgcgagctgaagcgaaaatggcgaagccggtgcccgaccccgtccgcgagccgggattacagggtctgcggttcctccttctcccgcaacggctcggagggcgccctgcagttccaccgcggctcccgcgcccagtccttcctgcaaacggagacctcggtcatctagccccacccctgcctgtcggacgcggcgggaggcccacggttcggggcttctgcggggctgagacgccggcttcctccttccagatgcccgagcaccgtgtcgggcaggtcagcgcggtcctgactccgtcaagctggttgtccactaaaccccatacctggaattggagtcgtgttgtcattgactcgatttaaactccagcatttagataa

SEQ ID NO: 5251 - protein, 579 aa, Homo sapiens
MRTLLPPALLTCWLLAPVSAPATPAPRRLGPGSPLPRRALLPPVFAFLPGAGARAGSGRGSGVARGPELPPGEREALSSGPAGLRDSGWEAACALPRAPPSGVCWKRDRFFLDASTMSSFGAVPGAGSCGRLRGLRVSRGDRGWRWPQMPLGPSLYLLVNSIHPECRFHLEIQEEETKCAELLRSQTEKHKACSGVWDNITCWRPANVGETVTVPCPKVFSNFYSKAGNISKNCTSDGWSETFPDFVDACGYSDPEDESKITFYILVKAIYTLGYSVSLMSLATGSIILCLFRKLHCTRNYIHLNLFLSFILRAISVLVKDDVLYSSSGTLHCPDQPSSWVGCKLSLVFLQYCIMANFFWLLVEGLYLHTLLVAMLPPRRCFLAYLLIGWGLPTVCIGAWTAARLYLEDTGCWDTNDHSVPWWVIRIPILISIIVNFVLFISIIRILLQKLTSPDVGGNDQSQYKRLAKSTLLLIPLFGVHYMVFAVFPISISSKYQILFELCLGSFQGLVVAVLYCFLNSEVQCELKRKWRSRCPTPSASRDYRVCGSSFSRNGSEGALQFHRGSRAQSFLQTETSVI

SEQ ID NO: 5252 - DNA, 1640 bp, Homo sapiens
cgggacggagggggcggcccccgcgctcgggcgctcggctacagctgcggggcccgaggtctccgcgcactcgctcccggcccatgctggaggcggcggaaccgcggggacctaggacggaggcggcgggcgctgggcggcccccggcacgctgagctcgggatgcggacgctgctgcctcccgcgctgctgacctgctggctgctcgcccccgtgaacagcattcacccagaatgccgatttcatctggaaatacaggaggaagaaacaaaatgtgcagagcttctgaggtctcaaacagaaaaacacaaagcctgcagtggcgtctgggacaacatcacgtgctggcggcctgccaatgtgggagagaccgtcacggtgccctgcccaaaagtcttcagcaatttttacagcaaagcaggaaacataagcaaaaactgtacgagtgacggatggtcagagacgttcccagatttcgtcgatgcctgtggctacagcgacccggaggatgagagcaagatcacgttttatattctggtgaaggccatttatacactgggctacagtgtctctctgatgtctcttgcaacaggaagcataattctgtgcctcttcaggaagctgcactgcaccaggaattacatccacctgaacctgttcctgtccttcatcctgagagccatctcagtgctggtcaaggacgacgttctctactccagctctggcacgttgcactgccctgaccagccatcctcctgggtgggctgcaagctgagcctggtcttcctgcagtactgcatcatggccaacttcttctggctgctggtggaggggctctacctccacaccctcctggtggccatgctcccccctagaaggtgcttcctggcctacctcctgatcggatggggcctccccaccgtctgcatcggtgcatggactgcggccaggctctacttagaagacaccggttgctgggatacaaacgaccacagtgtgccctggtgggtcatacgaataccgattttaatttccatcatcgtcaattttgtccttttcattagtattatacgaattttgctgcagaagttaacatccccagatgtcggcggcaacgaccagtctcagtacaagaggctggccaagtccacgctcctgcttatcccgctgttcggcgtccactacatggtgtttgccgtgtttcccatcagcatctcctccaaataccagatactgtttgagctgtgcctcgggtcgttccagggcctggtggtggccgtcctctactgtttcctgaacagtgaggtgcagtgcgagctgaagcgaaaatggcgaagccggtgcccgaccccgtccgcgagccgggattacagggtctgcggttcctccttctcccgcaacggctcggagggcgccctgcagttccaccgcggctcccgcgcccagtccttcctgcaaacggagacctcggtcatctagccccacccctgcctgtcggacgcggcgggaggcccacggttcggggcttctgcggggctgagacgccggcttcctccttccagatgcccgagcaccgtgtcgggcaggtcagcgcggtcctgactccgtcaagctggttgtccactaaaccccatacctgg

SEQ ID NO: 5253 - protein, 438 aa, Homo sapiens; identical to SEQ ID NO: 709

SEQ ID NO: 5254 - DNA, 405 bp, Homo sapiens
aaagcgccagcaaccgcagcgtggggcgggagggtcaggggtcaggggacggggccaggccgttggagcagcccggagacagcctccctggctgggaatgaacgcagggcagagctcggctccgggcttcctccccagggactcacaggacgctgtgcagccccaccccccagaagagtgggtttgcctgtgtcgttgtgggttctctgatggggacacagaactgtggggtcccgggcagtaactcgagcccgcggaagacaggcatgtgtgggggctgcggcaccaggctgggcagcatctcaggaagcaagtgagtacctgtgcttggttccaaggcggccatgaacttacctcactgttcaggaaacagtagaggacggccaccaccaggccctgcaatga

SEQ ID NO: 5255 - protein, 48 aa, Homo sapiens
MNAGQSSAPGFLPRDSQDAVQPHPPEEWVCLCRCGFSDGDTELWGPGQ

SEQ ID NO: 5256 - DNA, 2423 bp, Homo sapiens
ggcaacaccctgtgataattccaggtgattctctacatctgcagcttgaggtgggaagtctgaagctcagagagcctgggccaatggtacaggtcacacagcacatcagtggctacatgtgagctcagacctgggtctgctgctgtctgtcttcccaatatccatgaccttgactgatgcaggtgtctagggatacgtccatccccgtcctgctggagcccagagcacggaagcctggccctccgaggagacagaagggagtgtcggacaccatgacgagagcttggcagaataaataacttctttaaacaattttacggcatgaagaaatctggaccagtttattaaatgggatttctgccacaaaccttggaagaatcacatcatcttagcccaaggtgaaaactgtgttgcgtaacaaagaacatgactgcgctccacacatacatcattgcccggcgaggcgggacacaagtcaacgacggaacacttgagacaggcctacaactgtgcacggttcagaagcaggtttaagccatacttgctgcagtgagactacatttctgtctaaagaagatgtccctgacttgatctgtttttcagctccagttcccagatgtgcgtgttgtggtccccaggtatcaactccaaattcctgggagcagtgctctggccgtacctgtctgggtttgttggccagcgctgaatccgcttagccaggagagcatggggtgtgcggggttcggtcagcctcacacacgtggcaggagtttctctctggacggcggccgcccacacctggccgacaggagcctgtcttcagcaactttcagttaacgcgtccctcttgccccatgcttgtcctgccacacaaatgtgaaaatgcaacgttacaaagatctgtgcctcagacaccatttgaacacagagaaactcgtgggcttatgtgactacacttttcaggttacggaatttctttaaggtgtacccttgagtttaatatacttattaataacttatcattacagagaaaaaattaccagaagtacagggtgtttttaacggactttcttctcttgcacattgctgggcatggcgtgtactgtgacagggcggagtgatgggctgagaatgtgtgtgtgtctccaacagttcccaaacgtctacattttcaagaaaaaggcaatctacatcatctggaaaattgtaacttagtaattaattaggataatttccctaggttctctgtgctgcatgagaccacagcgtattcattaaagaggaaagctgaatattggcggaaaacagggttgtaaatttgtaacaagtttttctatcagaaaatgaaatgcaattttctgtcctctctgagcttttaccacatagctcttagcaatgggtgttttttctgtcattccactcaattctcactcgagtaaacctccaagcaataagaatgttgtctttcctgtttagactagactgactacctttccaggacagtccattaagttgatttccaatggtgaagggtcagacacgcctcccctgggcagatcagggatagttcatagcatttgccaaatagctgtctgcagctgcagccatcacctccgtaatcaacactgccattgtctgagccttccctttgcaggaatggtgtcagtgcacccaggcctcgtagagatgacagccaccccaggcactattgtgaccattgctttgatcattgttctgtttatgactgaggaaagcagggcttaggaagactaatcttagttatctctttatcccagcaatcggcacacatctgtggatcaataaacattgtattaaaatgatgaacacaactgatctcccttaacctgattttccaggagtcctaagcagacttaaagccaagaaaataagaagaggaaagagagaggggctgccttaaccagctgtggtgctgacttggacaattccaggtcaagaggaactgtctactttcgactttgtgtgatagtaactttttaagcagtggaccgggagcccaagactcagatgcagcaagctttgcaaggctgacgagagctgagatcttcagtggccgatgggtacagggctgctgggagcgtagccacgtctgctccaaggtggcttgaatgaggcagtgcccaagtccttttgactggctgaggtgagcctgtggctcagtcacagtttgtccctctcctaataagtgcatttcccagacagcagctccttggtgtcatgcaactgaggaacctaattggctgggtgggttgttcccatccaacttccacctgtcacgaaggatgctttttcagatcagtctccacagctaccatcttgtcgggcacagagccgggcatcaacaagtgtatgttgaataaagaatgaattgatgaaatgaagtg

SEQ ID NO: 5257 - protein, 40 aa, Homo sapiens
MQVSRDTSIPVLLEPRARKPGPPRRQKGVSDTMTRAWQNK

SEQ ID NO: 5258 - DNA, 1558 bp, Homo sapiens
gcgcgccgtggtctgaggtccgcggcagggtcccgcatggcggcgcacaggaagcacgatcaggatcctcatgaccagccaaagagaagaagaattaggaagcataaatcaaagaaaaaatttaaaaatcccaataatgttcttatagaacaagcagaattagagaaacagcagagtctgttacaggagaaatctcagcgacagcacacagatggcaccacaataagcaaaaataaaaaaaggaaactgaaaaagaaacagcaaattaaaaggaagaaagcagccggcttggcagcaaaggctgctggtgtcagtttcatgtaccagcccgaggacagcagcaatgaaggggaaggcgtgggagaggcttgtgaggaggatggtgtggacaccagcgaggaagacccgacactggccggggaggaagacgttaaagataccagggaggaagatggtgcggacgctagcgaggaagacctgacacgggccaggcaggaagagggtgcggacgccagtgaggaagatccgacaccggccggggaggaagacgttaaagacgccagggaggaggacggtgtggacaccattgaggaagacctgacacgggccggggaggaagacggtaaagacaccagggaggaggacggtgcggacgccagcgaggaagacccgacatgggctggggaggaagagggtgcagactccggggaggaggacggtgcagacgccagcgaggaagatgatacaattaccaatgaaaaggcacacagtattctaaattttttgaagtcaacacaggaaatgtatttttatgacggtgtctccagagatgcagcttcagctgccctcgcagatgccgctgaggagctgctggaccgccttgcgtcacacagcatgctgccctcagacgtgtccatcctgtaccacatgaaaacgctgctgctcctgcaagatactgagagattgaagcatgctctggaaatgttcccagaacattgcacgatgcctcctggagtcctaagcagacttaaagccaagaaaataagaagaggaaagagagaggggctgccttaaccagctgtggtgctgacttggacaattccaggtcaagaggaactgtctactttcgactttgtgtgatagtaactttttaagcagtggaccgggagcccaagactcagatgcagcaagctttgcaaggctgacgagagctgagatcttcagtggccgatgggtacagggctgctgggagcgtagccacgtctgctccaaggtggcttgaatgaggcagtgcccaagtccttttgactggctgaggtgagcctgtggctcagtcacagtttgtccctctcctaataagtgcatttcccagacagcagctccttggtgtcatgcaactgaggaacctaattggctgggtgggttgttcccatccaacttccacctgtcacgaaggatgctttttcagatcagtctccacagctaccatcttgtcgggcacagagccgggcatcaacaagtgtatgttgaataaagaatgaattgatgaaatgaagtg

SEQ ID NO: 5259 - protein, 345 aa, Homo sapiens
MAAHRKHDQDPHDQPKRRRIRKHKSKKKFKNPNNVLIEQAELEKQQSLLQEKSQRQHTDGTTISKNKKRKLKKKQQIKRKKAAGLAAKAAGVSFMYQPEDSSNEGEGVGEACEEDGVDTSEEDPTLAGEEDVKDTREEDGADASEEDLTRARQEEGADASEEDPTPAGEEDVKDAREEDGVDTIEEDLTRAGEEDGKDTREEDGADASEEDPTWAGEEEGADSGEEDGADASEEDDTITNEKAHSILNFLKSTQEMYFYDGVSRDAASAALADAAEELLDRLASHSMLPSDVSILYHMKTLLLLQDTERLKHALEMFPEHCTMPPGVLSRLKAKKIRRGKREGLP

SEQ ID NO: 5260 - DNA, 406 bp, Homo sapiens
ctccagcaaatgacccatcgttttccaccagtgtctctgtttctatgtaaaattatagattaaacgccaagtcctctgcctccacctgtccaggcttttattggctcttgtcgaaatcaaattggaagatcttcagtcccagctgcacccaacgtggaaaagtattccaggtccatccccaaggaaccaacaccgatgacatggactcaggaatcttataacctacgtggactctttccatccgtacattgtcgtgcacatgccactcatcacctggcgtgcccagatcctcgcagggcaacaccctgtgataattccaggtgattctctacatctgcagcttgagcatctgcagtggccatgagcagagccagacagcaggagctgggccctggacgactccacg

SEQ ID NO: 5261 - protein, 34 aa, Homo sapiens
MPLITWRAQILAGQHPVIIPGDSLHLQLEHLQWP

SEQ ID NO: 5262 - DNA, 699 bp, Homo sapiens
cgtccagaacacgaaacgcacacgtagcttttattggctcttgtcgaaatcaaattggaagatcttcagtcccagctgcacccaacgtggaaaagtattccaggtccatccccaaggaaccaacaccgatgacatggactcaggaatcttataacctacgtggactctttccatccgtacattgtcgtgcacatgccactcatcacctggcgtgcccagatcctcgcagggcaacaccctgtgataattccaggtgattctctacatctgcagcttgaggttagcctcatatcacattacattctcactagaaacaaaacaaaaatgaaatacttaaaacatctaccagaacagaattaggactggaaagcagcggtcttagctgacaaacaagttgtgccatctgagactcatgggagtaaatctcctctttcatagtaaaatctcattacagaatgttccttgactttggcaatttttctgggtcacaagcaagaaaaaaacataagcaggcggagagagctcgccctgccacctggggcttgtgtgtcagcagctccagagaggaattgggatgtgaaaagttcagccaaaatagaaagaattaacatttttgctataaaaaaggagcatctgctgccttttcatgaggaccttctccataggggtcctttgattaggcggcattccactcagttt

SEQ ID NO: 5263 - protein, 55 aa, Homo sapiens
MPLITWRAQILAGQHPVIIPGDSLHLQLEVSLISHYILTRNKTKMKYLKHLPEQN

SEQ ID NO: 5264 - DNA, 3820 bp, Homo sapiens
cacactttctcttaagcaagggggaactgctgaagtcagtccctttcctcaccgatttccgagtagagttgacaatgatgtcagagtggctgccgaagggaaaccagatgccctccctccctaatcccccttcccacttcgtggactcccaggttcttcgatgatatttgtaaagatagattgcaaaattagaattagtattttcagaatcccttcccctcttttcccactcccacccaacccagtgtcacagtgtcaggcaggttcgggagatgaggacgcctaagcccagcgccacttctcttcccaaccctggactaacaacttgagctgaaccagatgtgaactgaagcccaaaacaactgacattgacttgcagtgtctaattcaacttaactgaaatgcagtatcaatgttggcctgaatcaagccatggcaagatgtgtgataagccagggactgtggctccccaacaacgcatcttccttaaaccactgaacccctgcaagactagagctctatcgtggacgaacgaggggtgttctgcctggcttcggtgattcgtatctgctgtcatttgtaaactgtttatacaccgccttggtgacaggaccccagatctatttctcagtcacactcaaggagctctcctgggataacacactccagggctctcagtcggacctttcaccatgaatcgttgaagcctcctgcggtggctgcagccccttgctctggctttatcaggtcaggtctcggctctgcaggcctcggagcccacaacagaagagacccttttatcagcgtgtgctgcggggtggctgcaccctcttcagggtcagggtggcctgaacttgcgtcctgcgcctcatgtcctccttctctcctgccctatggcacggtgccggctctggaatctgagcgcgttgacaccggttcctccctggtcaggctggctgcttccctttcagtgtctggggccggcctcgggggtacctgcagccaccggggcggctgctgctgggaggtcaagcccatttcgtcctcacgttaggatgtgacagtgccctgccgaggacggtaactgagatggaaaacgagttaaggcgacaagggctgccctttcagtgggtggcatccgtgaggcagatgtcagcccccagggcaggaaaaaggaaagcccgttctgcctgcatcctctcctgagaccgtgtcactaaagttggaacggggagacccagcgaggacaggggccacggagtcagaccccggggacagagtgctgactcggcctggcggaggccggcgtcctcatcgccagcacggaacgggacgcagctcctgagtgcagagaggaacgcgggctccacgctgtgccggacacgcaagcgccctcagctctgcgcgctcccggcatggagcgagcgctgagaccgcaaccttccggccttgttcttctgaaccggcacgaaagccgagagcaggacacgcaggtcgcgctcagcgcagggaggccgccctcgccgggcgcggtccggggtgctcaggctctgcagccccaggtgccagatgtcgcggctgccgtcttctccctgacgccagcacacgcttccccaggcccggtcctgtcacgtctcctcccaacctggggccactgctcctcccagccctgacagcgattcctggaaagctcttgctggagcccagctgtcagctcacctgctctgatacgccgtccgccctgtgcggctgctctgtctccacgtggatggatggtgcctgcgctcatggtcacactgctcagccaggggccacagggccttggagccccgtcttccagctcctgcctcctggaggcagtgcttcatgatctgagcccaccttcctgcaggaagggctcacagcagccggcgcggccccaccccaatccccctcccccgagagaggtacggtgctggacatccaacaaaggtgacaacagggctcacctctcccctgtggatcttccccccggggcccaggggctctgagcatttccacaatgcacaggatacacccaccctggaattctctgtgcttgaccttgaggacagcatagaataaaagcaagccccgctcttaaatcttccttgactttgacaatttttcagcgtcacaagcaagaaaccaccacctgtgggccccaggcagagccgcccccgccccgtcaggcccaccgtgctggtgctcagggggctgcatcctgctgggagcacgattccgggtgtttctccaggcgctgagtccgtgcctcctttttcggtcacacatcttatcatttgagtttagcatctacttataaacatcattttcaaatctgaatcctgcttcctcactacaataaaaaggagagacaaaaggaagttgcgcctacaaccttccagaagccctgaggagccgccccatgcctgacgccacatcccacaagctcccgaagtcgcggatggctcagtgacattccagatgctgtcccatcgctcagagtcccgagacacagacatgaacaccaagtccatcctttgaggaaggcagacttggcgggaatgtggttttcttcaaaggtgagggggtagggggagctgccagggcccagccggcaggggcaggaggggcggggcttcggcccagggccctgcacgggggtgaccatcagtgccccccatcaccgtgacagtcctatccccagtctgcaaaatgccccctggatggagcatcccatgagagccgggccatggagaggctggaatgtgccagactctgaggcacccagggggtcagcctttccctctggttggtccccctgtgccacaccgcagcctgcgcctggccagcttcccgtccctgcgagcacagcctgcgcctggccagcttcccgtccctgctgcgaccccattactaggtcatcgtctcatgccagagaactcgcaggaatcgcatgcaatgtttaacgagaggcagaatgtgggcaccaggtgtgaagcagtccccggctgtggacgggagactccaggctgcgccaggcagggcgccttcccctggaccttgaagggcacccgatgtcctggggccgtgaggggcggggtgcttatccatgtgacaggactcttccagtagcaacagggagggcccagcaaaacccgcagtttgtttcgggccacgttccaacaagtgactcggcggcgtctcccacctgcacactcagtcaggaggctgcagtctcccgtccagccccacagcctgagggattcctgttggttacccagaactgcctgccacaggtgccagggcaagagatgtcactcaattttccagcccccagtcctgtagacatcctgggtgtgcggcacacatcggctcactcacactgaccctctgagccggtgagaactccacaagaagagggccagcgcctcacaagatcaaggcggaacaacgcgtttgtgggatgatgaagacctcataacagacgtgccagtgggttgattactgtgaaattctcaactgtggtttctgtaacttaaaaaaaaaaatttccactttgggaggccgaggcgggcagatcacgaggtcagaagatcgagaccatcctggctaacacagtgaaaccccgtctctactaaaaatacaaaaaattagccgggcgtggtggctggtgcctgtagtcccagctatctgggaggctgaggcaggagaatggcgtgaacccaggaggaggagcttgcagtgagccgagatcgcaccactgcactccagcctgggcgacagagcgagactctgtctc

SEQ ID NO: 5265 - protein, 122 aa, Homo sapiens [sequence omitted]

SEQ ID NO: 5266 - DNA, 3258 bp, Homo sapiens
aataattagatcaatttatcttctacaatagtgcaaaatattcagttcatgtaatttattttctgtaaaccacgtcaattaagacaggcagagaaggaaacagtcaggagcatgaggaattgtcaggttgccaatattaagacagttgtgcctagaaggaaaaaaacacagaatatctgagcctgtcagtactgcttgcaccctgggacctccgcctgtgtctgcagagcctgagaagagagggcttgcacaagccggtctctaatttgtttcccaggcccagctgccgccaggctccagggcagaactgtggtgggttcaggagactccagggcccacagggtcagttctgggctttgcttttttgtgcagctcttgccccgagcgctctccaggtgacatgtcctctcatcccggggctcttcagagaatcgcaggaatgtgttccacccgctccaaaataagaaatgtgcatgcatctgccccgcctcgcaccaatattgggtacagctttgaaggggtcagaaattcctcaaaacttattcaacaggatactgtggtgcagtgagttccctaccaggttacttagggctttggtccactgcgtgaatcctgaaggctgagagcgagccaaggtcacagtgcctggcggaggagcaggtatcccaggaacccggagctagcctgagaaccgcccaggacccagcggaggagcaggtatcccaggaacccggagcctgcccgagaaccacccaggagagcagtcccatatagctcatggccggcaacgagacagggagcacaggtggaagcagctcgaaagctgcggatcttagcgctgtcctgaggctgcccaggcaggctgtgtcccagccattctttcatctcttgctccctcccagtttgggccagggccagggatggaggaaactgaattccaaaatttttattgtaaaaaaaattaattttcttcttctgcataacaaatgaccacaggcatagtggcttgaaacgacaccatttgccgcctcgcagtgtctttgggtggggattcagtacagcccgggctgggacctctgtgtggggactcacgggccgccagcagaatgctgttcgtgtggccgcaggacagaggctccgtgtccttgctggctgatgctgtggccgctgccacacctcaaggcaccaagtcccagccccgtggcccctccaacctggcagccgacctcagggtggcagaagaatcttctggtatggagaacctctttttaaagatgtcatttgactccatcaggcctgcccaggtaatctgcctgttgttaaaagtcaaatattacaataacaactgccaagcctcatcacaggtgatggccccaggtgtgtgtgaacatgagcacatgctggaggggaggccatgacactgggcaggggccagggggagagtcggggaaggccctgccttcgggagctcagccatgaccccgggcaggggccagggggagagtcggggaaggccctgccttcgggagctcagccccacctcgttgcctcagcacaggcctctgttccactgcagctgtatctggcacagtgagttgatgaggggctgcccccttcccttggggggcttgaggccaggatccttgtaagggattgaatgaggacacaaaggaagggagacggacagacagggagcagcctgccagtggaagcctcgatggtcaccccctccccaggatattcagtgcacactggagatctcgatggtcaccccctccccaggatggtcagtgcacaccggagatctcgatggtcaccccctccccaggatggtcagtgcacactggagatctcgatggtcaccccctccccaggatggtcagtgcacaccggagatctcgatggtcaccccctccccaggatggtcagtgcacaccggagatctcgatggtcatcccctccccaggatgctcagtgcacaccggagatctcgatggtcaccccctccccaggatgctcagtgcacaccggagatctcgatggtcaccccctccccaggatgctcagtgcacaccggagatctcgatggtcaccccctccccaggatggtcagtgcacaccggagatctcgatggtcaccccctccccaggatggtcagtgcacaccggagatctcgatggtcaccccctccccaggatgctcagtgcacaccggagatctcgatggtcaccccctcctgttcctgtggtgagggtgggtgaggaagtccaggaaccacagtccagctgcagccgaagccctggaagccaaagactggggcccagccagaggccacttgggcacgaagaagggcagcagcagccggagctaagaatggcctctagaaaggggccgtgccagcctctctctcaaacatggtccgtggggatcgggtggggcccctcctggatgccccttgggggctggtgggcccagccttgtatttggacattaaaggcaaaggaaacgccagccagtcaaaccacctctgccattcttcctcttctgggagtggctggggttgaaggcagtgctcgtgttcatggccctttcactacgtctgatttgtcgcagatccaacagcatctgggatcttcctctgaaaatccctctcattatcgcaaggaattcctgcacattactgagtcctttaatttaacatggcatgacatttatatcattctaatctccaccctcactcctgatgaaaagggcgcccctggcgttcagctgaaacccacgcagatgaactccataatcaagcccctgtacaaaatccagtggccaatgatgcatttccccacagagacccatactagatttaccatcagggagacaatggcgccagtctggactgacggagcaggagcatcatcatcttagacaagcatcgcccctgtgagttctacttgattcaaaactgcctaaatccagccccaaaacatcagcctaatggctaatgtcagtgtgaccttaaatcacaaatgaaacctctgaccagagacatgccaaccccgagataacctcccttccgaccagagacactccagtcctgcaataagactctcctccacacagaaacattcctagcctgcaataagctccccttcccggaactcttaaatacccttagtctccaagagaaaaggctcctgaccgaaatcgggcagaagcccctctcaggtttattctccaaaataaacctgtcttagactgtt

SEQ ID NO: 5267 - protein, 421 aa, Homo sapiens
MRTQRKGDGQTGSSLPVEASMVTPSPGYSVHTGDLDGHPLPRMVSAHRRSRWSPPPQDGQCTLEISMVTPSPGWSVHTGDLDGHPLPRMVSAHRRSRWSSPPQDAQCTPEISMVTPSPGCSVHTGDLDGHPLPRMLSAHRRSRWSPPPQDGQCTPEISMVTPSPGWSVHTGDLDGHPLPRMLSAHRRSRWSPPPVPVVRVGEEVQEPQSSCSRSPGSQRLGPSQRPLGHEEGQQQPELRMASRKGPCQPLSQTWSVGIGWGPSWMPLGGWWAQPCIWTLKAKETPASQTTSAILPLLGVAGVEGSARVHGPFTTSDLSQIQQHLGSSSENPSHYRKEFLHITESFNLTWHDIYIILISTLTPDEKGAPGVQLKPTQMNSIIKPLYKIQWPMMHFPTETHTRFTIRETMAPVWTDGAGASSS

SEQ ID NO: 5268 - DNA, 1165 bp, Homo sapiens
cagacgtgtagacgggccaggggaggcgtcccaccagacagacgtgtagacgggccaggggaggcgtctcaccagacagacgtgtagacgggccaggggaggcgtctcaccagacagacgtgtagacgggccaggggaggcgtctcaccagacagacgtgtagacgggccaggggaggcgtctcaccagacagaggtgtagacgggccaggggaggcgtctcaccagacagaggtgtagatgggccaggggaggcgtctcaccagacagaggtgtagacgggccaggtttccacagtcgttcatgcagtggtattttgtgctgagctctgttctgattctctcttctggtagcttctcatctcccagatatgtcattctgtgtggaagcgtaggtttgagaccttccttaagagaggaaagcttatctttagtttatagaaataaaaacaaaactgtatttccaagcaaaactgactttatgtaggtgtctccagagatgcagcttcagctgccctcgcagatgccgctgaggagctgctggaccgccttgcgtcacacagcatgctgccctcagacgtgtccatcctgtaccacatgaaaacgctgctgctcctgcaagatactgagagattgaagcatgctctggaaatgttcccagaacattgcacgatgcctcctgaccatgccagagtaatctcagctttctttagttactggatcacacatatccttcctgagaagagcagtgactaaaatggaatatctctttaagaacagctcctctttaacaaaaaaacttaaaagacaaatgtgagatgggcttagagttagttctctgggaacttgaaagacatttatgccatattatttattcacgtgtttgttcctggtgggcaagatgccatctgaggcttcagatgagaaattggggtaaaatggaaatttttcacttatttgcaattatatatatcttgaattactacataaaacttgattctgtttctctacttattgtaaaaattgaaaatggacattctgttaagttaaatgtatagtttgaagctcatatatttttatgaagttttgaatcaccttgtatctgaaagtctctgctttaagaatgctttctgggtattaaaatgttctagtttaagtagtttgaat

SEQ ID NO: 5269 - protein, 63 aa, Homo sapiens
MLPSDVSILYHMKTLLLLQDTERLKHALEMFPEHCTMPPDHARVISAFFSYWITHILPEKSSD

SEQ ID NO: 5270 - DNA, 1821 bp, Homo sapiens
aggagggcggaacccggaaggcacggcgctcagctcaggaccgcgcgccgtggtctgaggtccgcggcagggtcccgcatggcggcgcacaggaagcacgtgtttgtggagaaggtgctgcagagactttttcctcctgttccaagtggccaaggaaagagggaaccccagacgctggccgtccaaaatccaccaaagaaagtgacctctgagaaagtgagccagaaacatgctgagcctttgacagacactggctctgagaccccgactgcccgacggctctacactgccagcgggcctcctgagggctacgtcccctgttggccggagcccagcagctgtgggagccccgagaacgcctccagcggggatgacacagaagatcaggatcctcatgaccagccaaagagaagaagaattaggaagcataaatcaaagaaaaaatttaaaaatcccaataatgttcttatagaacaagcagaattagagaaacagcagagtctgttacaggagaaatctcagcgacagcacacagatggcaccacaataagcaaaaataaaaaaaggaaactgaaaaagaaacagcaaattaaaaggaagaaagcagccggcttggcagcaaaggctgctggtgtcagtttcatgtaccagcccgaggacagcagcaatgaaggggaaggcgtgggagaggcttgtgaggaggatggtgtggacaccagcgaggaagacccgacactggccggggaggaagacgttaaagataccagggaggaagatggtgcggacgctagcgaggaagacctgacacgggccaggcaggaagagggtgcggacgccagtgaggaagatccgacaccggccggggaggaagacgttaaagacgccagggaggaggacggtgtggacaccattgaggaagacctgacacgggccggggaggaagacggtaaagacaccagggaggaggacggtgcggacgccagcgaggaagacccgacatgggctggggaggaagagggtgcagactccggggaggaggacggtgcagacgccagcgaggaagatgatacaattaccaatgaaaaggcacacagtattctaaattttttgaagtcaacacaggaaatgtatttttatgacggtgtctccagagatgcagcttcagctgccctcgcagatgccgctgaggagctgctggaccgccttgcgtcacacagcatgctgccctcagacgtgtccatcctgtaccacatgaaaacgctgctgctcctgcaagatactgagagattgaagcatgctctggaaatgttcccagaacattgcacgatgcctcctgaccatgccagagtaatctcagctttctttagttactggatcacacatatccttcctgagaagagcagtgactaaaatggaatatctctttaagaacagctcctctttaacaaaaaaacttaaaagacaaatgtgagatgggcttagagttagttctctgggaacttgaaagacatttatgccatattatttattcacgtgtttgttcctggtgggcaagatgccatctgaggcttcagatgagaaattggggtaaaatggaaatttttcacttatttgcaattatatatatcttgaattactacataaaacttgattctgtttctctacttattgtaaaaattgaaaatggacattctgttaagttaaatgtatagtttgaagctcatatatttttatgaagttttgaatcaccttgtatctgaaagtctctgctttaagaatgctttctgggtattaaaatgttctagtttaagtagtttgaat

SEQ ID NO: 5271 - protein, 443 aa, Homo sapiens; identical to SEQ ID NO: 711

SEQ ID NO: 5272 - DNA, 1407 bp, Homo sapiens
tacccacaagtgggatgagagcctggacttggaggtctcatgcatcctgggccatcagaaaaggctgtgatggtttctaaaagatcaggatcctcatgaccagccaaagagaagaagaattaggaagcataaatcaaagaaaaaatttaaaaatcccaataatgttcttatagaacaagcagaattagagaaacagcagagtctgttacaggagaaatctcagcgacagcacacagatggcaccacaataagcaaaaataaaaaaaggaaactgaaaaagaaacagcaaattaaaaggaagaaagcagccggcttggcagcaaaggctgctggtgtcagtttcatgtaccagcccgaggacagcagcaatgaaggggaaggcgtgggagaggcttgtgaggaggatggtgtggacaccagcgaggaagacccgacactggccggggaggaagacgttaaagataccagggaggaagatggtgcggacgctagcgaggaagacctgacacgggccaggcaggaagagggtgcggacgccagtgaggaagatccgacaccggccggggaggaagacgttaaagacgccagggaggaggacggtgtggacaccattgaggaagacctgacacgggccggggaggaagacggtaaagacaccagggaggaggacggtgcggacgccagcgaggaagacccgacatgggctggggaggaagagggtgcagactccggggaggaggacggtgcagacgccagcgaggaagatgatacaattaccaatgaaaaggcacacagtattctaaattttttgaagtcaacacaggaaatgtatttttatgacggtatgttttttactgtttttctcttgcatagtgacatccacttaaaagtttattaaaagaaacaaatataatgcttaaatgttaaaacatactttaaaaatattcaatgtaaaataattagttgtaaggcaactaatataagtaaaaaatattcaatgtaaataattagttataaggcaaagatcagagtatttatgtgctttccaccgatgatgtggatgggcatgcgcccctggcgtatccagagaagcagtgtggtggccctggccagctgtgccaaggacaggctggccccgtgtcctccatgcctctaaggtcaggttttggagtgtgttggcatccaggctatttttctaaacaagagataaatccagattggaggttttgatgagctgagctcaccttcataagcagactgagaggtgaaggaaacacagcttgcgcctttaggacaggtttcattttctcttccacatagaacggatgcacgatttctcagcatgcattattgtgcagttgtttgtactgacataagataaggaaaataaacataggtttaatgtca

SEQ ID NO: 5273 - protein, 184 aa, Homo sapiens [sequence omitted]

SEQ ID NO: 5274 - DNA, 2850 bp, Homo sapiens
aaaaaaaagatcttacacctgagtgtaaaatgcaaaactataaacggttagaagattacttgggaggcaatctaggtgccctcgggttcagcagtgactttttagctacaacaccaaaggcttgatcaatcaaagaaagaattgataagtagatgtccagttgataacctggacatcattaaaattaaaatcttgtgctctgcgaatgacattgtcaagagaatgaagagacaggccacagacttagagaaaatattttcaaaagacatacctgacaaaggactgttactcaaaatgtttgaagaattcttaaaacttaataagaaaatgggccaaagatgtggacctcaccaaggaaaatatgtagatggcaaataatcctatgtaaagatgtttcacatcatatgttatcagggaaatgcaaattaagacaatgagacaccaccacatacctactagaatggacaaaatccagaacactaacaacaccaaatgctggaggaacaaggactctcatcactgcagatgggaatgcaaaacagggcagccactttggaagacagtttggtagtttcttacacaactgaacatactcttacctgtaggatccagcagttatgccccttgacatttatccaaatagatggaaaacgtcaataaacctgcacatggatgtttatagcagctttattcataactgccgaaacttggaagcaacgaagatgtccttcagtaagtgaatgaataagcaaattgtggtacatccagacaacggaaaattattcagggctaaaaagaaatgaactgtcaagccatgaaaagacatgatgggaccttaaatgcttattagtaagtgaaagaaaccgatctgaaaaggctacacattgcaattccaactctgtaacactgtggaaaagcaaaactgaggagaccccaaaaagatcagtgactgccgaggactgggaggagcaggtggagcccaggggccttgcaggacggtgaaaccgccccgtacgatgccgaggactggaaggagcaggtggagcccagaggacttgcaggacagtgaaaccgccccgtacgatgccaaggactgggaggagcaggtggagcccagaggacttgcaggacggtgaaaccgccccgtacgatgccgaggactgggaggagcaggtggagcccagaggacttgcaggacggtgaaactgccctgtatgatgccgaggactgggaggagcaggtggagcccagaggatttgcacgacggtgaaactgccctgtacgatgctgtcatggtgggcgcatctcattctgcgtttgcttcaactcacaggatgtacgagagtgaaccgcaatgtaaactgcagaccggggtggcaacgtgtgtcagcacactggctctgagaccccgactgcccgacggctctacactgccagcgggcctcctgagggctacgtcccctgttggccggagcccagcagctgtgggagccccgagaacgcctccagcggggatgacacagaagatcaggatcctcatgaccagccaaagagaagaagaattaggaagcataaatcaaagaaaaaatttaaaaatcccaataatgttcttatagaacaagcagaattagagaaacagcagagtctgttacaggagaaatctcagcgacagcacacagatggcaccacaataagcaaaaataaaaaaaggaaactgaaaaagaaacagcaaattaaaaggaagaaagcagccggcttggcagcaaaggctgctggtgtcagtttcatgtaccagcccgaggacagcagcaatgaaggggaaggcgtgggagaggcttgtgaggaggatggtgtggacaccagcgaggaagacccgacactggccggggaggaagacgttaaagataccagggaggaagatggtgcggacgctagcgaggaagacctgacacgggccaggcaggaagagggtgcggacgccagtgaggaagatccgacaccggccggggaggaagacgttaaagacgccagggaggaggacggtgtggacaccattgaggaagacctgacacgggccggggaggaagacggtaaagacaccagggaggaggacggtgcggacgccagcgaggaagacccgacatgggctggggaggaagagggtgcagactccggggaggaggacggtgcagacgccagcgaggaagatgatacaattaccaatgaaaaggcacacagtattctaaattttttgaagtcaacacaggaaatgtatttttatgacggtatgttttttactgtttttctcttgcatagtgacatccacttaaaagtttattaaaagaaacaaatataatgcttaaatgttaaaacatactttaaaaatattcaatgtaaaataattagttgtaaggcaactaatataagtaaaaaatattcaatgtaaataattagttataaggcaaagatcagagtatttatgtgctttccaccgatgatgtggatgggcatgcgcccctggcgtatccagagaagcagtgtggtggccctggccagctgtgccaaggacaggctggccccgtgtcctccatgcctctaaggtcaggttttggagtgtgttggcatccaggctatttttctaaacaagagataaatccagattggaggttttgatgagctgagctcaccttcataagcagactgagaggtgaaggaaacacagcttgcgcctttaggacaggtttcattttctcttccacatagaacggatgcacgatttctcagcatgcattattgtgcagttgtttgtactgacataagataaggaaaataaacataggtttaatgtca

SEQ ID NO: 5275 - protein, 133 aa, Homo sapiens
MMPRTGRSRWSPEDLHDGETALYDAVMVGASHSAFASTHRMYESEPQCKLQTGVATCVSTLALRPRLPDGSTLPAGLLRATSPVGRSPAAVGAPRTPPAGMTQKIRILMTSQREEELGSINQRKNLKIPIMFL

SEQ ID NO: 5276 - DNA, 367 bp, Homo sapiens
tggtaattgtatcatcttcctcgctggcgtctgcaccgtcctcctccccggagtctgcaccctcttcctccccagcccatgtcgggtcttcctcgctggctacatgaaactgacaccagcagcctttgctgccaagccggctgctttcttccttttaatttgctgtttctttttcagtttcctttttttatttttgcttattgtggtgccatctgtgtgctgtcgctgagatttctcctgtaacagactctgctgtttctctaattctgcttgttctataagaacattattgggatttttaaattttttctttgatttatgcttcctaattcttcttctctttggctggtcatgaggatcctgatct

SEQ ID NO: 5277 - protein, 54 aa, Homo sapiens [sequence omitted]

SEQ ID NO: 5278 - DNA, 1093 bp, Homo sapiens
ggaacccggaaggcacggcgctcagctcaggaccgcgcgccgtggtctgaggtccgcggcagggtcccgcatggcggcgcacaggaagcacgtgtttgtggagaaggtgctgcagagactttttcctcctgttccaagtggccaaggaaagagggaaccccagacgctggccgtccaaaatccaccaaagaaagtgacctctgagaaagtgagccagaaacatgctgagcctttgacagacactggctctgagaccccgactgcccgacggctctacactgccagcgggcctcctgagggctacgtcccctgttggccggagcccagcagctgtgggagccccgagaacgcctccagcggggatgacacagaaggtaaaatgctgggtgggaggaaaggtagacatctttgcagataagctcgtatttcccaattttctggtattgtaatacctttatctaaattcatacttggggggtgggtgagcatgttgttacactgtataatgaaccacatggtgtacctttgtattttatagccgtgaaaagtgatgcttaaaagacttgtaatgacaggaaaaaagacttcatatggaggagattgaaagtgggaatatgactatagcccatgtttgttaatgctttaggagtaccctggaactaaatacatattaaataccattaaataattgttaacagtacttgtcttggtttagcaaaatattattttcttgattttccaagtttttcagaatttctgacattgtacatcaaatctgtaatcaaggaaataccttatttcgaatgtcttttggaaaaaattattataattcctattgttgttgcatgtcgtacgaatgaaagaatatacaatattctcttaatacggttgactgttgagcatggaaaagctgaagttgcccatatactttttaccttaaaagggaaatagttgtttttcacttcacgttgatcttttttaaggtgcacaagaggaatttagagttttcaaataaaagttgtacctagatgatttgtaacaatataaactaagaaactctatattataaacattaattaatttgaatatcaac

SEQ ID NO: 5279 - protein, 115 aa, Homo sapiens
MAAHRKHVFVEKVLQRLFPPVPSGQGKREPQTLAVQNPPKKVTSEKVSQKHAEPLTDTGSETPTARRLYTASGPPEGYVPCWPEPSSCGSPENASSGDDTEGKMLGGRKGRHLCR

SEQ ID NO: 5280 - DNA, 310 bp, Homo sapiens
tcccctccggcttccgtgcctgctgtcctctccggcttcctgtctgctctgttctcacaggcacaagggtcccctacctccgtgtctactgcacccagcggacaggaccagcggcagtgaccagcttgtgactccatcagaaccttgcatgtgatcggtcacctggctgggtcctcacggtgctgccgcccactttacagatgagccacctggctggcacggcgcctcttcctttgccaggattctctaaacctccctgttccatgaggctgattccttccttcttctctcccctccttcgttcattcat

SEQ ID NO: 5281 - protein, 35 aa, Homo sapiens
MSHLAGTAPLPLPGFSKPPCSMRLIPSFFSPLLRS

SEQ ID NO: 5282 - DNA, 806 bp, Homo sapiens
ggtctgagcgcgcggcgcctgcggcggcgaacggacggacggaccgcggacggacgtactgaccccaacccgcgagccccgggagccgtcggtctgaggaggggccgcttcgccatgtcgccccgcacctgctgagcccggagcgtccgaggatgtccgcgctgaggaaggctttctcgccatccgaggcttggccctagccctgcgcggcttccctcgcggctgctaaccctctgcctgcgcccagcccagccacaatggggactgctcaggttttgcctggcattctgcagaagcattgctgtatcttaccagacaggaatacaggccgtctccaaactatagtcctattggactggtgcaccaaatatggatttggggtgtgcgtaattcagtccatagcacccaccaaaccacagaagctgccccgagctgatgtcccgctatcggtgcggctgcaggacactgtcccattgctgcatggagcctctcgctgtctgagcctcacctgaagccggcccacaccattttcttactctatgcattggagcgaaaatgtttaattgactacgatgggtgattcctaaagttatatttgactcagaaaaaaatgcattagtaaaactccctgtttgaatgtttctagtattcacagcccgggtcactgtctttctataacgattggtatctgaaataagaacatgggctgcaacttacagccttgctctttctactatataaacttccctaatcaaatatttttcattaaaaaaatgtgtttttggaaataaacagttacaacctgg

SEQ ID NO: 5283 - protein, 84 aa, Homo sapiens; identical to SEQ ID NO: 713

SEQ ID NO: 5284 - DNA, 525 bp, Homo sapiens
acgtgcagtgaccgttctcttggcagcgtctcaggctgtctggaccagctgtcacagtctcgctgtgggtgagtcacctgaggcactgtatggcggatagaaggattcattgccctgggaggttttgcctggcattctgcagaagcattgctgtatcttaccagacaggaatacagagtcgcagtgcacgctctgcggggagccggaagctcccatgtgccctaccggggaaggcgcaagatgccctctgaaagggtgacctatcccagcagttctaagccgccgttgcgtgtttttagttattaataggacttccagaacaccgctccgtggcggtggttttctaagtgacgcttttttacaaaagaggttttttcagaagcggcgacaccatagaaccgtatttagtaagtaacattttgagaagagtaaagcttcctggagaaagtcaagaaataacttgcgataattcccaacactcaagaaactcggcagcttttaaaaatagagcgtgtgcaagtacag

SEQ ID NO: 5285 - protein, 53 aa, Homo sapiens
MADRRIHCPGRFCLAFCRSIAVSYQTGIQSRSARSAGSRKLPCALPGKAQDAL

SEQ ID NO: 5286 - DNA, 789 bp, Homo sapiens
gtggtttgctgcacctattaacccatcctgttttgcctggcattctgcagaagcattgctgtatcttaccagacaggaatacagagtcgcagtgcacgctctgcggggagccggaaggcagaacatgacggagatgcgcaggaatggcaaagtacgaggggaaaacagacagtgggatatggtgaaaccgtgacggttggtgaatgagactttgatccaatgacattaaagcagatgagccacccaaaactaatatacagtgtctactgcagaagacgtgtgctcttcaccagtctgtggaccaggaaacgagccgctggggatctcagtcgcaagggtgctcaggtggccttggtgcagacactcacagctctcagactgcagagtgtgccggtcctcggagaaggggtgtccttcagggcagtgcttctctggctgatgccacagactggctagtggatggccagactcatcacactgacacccctgttcacctaaaccagatacaaccccttcctgatgcatctgttggtgccaaatcttttttttttttttgtagctttttattattaaaacagtcactgcaattatcaggagtcgtctaatgtacagtgactgctattcctattgctggtgagtgagaatattaataccatctgtagtagtgagacagcaaatatttcccgcctcacaggtgccctggtattttagtgcagaaaatattcttacagttccctggaaagcacgctttataaactcttacacattttcaaaataaagattttttaa

SEQ ID NO: 5287 - protein, 78 aa, Homo sapiens [sequence omitted]

SEQ ID NO: 5288 - DNA, 771 bp, Homo sapiens
cccgagcctggctccttccatgcaaagcctggcgaggaaggcgaggaagcctggcagggatggttttttcaccacctcgaagaccagcacgcgattccgcctctagtttgactgtttttgttgtttaaatcttattctaaccagcatcgacatagaatctgccagcagcaaaactgtgaccaggcagagaaacgggtgggggacagttcccaggcctcctctccagcccgctgtgcagcgagttcagttgcttcacgccctaagccagcgagtacccatcaacaaggctgtcagtgactgcagtgacttccaggcgccttatcctctctaagcgtcctgataaccctgagagatgttattacggccattccctttttgtcatggaggtggggggtgcggtgtcttctgagctgatactccactccgttgtgagtatctgtgggatatgaccattccctttttgtcatggaggttgggactggggggcctttctgagctgatattctgttgtgaatatctgtgggataatttcacgtcgtcgcctcccctggctctaaggagcttggacgtgtctggaggttcatggaagccacctgcaggagtgcctggcttggctttgcctttttgtcttcttcctgctcttctcactcaccttcacatgcccccacgtctgccctaccgcatccaccccatatcccttaaacaggtatttgggaaattgtgtggggcagaaggaaaatccaggagccttgttttccacatgtttccatc

SEQ ID NO: 5289 - protein, 107 aa, Homo sapiens
MTIPFLSWRLGLGGLSELIFCCEYLWDNFTSSPPLALRSLDVSGGSWKPPAGVPGLALPFCLLPALLTHLHMPPRLPYRIHPISLKQVFGKLCGAEGKSRSLVFHMF

SEQ ID NO: 5290 - DNA, 382 bp, Homo sapiens
acagagaaaaaagggatcaagttccaccattatgcaaaagggactcctgtaagccagaccctgagccgttgtcaaaacacagcttaatccccattccctgggcccgagaccctgcagcccccacgctgcccggcttccggtcttacctggggcaacctgaccaacaagaacgcggaaggccaggagccaaaaacagagactcctgatgggtaacagaaggaaaaggcaggacatcccagtgctaaggagagtgacctcagacaccagagacacagcaagtgcagcagagctgacggctctgggaacactggtcttcaaagtcttccccgttgttggttttgttgtctttatttacaaataaagtaaatatttcttatttata

SEQ ID NO: 5291 - protein, 51 aa, Homo sapiens [sequence omitted]

SEQ ID NO: 5292 - DNA, 4314 bp, Homo sapiens
attcatggggcccgcgcgcggctgcagccgggctccgtggcgctcgcagccaccgcctcctctcggctccaggtcttccccttctttttacaactgatcctgttggggattttttttttttctaaattggaacggtggggaggagcagggaggggggacctggaggaaggggagagattaggcagccatcaatttcctccagtttctcccagaacaggtgatgcttctaaattgtgatcactttcaggaggcagcactgcagctggaaggatgcgagcgacctagggtggagtggctgaggcggcagatctgaacttgcggaggataagaacccaaactttgactacatcagtccgcacctcgccagtgaagcaaaggacgggttatcttttttttttttctaagactcaaacttgggcacttgatcccttttcttggattgctttggaggagacgatttgctggcaacgttgggaacagtcaggactgtgttgtaactcttacttttaaagcgacagtagaggatcagactttttaaatgtttggaattcaagatactttaggaagaggaccaactctgaaagagaaatcgctgggcgcggagatggattcggtcaggtcctgggtccggaatgtcggagtggtggacgctaatgtcgccgcgcagagcggggtcgccctgtcccgggcccactttgagaaacagcctccttccaacttgaggaaatccaacttctttcacttcgtcctggcgctctatgacaggcagggccagccggtggagatcgagcggacggccttcgtggactttgtggagaatgacaaagaacaaggcaacgagaagaccaacaacggcactcactacaagttacagctcctctacagcaacggtgtccgcacggaacaggacctctatgtcaggctcatcgactcggtcaccaagcagcccatcgcttacgagggacagaataagaatccggaaatgtgccgagttctcctgacgcacgaagtgatgtgtagtcgatgctgcgaaaagaaaagctgtggaaaccgaaatgagactccatcggacccagtcataattgacagattctttttaaaatttttcctcaagtgcaatcagaattgtttgaaaacagcaggaaacccaagggacatgagacggtttcaggttgtgttgtcaacaacggtgaatgtggatggacacgtcctggctgtttctgacaacatgtttgttcataacaactccaagcatggacggagagcaagaagactcgatccatcggaagctaccccctgcatcaaagccattagcccgagtgaaggctggaccacaggaggagccatggtcatcatcatcggggacaacttctttgatggtctccaagtggtgtttgggactatgcttgtatggagcgagctaataacccctcatgccatcagagtacagactcctccccggcacatcccaggcgtggtagaggtgacattatcttataaatctaaacagttctgcaaaggagccccaggaaggttcatttacacagcattaaatgaacccaccatagactatggcttccagagactgcagaaggtcatccctaggcatcctggagatcctgagagattagctaaggagatgctgttgaaaagagctgcagatctagtggaagctctttatggcacaccacacaataaccaggacatcattttgaagcgagccgcagacattgctgaagctctctacagcgtccccaggaatcccagccagcttccagccctctctagctccccagcgcacagtggcatgatgggaatcaactcctatggcagccagcttggggtcagcatctcagagtcaacacaaggaaataatcaagggtacatccgcaacacaagcagcatctctccgcggggatactcttccagctccacgcctcaacagtctaattacagtacctccagcaacagtatgaatggctacagcaatgtccccatggccaacttgggtgttccaggttcaccaggatttctaaatggctcacccaccggctctccttatggaatcatgtcatcaagtcccaccgttgggtcttccagcacatcctccatcctcccattttcctcttcagtttttcctgctgtcaaacagaagagtgcctttgcccctgtcatcaggccccaaggctccccttcacctgcctgctccagcggcaatggaaatggattcagagccatgaccggacttgttgtacccccgatgtaaagaagaactgctttcttatagcacaaaactacttactctgatggaccaataatgaagaaagcactaggagctcttttgggggtgtagtggtgcccccacatgaacatgatggacacccttgggtctgcaaggagccagcatcttacttggtcccacgtcctcctatagctctgatggtggctacacaaactgaccctcttgggacaaggacaaaagatgtcattgacgtagtcagtgctaagagcagaaatgcaattctttgttatgaacattatgaaaaccaccttcctatgtttgtaaaatatttaagaaaaaattggcaaacaattaatgcttaatattttggatactatttgtttttctttgtaggaaaaaaaagttgaaagtttctattttctatgaagcctttcagataccaatttagtttatgcagaaaaaaattgaacaaaacagggtaccagcacggaagactttcttaaaacgcaacctgaattgaatgatgaaatgttgtatgtgtgtttgcttatagcttaatctctttaaaaaatgaacaaaaaaagggaaaaattttaaaatgttttacaattatttaaataaataaatgtgtaacttattgtaagtagaggtagaaattaagacctttttttggaagagagagggatttctcttcctgatgtaaaatgaaaatgatgcaaacatgtagtaacaagttttaaaggtgtgtgattattactgcagttacttactagattcttatcccctgtcctgcaccccctccttttccatcactttattgacccaagggcaagaacatgtagattcccacagaacaccctaatgcagaaacagacactctagcacatgcacaaatactccaacccatcaattcattcccagctccgtctgatttctaaatagtccacactcttgtgaatactttttaaaattcctattattagctttcaacgttctcccctgagcagtccagagaattcccatgtttgagtctgtctcaggctttcagcatcccaaggaaagaagcacctcaccttctagcagagccaaaaccacagactttcttaaccaagggaccccttgggaattcctcctcaccagaaccccaccactccctccgctttgggtgcctggttcagtacagaggtacacagccccatagaacttcagcaacacggtttggagaagataactctgtttgatggactctttagagtcagtcttagaacatccaagtcctttcctctccctgtcaatttccccttttatggcattaaactctcttgaaaaacatagctatgccactcgacagtttctagtcaagaatgagacggaatgtgggagagggatattaaaagccctaatcccctcttctgatgttcgaagaaaggcaagaccagattcttgggagatccagagattaggggcatctgcgttctatgcagcacagttacccagccctttgatgggctcttcatcgttttgtgactagctcttagaggggaagaaccttgccttagctgctaacagtggttgattcttgaaagcttatgtaatcctagagacatatccaggcatattgggattgccaataaagatgtcacttgtttccacgttggggttctccttattgactcatgagcaccacaatagagtctatacacagacttagtttggggttcttggttgggatttcagcattagaaatagatgcagcactcatggaaaaacatcatgagtgcatctgagccaattttagatgatttcattaattctgcataccttctctttgacccattgatgcaggcccacatctatccagccccaactgtcttatttgcctttaacccattctggaattacccagtatgacttatattatttctatgcacatgagaatccaaggttttagaaacctggcatgcttataactactgctgacagtccctcatagtcagggcttaaagcgccaaaatacacggaaacataagagaaaaagtcccccagtgagaaacctgattgatggaagggga

SEQ ID NO: 5293 - protein, 575 aa, Homo sapiens
MFGIQDTLGRGPTLKEKSLGAEMDSVRSWVRNVGVVDANVAAQSGVALSRAHFEKQPPSNLRKSNFFHFVLALYDRQGQPVEIERTAFVDFVENDKEQGNEKTNNGTHYKLQLLYSNGVRTEQDLYVRLIDSVTKQPIAYEGQNKNPEMCRVLLTHEVMCSRCCEKKSCGNRNETPSDPVIIDRFFLKFFLKCNQNCLKTAGNPRDMRRFQVVLSTTVNVDGHVLAVSDNMFVHNNSKHGRRARRLDPSEATPCIKAISPSEGWTTGGAMVIIIGDNFFDGLQVVFGTMLVWSELITPHAIRVQTPPRHIPGVVEVTLSYKSKQFCKGAPGRFIYTALNEPTIDYGFQRLQKVIPRHPGDPERLAKEMLLKRAADLVEALYGTPHNNQDIILKRAADIAEALYSVPRNPSQLPALSSSPAHSGMMGINSYGSQLGVSISESTQGNNQGYIRNTSSISPRGYSSSSTPQQSNYSTSSNSMNGYSNVPMANLGVPGSPGFLNGSPTGSPYGIMSSSPTVGSSSTSSILPFSSSVFPAVKQKSAFAPVIRPQGSPSPACSSGNGNGFRAMTGLVVPPM

SEQ ID NO: 5294 - DNA, 2724 bp, Homo sapiens
attcatggggcccgcgcgcggctgcagccgggctccgtggcgctcgcagccaccgcctcctctcggctccaggtcttccccttctttttacaactgatcctgttggggattttttttttttctaaattggaacggtggggaggagcagggaggggggacctggaggaaggggagagattaggcagccatcaatttcctccagtttctcccagaacaggtgatgcttctaaattgtgatcactttcaggaggcagcactgcagctggaaggatgcgagcgacctagggtggagtggctgaggcggcagatctgaacttgcggaggataagaacccaaactttgactacatcagtccgcacctcgccagtgaagcaaaggacgggttatcttttttttttttctaagactcaaacttgggcacttgatcccttttcttggattgctttggaggagacgatttgctggcaacgttgggaacagtcaggactgtgttgtaactcttacttttaaagcgacagtagaggatcagactttttaaatgtttggaattcaagatactttaggaagaggaccaactctgaaagagaaatcgctgggcgcggagatggattcggtcaggtcctgggtccggaatgtcggagtggtggacgctaatgtcgccgcgcagagcggggtcgccctgtcccgggcccactttgagaaacagcctccttccaacttgaggaaatccaacttctttcacttcgtcctggcgctctatgacaggcagggccagccggtggagatcgagcggacggccttcgtggactttgtggagaatgacaaagaacaaggcaacgagaagaccaacaacggcactcactacaagttacagctcctctacagcaacggtgtccgcacggaacaggacctctatgtcaggctcatcgactcggtcaccaagcagcccatcgcttacgagggacagaataagaatccggaaatgtgccgagttctcctgacgcacgaagtgatgtgtagtcgatgctgcgaaaagaaaagctgtggaaaccgaaatgagactccatcggacccagtcataattgacaggtagggggaaaaagtgatttttcaatcatttttggttccttttcttcatgaacctcaactctgagtactgatccatggagctttgctgtcaagttggtttcatgttatttcaagtcactaagctcatccaacaaaggcctcctcatgctggcctttcttggaagaagccagaatcttcctttggaacacgtgtctctaaatctgtggtggagtcttttccaggtgcaccagcttcagcctaataagtagtatgtgtggtgcaggatataagcgatggcacctctcctttcgggcagggtatggtctcaatcagttttctagaagaagcaatgtgccccaagttaagtggcacccactttattattctcggtgattgctgcttggctggaagattatcaattcagattacggtttaggggattatggcaagctctctgctgtgttcagggagattcctttctaccatggaggattgcattctgtgttctatgttatattcagaatgggaaagattctttgggacaagacactaattcactgaaatgtgatttaggcatcctcagctgtctgttttttgtgattggaaacagaacttacaaaccaatgaagaaataccaaattaacttccagaaatcatgtaatttttaagaaaccccatattcccatccctaatttttttctctttcgttaaaaaacggaataattccctattgcttctttctttgggttttcacatttctagccaggtcctgaaatggattggagagaccacagtctccaaagttgttattccaatattccaacgaattctcagttgggagaatggaacctctggcattcttcccagaaagccagcttggtttcttcgtggaaagtatagcatagcctaggaactgaggaggctggaattctgatcttgtcctagcttctgaccttggacaaagcactcagcatctttgttcttcaataatataatgatgggttaggaggtgcagtcacttctgtaggcttcaagaggctactgaaatatcaatggcagctttgcagtgttctctgagatgcttgaagaggatgatgggcaaatataaaatgtttgttggatgtgtatagtgtctttgccattttagaaggttccagtgagctgcgttttagggagctattggggttgctctggtcttttttgaaagtacagagaagcttaaatatatagagttgcaaggactctttggagtcagtcattttcctcatctagctgaaaaatctgaacgctgagcggtggcatgacttgcccgtggttgtgcagctggttgggcagagctggcattagaacacagctgtccttacttccaggctgggtgccgtaactcacgcctgtaatcccagcacttaggaagaccgaggtgggcagatcacttgaggtcgggggtttgcgaccagcctggtcaacatagtggaccccagactttactaaaaatacaaaaattagtcaggcatggtggcacatgcctgtaatcccagctacttgggaggctgaggcaggaaaatcgcttgaacccaggaggcacagattgcagtgagccaagatcacgccactgcactccagcctgggtgacagagacagtgagactctgtctc

SEQ ID NO: 5295 - protein, 184 aa, Homo sapiens
MFGIQDTLGRGPTLKEKSLGAEMDSVRSWVRNVGVVDANVAAQSGVALSRAHFEKQPPSNLRKSNFFHFVLALYDRQGQPVEIERTAFVDFVENDKEQGNEKTNNGTHYKLQLLYSNGVRTEQDLYVRLIDSVTKQPIAYEGQNKNPEMCRVLLTHEVMCSRCCEKKSCGNRNETPSDPVIIDR

SEQ ID NO: 5296 - DNA, 659 bp, Homo sapiens
atcaaaaggaactttccaccatttcattgaacctgtgagtgaaaatgatcccaaaagtatagagaaaataaagaacaaatcgggcagccattagaaccaaaacagttctgaggagctcccaggctgcaatgtggtgcgaaatgttttatggacagaaaatggaaatgaggtgcagaaattggagacggaggtttgctcttgttgtccaggctggagtgaaatggcgtgatctcggctcactgcatcctctgcctcagcctcccgagtagctggaattacaggcaccctccaccatgcccagctaatttttgtattttcagtagagacagggtttcaccatgttggccaggctggtcttaaactcctaacctcaggtgatccgcccacgtcggcctcccaaagtgctgggattacaggcgtgaaccaccgggcccagccaagtgttttaatttttaaaaactatttgaccatatgaaaatatagatgttccattaaatatatatagcctaagaaatataatcagcaatgcagtaaaagattatgtatacggatgctcctgacagttggatttacaatagggaaaagctggaaacaacctaaatatttgaaaaaagagaatggtaaatacatcaaaaatacaataaatacagtgttaagtg

SEQ ID NO: 5297 - protein, 46 aa, Homo sapiens
MWCEMFYGQKMEMRCRNWRRRFALVVQAGVKWRDLGSLHPLPQPPE

SEQ ID NO: 5298 - DNA, 553 bp, Homo sapiens
atgcaattcatcacagtccacaaagcacagttcctaacagattctgaaaacgtgattttaaaaaaaatgagatttatccgtaaacgagggctaggctacagttggtagggcggctgtcaattcttctacggagttttaacctacactcaatggatgcatgaaaaaaagaaatgaaatgatttttttagctactttaaaaaataaaggtatttcttcataacaacgcaaatgaactaagacaacaagtctctgtgttctccttcatctatcatactacccgaggtttgtttacgtggtaaagacaaggttcggagagaaatggttgaaaccagcatagcttcttgagacacaatgacacttatgccacatgctattggccagagcaagtcacagaacatctggattcaagaggagggaaatggattccacaccttgatggaggagatgcaaagtcatatcacttgggacatggatacagggaggggtgcaatttgggatgtttttgcaattaacctaccacaggcttaaggaggcttttaggatttaccttctg

SEQ ID NO: 5299 - protein, 58 aa, Homo sapiens [sequence omitted]

SEQ ID NO: 5300 - DNA, 2561 bp, Homo sapiens
gaatcgggcgcacacgcctcctaccaaaatcacagccccttgtggagcccgagctctcattcacagctttctagagaaatctgagcccgaacctgccagaataggggatctcacccacccagttcagcagcgaggacacctgcagaaatacattcccaaagcaaggctgggcggccgtgtgaagtaagcaatggcctcagttttgcttctgttttggatgaacaccaccacatagggcctgaatgtgaaagaagaccctctatttgtctgttccggggcagcctggtagtaaaacactgttgaatgggccacagtttcagcagaccatcaggtgaatgggaccagtctctcttcttccaaaatatcagaagttaaacacttggaacggagatttggccaagatgacccatttacaggctggactcagtccagagactatagagaaagctcgcctggaactgaatgaaaaccccgatgttttacatcaggatattcagcaagtcagggacatgatcatcaccaggcctgacattggatttttacgtacagatgatgccttcatcctgagatttctccgagccaggaagtttcaccaagcggatgcctttagactcctggctcagtatttccagtaccgccagctaaacctggacatgttcaaaaacttcaaggcagatgatcccggcattaagagggctctgatcgatgggttccccggggtgctggaaaaccgagaccattacggcaggaagattcttttgctgtttgcagccaattgggatcagagtaggaactccttcacagacatccttcgtgccatcctgctgtcattggaagtcctaatcgaagatccggagcttcagataaatggcttcattttaattatagactggagtaatttttccttcaaacaagcctccaaactgacaccttcaatccttaaactggccattgaagggttgcaggtatgttcaatgaatgcgcaatacaagaccatgtgtggcaacatactttttaaaaaattatcgcaaccaaagtaatatttatcctttggagtggaaaaaggaaacttggattaaattcatctgagtactccatgtttttgcctcagccagagttttagatgctttttaaaattaactttcattttcattaataactccaaattactgttaccccaggcacaaattatcctctgtagcaataatgaataaagctccaagatgttcggcttaatccatcagagagttcacaaaaattaaaactaggaaacatctgctttatgatcatgtcatatacaggggtggcatggggctttcagaagcatttttgtgccccagaaatgcaccctgcagatcactacttccaagagtgtcacgtgctaccgagcttgcgcttaagtggatcacttcagtgcaaacaaaggaagcagatgaaattacctcctgtttgtatgaccacttatgaggattttggagaagaggtttttgggctacatggagggtagaatggttagtctttagggttctttctactttctaaggatctgggattctatgagaagtaactcagaaaggcaatgctgcttagctttctggtgacacattattacaaattactattactataacaaattaagggcatagtttggagacattttgaatcagtatagataaaacttctgtcccttcttaatttcataggcagattaactctatggagtgaccctctccccatagacggcagttataggcagctatgtatatagcaaaatatgacattctcagatcaagtagtcattactcatgctcttcaaagtgcaagactaggacccatttcaatcatccattacactccactgcaataattggtgggtctgtttcttacattatgacttcttcctatttggcccccagcaaatatctggcacctagtgggcctctgataagcatgtatttattgaatggatcttattttattgaaatgtatcctatttcccagaggaggagaagtagggcaggcatttcagaaaagaaacagcaagtccacattgttccagggatgccacattgtcctgggtagtgtatttgggggacatttgtaaaattgcttttgaatgtacagactacatggagcatcctgccttgcctaatcatagacttctgtgttcttttccatcagtcacttcctcttagctctaactccttttctccaacctcctctcacctaagcctctgaacatctgatctctctctctttaaagcttttatcaaaggaagttttaaagtaagcttcagggcttatatcatgcgcttaaattatgctgaccatatctctaggaatttctgtacaagctgcatgtaatcttaccttttttaaaaaagataatttattacatgtgcaagtaactgtgattcaagttctagccctttatacattttttttcttaaatcagtaagaaaaatgtcctttatccaaccctatgatccaatttttctccctgaaaatgtatggattacttaatacgtcccttgaaaagttcaatacattgatgtgaacct

SEQ ID NO: 5301 - protein, 234 aa, Homo sapiens
MGPVSLLPKYQKLNTWNGDLAKMTHLQAGLSPETIEKARLELNENPDVLHQDIQQVRDMIITRPDIGFLRTDDAFILRFLRARKFHQADAFRLLAQYFQYRQLNLDMFKNFKADDPGIKRALIDGFPGVLENRDHYGRKILLLFAANWDQSRNSFTDILRAILLSLEVLIEDPELQINGFILIIDWSNFSFKQASKLTPSILKLAIEGLQVCSMNAQYKTMCGNILFKKLSQPK

SEQ ID NO: 5302 - DNA, 1477 bp, Homo sapiens
gaatcgggcgcacacgcctcctaccaaaatcacagccccttgtggagcccgagctctcattcacagctttctagagaaatctgagcccgaacctgccagaataggggatctcacccacccagttcagcagcgaggacacctgcagaaatacattcccaaagcaaggctgggcggccgtgtgaagtaagcaatggcctcagttttgcttctgttttggatgaacaccaccacatagggcctgaatgtgaaagaagaccctctatttgtctgttccggggcagcctggtagtaaaacactgttgaatgggccacagtttcagcagaccatcaggtgaatgggaccagtctctcttcttccaaaatatcagaagttaaacacttggaacggagatttggccaagatgacccatttacaggctggactcagtccagagactatagagaaagctcgcctggaactgaatgaaaaccccgatgttttacatcaggatattcagcaagtcagggacatgatcatcaccaggcctgacattggatttttacgtacagatgatgccttcatcctgagatttctccgagccaggaagtttcaccaagcggatgcctttagactcctggctcagtatttccagtaccgccagctaaacctggacatgttcaaaaacttcaaggcagatgatcccggcattaagagggctctgatcgatgggttccccggggtgctggaaaaccgagaccattacggcaggaagattcttttgctgtttgcagccaattgggatcagagtaggaactccttcacagacatccttcgtgccatcctgctgtcattggaagtcctaatcgaagatccggagcttcagataaatggcttcattttaattatagactggagtaatttttccttcaaacaagcctccaaactgacaccttcaatccttaaactggccattgaagggttgcaggacagctttcctgcccgctttggaggagtccactttgtcaaccagccctggtacattcatgccctctacacactcatcaagccatttcttaaagacaagaccaggaaacggatctcagtctgtggtagaagctgggaccctgaaacatgaggagaagggagagaatgagaacacccagccactcctggctctggactgaaccctgagtcaccccaatgctcctgcacactggccttcagtggtatcagccacccaggaagcacatgcacaactgacccatgcagacacgtgtgttctgcttgacacaaggtcctccactcctgaacccctgcagtgactgtcaccagccatcggtctgagcagccaaagttggacaaagacttgagagatgctttttttttcccccagtgaggggactggaggatgatgcaaggcatttatgtaaaaaagattctccctcctttcatatttattgtagtaaattgaaaaaataaagactaaatttgatggac

SEQ ID NO: 5303 - protein, 259 aa, Homo sapiens
MGPVSLLPKYQKLNTWNGDLAKMTHLQAGLSPETIEKARLELNENPDVLHQDIQQVRDMIITRPDIGFLRTDDAFILRFLRARKFHQADAFRLLAQYFQYRQLNLDMFKNFKADDPGIKRALIDGFPGVLENRDHYGRKILLLFAANWDQSRNSFTDILRAILLSLEVLIEDPELQINGFILIIDWSNFSFKQASKLTPSILKLAIEGLQDSFPARFGGVHFVNQPWYIHALYTLIKPFLKDKTRKRISVCGRSWDPET

SEQ ID NO: 5304 - DNA, 1713 bp, Homo sapiens
gaatcgggcgcacacgcctcctaccaaaatcacagccccttgtggagcccgagctctcattcacagctttctagagaaatctgagcccgaacctgccagaataggggatctcacccacccagttcagcagcgaggacacctgcagaaatacattcccaaagcaaggctgggcggccgtgtgaagtaagcaatggcctcagttttgcttctgttttggatgaacaccaccacatagggcctgaatgtgaaagaagaccctctatttgtctgttccggggcagcctggtagtaaaacactgttgaatgggccacagtttcagcagaccatcaggtgaatgggaccagtctctcttcttccaaaatatcagaagttaaacacttggaacggagatttggccaagatgacccatttacaggctggactcagtccagagactatagagaaagctcgcctggaactgaatgaaaaccccgatgttttacatcaggatattcagcaagtcagggacatgatcatcaccaggcctgacattggatttttacgtacagatgatgccttcatcctgagatttctccgagccaggaagtttcaccaagcggatgcctttagactcctggctcagtatttccagtaccgccagctaaacctggacatgttcaaaaacttcaaggcagatgatcccggcattaagagggctctgatcgatgggttccccggggtgctggaaaaccgagaccattacggcaggaagattcttttgctgtttgcagccaattgggatcagagtaggaactccttcacagacatccttcgtgccatcctgctgtcattggaagtcctaatcgaagatccggagcttcagataaatggcttcattttaattatagactggagtaatttttccttcaaacaagcctccaaactgacaccttcaatccttaaactggccattgaagggttgcaggacagctttcctgcccgctttggaggagtccactttgtcaaccagccctggtacattcatgccctctacacactcatcaagccatttcttaaagacaagaccaggaaacggattttcctgcatggaaacaatttaaacagccttcaccagctaatacaccctgaatttttgccctctgaatttggaggaactcttcctccttatgacatgggaacttgggcccggacgttactcggtcccgactacagcgatgaaaatgactatactcacacatcctataatgcaatgcacgtgaagcatacgtcctcgaatctggagagagaatgctcacccaagctgatgaaaagatctcagtctgtggtagaagctgggaccctgaaacatgaggagaagggagagaatgagaacacccagccactcctggctctggactgaaccctgagtcaccccaatgctcctgcacactggccttcagtggtatcagccacccaggaagcacatgcacaactgacccatgcagacacgtgtgttctgcttgacacaaggtcctccactcctgaacccctgcagtgactgtcaccagccatcggtctgagcagccaaagttggacaaagacttgagagatgctttttttttcccccagtgaggggactggaggatgatgcaaggcatttatgtaaaaaagattctccctcctttcatatttattgtagtaaattgaaaaaataaagactaaatttgatggac

SEQ ID NO: 5305 - protein, 354 aa, Homo sapiens; identical to SEQ ID NO: 715

SEQ ID NO: 5306 - DNA, 5369 bp, Homo sapiens
gaatcgggcgcacacgcctcctaccaaaatcacagccccttgtggagcccgagctctcattcacagctttctagagaaatctgagcccgaacctgccagaataggggatctcacccacccagttcagcagcgaggacacctgcagaaatacattcccaaagcaaggctgggcggccgtgtgaagtaagcaatggcctcagttttgcttctgttttggatgaacaccaccacatagggcctgaatgtgaaagaagaccctctatttgtctgttccggggcagcctggtagtaaaacactgttgaatgggccacagtttcagcagaccatcaggtgaatgggaccagtctctcttcttccaaaatatcagaagttaaacacttggaacggagatttggccaagatgacccatttacaggctggactcagtccagagactatagagaaagctcgcctggaactgaatgaaaaccccgatgttttacatcaggatattcagcaagtcagggacatgatcatcaccaggcctgacattggatttttacgtacagatgatgccttcatcctgagatttctccgagccaggaagtttcaccaagcggatgcctttagactcctggctcagtatttccagtaccgccagctaaacctggacatgttcaaaaacttcaaggcagatgatcccggcattaagagggctctgatcgatgggttccccggggtgctggaaaaccgagaccattacggcaggaagattcttttgctgtttgcagccaattgggatcagagtaggaactccttcacagacatccttcgtgccatcctgctgtcattggaagtcctaatcgaagatccggagcttcagataaatggcttcattttaattatagactggagtaatttttccttcaaacaagcctccaaactgacaccttcaatccttaaactggccattgaagggttgcaggacagctttcctgcccgctttggaggagtccactttgtcaaccagccctggtacattcatgccctctacacactcatcaagccatttcttaaagacaagaccaggaaacggattttcctgcatggaaacaatttaaacagccttcaccagctaatacaccctgaatttttgccctctgaatttggaggaactcttcctccttatgacatgggaacttgggcccggacgttactcggtcccgactacagcgatgaaaatgactatactcacacatcctataatgcaatgcacgtgaagcatacgtcctcgaatctggagagagaatgctcacccaagctgatgaaaagatctcagtctgtggtagaagctgggaccctgaaacatgaggagaagggagagaatgagaacacccagccactcctggctctggactgaaccctgagtcaccccaatgctcctgcacactggccttcagtggtatcagccacccaggaagcacatgcacaactgacccatgcagacacgtgtgttctgcttgacacaaggtcctccactcctgaacccctgcagtgactgtcaccagccatcggtctgagcagccaaagttggacaaagacttgagagatgctttttttttcccccagtgaggggactggaggatgatgcaaggcatttatgtaaaaaagattctccctcctttcatatttattgtagtaaattgaaaaaataaagactaaatttgatggacacactgcattaggacaagaatttttctgaggtatcacacagggaccctctccagtttttgaaaattaagtgcatttccaagtaaatgtatcagagttaaactgtacagacaccactgtcaagtttcatgtagtacaaagccctgagacaatagtatctccagtaatttccattcttactgaattatttcctttgacctcatcaccagcatcgaattgttcagcctaagagcatgttctcataggtctgggtatttgcaaagtttgcttattttgatgatatcctgcaaaaaattattttgatgtcacatctcttgtcaggtcactagctgactgtcatgagctgacgttaaaggaagacacatggacgtgaaatacgattatttcatctgagcaatgtgagttaccacaggcagctcaaaagcccattagtgcagcatgtgtctgcagaggagatgtctcatgaaaatcacatgtcagtgattaatgaatccattccagttgcctcaactgggtcactacagcaaagaaaagtgctatcaaaccatttacccttgcccccacaaccctcctgcaaccattaaagatgtggagaaagaccatggttgttgctgagagggtaaatattcaatcatggagcatgacccatatggatggctaaatatgcaagtactgaagtaagagaagactagaaatgcaggatgaaatgtcaaaggtcattttatttacctagtctccttagaaatggagtccccaactactcattcaaaagaaatcagacataaaataaacagacatcatatatgatatccttacttgtgccatgttttccaagaccagtgcatatttttagacatctcttattcgcccagccatctgcatgacatgggtatttattagtattaccagttggtgctcaaagtcaaacaaaaatattttagttaataatgggcagtaaaatatgattttacattattttaaatatttgggagagttaatttgttagctaaataattcaagggaaagagattattcaactggtcataatcacccctgataatattattactaatcttaattatttattacatcatctctttctcaatggatctaatgttttaattttttcccctattggtagagaacaataacagaagtaatttttatattatacacttggagaaataaagttgaaacagaattaaaaatatttctcaaacaactgtatcacaatataaattaaactaattcatttttgtgtagacatacgaaatcacaaaaataataacactgaaataattctaccaatgcagtgatggaaacacttttcttatgtaccaagacatagataggtaagagaaataaagaattgaagtgaattagaaaatccattttattgcttgggtttaaaatagttgtgggatacaagtatttacaatgctattggagtcaattattgacaacactttgcaacagtaataccatttctagcttttcaattggcaatacttagaaccttactgtagtgacctgattttaaataccatattatatttactaagttaagagctagtttttactctcttccataatttcattacatgaatgtaagatgatggctcaaaaatgacgacttatagtttgaatttatgtgtatgcaatatacatatgagaaccaaattcaacaagtgacatgaatgttactacatgaacattgaattgtattgcccttgtcagttatttcctctgttcaataaatactgaaggtcacaaacacctttttacttttcaagagtttgccttctcttctcgattttagtaattaatttggatatttttcctcccatgcctcttcatctgatttagtgggatgttttcaataccagcaaaacaaaagaacaggaaaagtattttgcaaactcatctactggaagctaatctccttaaggtcaagcaaaaagggtcaatttcaatttcaaagagctgttctttaaatgagataaagaaagtctccttttgtttttagatggaaaagaaagcacaagttttttctacctgtgaatgaactttggtgacctatatgtgccattcatgcagcatttttgttcatattggcttagaattcagtgcatgaatatcattacattcttatatctaacattcctagttagctttgattcaaaatatacaaaatctgatacatgaatactttgctagattaatgacttgatcatctttggaatgagtaggcaagacgatttttacctattatttctatgttgtgggtaatgttaaaactaaatacagatgataataattgctatttcacagtgatgtttaaaatggcagagatttctcaagccagagagatgggacagtcttccaaactctttcatcaaaaaggaaagtaatctggacctcctacgcccaagaaaaacatcctggcattcttggtaaccttttactctgccatccttaatctttctacagaattgtagcagaaatcatctccaagactgaagagctggcttcctgacattcacatggatctaccataggcaaagacactgtgttcccagcccttgcctcatggatggcaaagccgccaggagccagacaccctagcagccacctatccacccaaccctgaaagaacatagttttatttccgtgaactatactttttccccagaagctctaataattggcattaaaaaaatttgcatctgggatttttataacaatataaaataattccatgctcttttttcggtgtgaaaagttcctctttgaaagaaataggattttgtcaatatctccaccactagcatagtgagaagaggatctcaatcaagataaaaaaaaccaaacgatttgagagttgggatgggtacagttcatagacactgacataatgagctctttcttttttgttaggaaaataaaactgcttttttcatgagtatcttttactaagaagaattaaaagagggaagtctgagttccccagtaatgctaccattaaatagctagaagtaaagcatttatacagcttgtcattaaaataaacaaaaatgtagtggtacatgatgacaaaatagtctagctacactagaaaaatataactgcatagaaaaattacaaactaaagcaatccattcacagtttctacatatgttctcattatacattgaattagacctattctatgtggaaaaaatatctttggctggtaaggtagaagctatcaaatgttcaccttaaatactggcagaagaccagtgctgtcatgagatgacacacagcagggtgtttcctaaatgaattgcagcgaggcaaatattccctttagtgtcttctgaccctaggaggaggctttgaattactcgggctgcaagtcaagggaattgactcttggtgttcgaaattctatcctcacacccaaggagatggaaccagaaaggcagcctctctccagagtttcccaagcttgcatgaattcatgctaaattgctggaaggctgcgtctctgctgtggtgtcagttccggatgccacacatccacgatgaatatcagccggaaagatgaggcatcctgccatacctcgtgctcaaaggagtcatcaaagatgagcaccttgccttcctcccaggtcct

SEQ ID NO: 5307 - protein, 354 aa, Homo sapiens; identical to SEQ ID NO: 715

SEQ ID NO: 5308 - DNA, 5133 bp, Homo sapiens
gaatcgggcgcacacgcctcctaccaaaatcacagccccttgtggagcccgagctctcattcacagctttctagagaaatctgagcccgaacctgccagaataggggatctcacccacccagttcagcagcgaggacacctgcagaaatacattcccaaagcaaggctgggcggccgtgtgaagtaagcaatggcctcagttttgcttctgttttggatgaacaccaccacatagggcctgaatgtgaaagaagaccctctatttgtctgttccggggcagcctggtagtaaaacactgttgaatgggccacagtttcagcagaccatcaggtgaatgggaccagtctctcttcttccaaaatatcagaagttaaacacttggaacggagatttggccaagatgacccatttacaggctggactcagtccagagactatagagaaagctcgcctggaactgaatgaaaaccccgatgttttacatcaggatattcagcaagtcagggacatgatcatcaccaggcctgacattggatttttacgtacagatgatgccttcatcctgagatttctccgagccaggaagtttcaccaagcggatgcctttagactcctggctcagtatttccagtaccgccagctaaacctggacatgttcaaaaacttcaaggcagatgatcccggcattaagagggctctgatcgatgggttccccggggtgctggaaaaccgagaccattacggcaggaagattcttttgctgtttgcagccaattgggatcagagtaggaactccttcacagacatccttcgtgccatcctgctgtcattggaagtcctaatcgaagatccggagcttcagataaatggcttcattttaattatagactggagtaatttttccttcaaacaagcctccaaactgacaccttcaatccttaaactggccattgaagggttgcaggacagctttcctgcccgctttggaggagtccactttgtcaaccagccctggtacattcatgccctctacacactcatcaagccatttcttaaagacaagaccaggaaacggatctcagtctgtggtagaagctgggaccctgaaacatgaggagaagggagagaatgagaacacccagccactcctggctctggactgaaccctgagtcaccccaatgctcctgcacactggccttcagtggtatcagccacccaggaagcacatgcacaactgacccatgcagacacgtgtgttctgcttgacacaaggtcctccactcctgaacccctgcagtgactgtcaccagccatcggtctgagcagccaaagttggacaaagacttgagagatgctttttttttcccccagtgaggggactggaggatgatgcaaggcatttatgtaaaaaagattctccctcctttcatatttattgtagtaaattgaaaaaataaagactaaatttgatggacacactgcattaggacaagaatttttctgaggtatcacacagggaccctctccagtttttgaaaattaagtgcatttccaagtaaatgtatcagagttaaactgtacagacaccactgtcaagtttcatgtagtacaaagccctgagacaatagtatctccagtaatttccattcttactgaattatttcctttgacctcatcaccagcatcgaattgttcagcctaagagcatgttctcataggtctgggtatttgcaaagtttgcttattttgatgatatcctgcaaaaaattattttgatgtcacatctcttgtcaggtcactagctgactgtcatgagctgacgttaaaggaagacacatggacgtgaaatacgattatttcatctgagcaatgtgagttaccacaggcagctcaaaagcccattagtgcagcatgtgtctgcagaggagatgtctcatgaaaatcacatgtcagtgattaatgaatccattccagttgcctcaactgggtcactacagcaaagaaaagtgctatcaaaccatttacccttgcccccacaaccctcctgcaaccattaaagatgtggagaaagaccatggttgttgctgagagggtaaatattcaatcatggagcatgacccatatggatggctaaatatgcaagtactgaagtaagagaagactagaaatgcaggatgaaatgtcaaaggtcattttatttacctagtctccttagaaatggagtccccaactactcattcaaaagaaatcagacataaaataaacagacatcatatatgatatccttacttgtgccatgttttccaagaccagtgcatatttttagacatctcttattcgcccagccatctgcatgacatgggtatttattagtattaccagttggtgctcaaagtcaaacaaaaatattttagttaataatgggcagtaaaatatgattttacattattttaaatatttgggagagttaatttgttagctaaataattcaagggaaagagattattcaactggtcataatcacccctgataatattattactaatcttaattatttattacatcatctctttctcaatggatctaatgttttaattttttcccctattggtagagaacaataacagaagtaatttttatattatacacttggagaaataaagttgaaacagaattaaaaatatttctcaaacaactgtatcacaatataaattaaactaattcatttttgtgtagacatacgaaatcacaaaaataataacactgaaataattctaccaatgcagtgatggaaacacttttcttatgtaccaagacatagataggtaagagaaataaagaattgaagtgaattagaaaatccattttattgcttgggtttaaaatagttgtgggatacaagtatttacaatgctattggagtcaattattgacaacactttgcaacagtaataccatttctagcttttcaattggcaatacttagaaccttactgtagtgacctgattttaaataccatattatatttactaagttaagagctagtttttactctcttccataatttcattacatgaatgtaagatgatggctcaaaaatgacgacttatagtttgaatttatgtgtatgcaatatacatatgagaaccaaattcaacaagtgacatgaatgttactacatgaacattgaattgtattgcccttgtcagttatttcctctgttcaataaatactgaaggtcacaaacacctttttacttttcaagagtttgccttctcttctcgattttagtaattaatttggatatttttcctcccatgcctcttcatctgatttagtgggatgttttcaataccagcaaaacaaaagaacaggaaaagtattttgcaaactcatctactggaagctaatctccttaaggtcaagcaaaaagggtcaatttcaatttcaaagagctgttctttaaatgagataaagaaagtctccttttgtttttagatggaaaagaaagcacaagttttttctacctgtgaatgaactttggtgacctatatgtgccattcatgcagcatttttgttcatattggcttagaattcagtgcatgaatatcattacattcttatatctaacattcctagttagctttgattcaaaatatacaaaatctgatacatgaatactttgctagattaatgacttgatcatctttggaatgagtaggcaagacgatttttacctattatttctatgttgtgggtaatgttaaaactaaatacagatgataataattgctatttcacagtgatgtttaaaatggcagagatttctcaagccagagagatgggacagtcttccaaactctttcatcaaaaaggaaagtaatctggacctcctacgcccaagaaaaacatcctggcattcttggtaaccttttactctgccatccttaatctttctacagaattgtagcagaaatcatctccaagactgaagagctggcttcctgacattcacatggatctaccataggcaaagacactgtgttcccagcccttgcctcatggatggcaaagccgccaggagccagacaccctagcagccacctatccacccaaccctgaaagaacatagttttatttccgtgaactatactttttccccagaagctctaataattggcattaaaaaaatttgcatctgggatttttataacaatataaaataattccatgctcttttttcggtgtgaaaagttcctctttgaaagaaataggattttgtcaatatctccaccactagcatagtgagaagaggatctcaatcaagataaaaaaaaccaaacgatttgagagttgggatgggtacagttcatagacactgacataatgagctctttcttttttgttaggaaaataaaactgcttttttcatgagtatcttttactaagaagaattaaaagagggaagtctgagttccccagtaatgctaccattaaatagctagaagtaaagcatttatacagcttgtcattaaaataaacaaaaatgtagtggtacatgatgacaaaatagtctagctacactagaaaaatataactgcatagaaaaattacaaactaaagcaatccattcacagtttctacatatgttctcattatacattgaattagacctattctatgtggaaaaaatatctttggctggtaaggtagaagctatcaaatgttcaccttaaatactggcagaagaccagtgctgtcatgagatgacacacagcagggtgtttcctaaatgaattgcagcgaggcaaatattccctttagtgtcttctgaccctaggaggaggctttgaattactcgggctgcaagtcaagggaattgactcttggtgttcgaaattctatcctcacacccaaggagatggaaccagaaaggcagcctctctccagagtttcccaagcttgcatgaattcatgctaaattgctggaaggctgcgtctctgctgtggtgtcagttccggatgccacacatccacgatgaatatcagccggaaagatgaggcatcctgccatacctcgtgctcaaaggagtcatcaaagatgagcaccttgccttcctcccaggtcct

SEQ ID NO: 5309 - protein, 259 aa, Homo sapiens; identical to SEQ ID NO: 5303

SEQ ID NO: 5310 - DNA, 2878 bp, Homo sapiens
ctcctaccaaaatcacagccccttgtggagcccgagctctcattcacagctttctagagaaatctgagcccgaacctgccagaataggggatctcacccacccagttcagcagcgaggacacctgcagaaatacattcccaaagcaaggctgggcggccgtgtgaaggaactccttcacagacatccttcgtgccatcctgctgtcattggaagtcctaatcgaagatccggagcttcagataaatggcttcattttaattatagactggagtaatttttccttcaaacaagcctccaaactgacaccttcaatccttaaactggccattgaagggttgcaggacagctttcctgcccgctttggaggagtccactttgtcaaccagccctggtacattcatgccctctacacactcatcaagccatttcttaaagacaagaccaggaaacggattttcctgcatggaaacaatttaaacagccttcaccagctaatacaccctgaatttttgccctctgaatttggaggaactcttcctccttatgacatgggaacttgggcccggacgttactcggtcccgactacagcgatgaaaatgactatactcacacatcctataatgcaatgcacgtgaagcatacgtcctcgaatctggagagagaatgctcacccaagctgatgaaaagatctcagtctgtggtagaagctgggaccctgaaacatgaggagaagggagagaatgagaacacccagccactcctggctctggactgaaccctgagtcaccccaatgctcctgcacactggccttcagtggtatcagccacccaggaagcacatgcacaactgacccatgcagacacgtgtgttctgcttgacacaaggtcctccactcctgaacccctgcagtgactgtcaccagccatcggtctgagcagccaaagttggacaaagacttgagagatgctttttttttcccccagtgaggggactggaggatgatgcaaggcatttatgtaaaaaagattctccctcctttcatatttattgtagtaaattgaaaaaataaagactaaatttgatggacacactgcattaggacaagaatttttctgaggtatcacacagggaccctctccagtttttgaaaattaagtgcatttccaagtaaatgtatcagagttaaactgtacagacaccactgtcaagtttcatgtagtacaaagccctgagacaatagtatctccagtaatttccattcttactgaattatttcctttgacctcatcaccagcatcgaattgttcagcctaagagcatgttctcataggtctgggtatttgcaaagtttgcttattttgatgatatcctgcaaaaaattattttgatgtcacatctcttgtcaggtcactagctgactgtcatgagctgacgttaaaggaagacacatggacgtgaaatacgattatttcatctgagcaatgtgagttaccacaggcagctcaaaagcccattagtgcagcatgtgtctgcagaggagatgtctcatgaaaatcacatgtcagtgattaatgaatccattccagttgcctcaactgggtcactacagcaaagaaaagtgctatcaaaccatttacccttgcccccacaaccctcctgcaaccattaaagatgtggagaaagaccatggttgttgctgagagggtaaatattcaatcatggagcatgacccatatggatggctaaatatgcaagtactgaagtaagagaagactagaaatgcaggatgaaatgtcaaaggtcattttatttacctagtctccttagaaatggagtccccaactactcattcaaaagaaatcagacataaaataaacagacatcatatatgatatccttacttgtgccatgttttccaagaccagtgcatatttttagacatctcttattcgcccagccatctgcatgacatgggtatttattagtattaccagttggtgctcaaagtcaaacaaaaatattttagttaataatgggcagtaaaatatgattttacattattttaaatatttgggagagttaatttgttagctaaataattcaagggaaagagattattcaactggtcataatcacccctgataatattattactaatcttaattatttattacatcatctctttctcaatggatctaatgttttaattttttcccctattggtagagaacaataacagaagtaatttttatattatacacttggagaaataaagttgaaacagaattaaaaatatttctcaaacaactgtatcacaatataaattaaactaattcatttttgtgtagacatacgaaatcacaaaaataataacactgaaataattctaccaatgcagtgatggaaacacttttcttatgtaccaagacatagataggtaagagaaataaagaattgaagtgaattagaaaatccattttattgcttgggtttaaaatagttgtgggatacaagtatttacaatgctattggagtcaattattgacaacactttgcaacagtaataccatttctagcttttcaattggcaatacttagaaccttactgtagtgacctgattttaaataccatattatatttactaagttaagagctagtttttactctcttccataatttcattacatgaatgtaagatgatggctcaaaaatgacgacttatagtttgaatttatgtgtatgcaatatacatatgagaaccaaattcaacaagtgacatgaatgttactacatgaacattgaattgtattgcccttgtcagttatttcctctgttcaataaatactgaaggtcacaaacacctttttacttttc

SEQ ID NO: 5311 - protein, 75 aa, Homo sapiens
MGTWARTLLGPDYSDENDYTHTSYNAMHVKHTSSNLERECSPKLMKRSQSVVEAGTLKHEEKGENENTQPLLALD

SEQ ID NO: 5312 - DNA, 1087 bp, Homo sapiens
ctaccaaaatcacagccccttgtggagcccgagctctcattcacagctttctagagaaatctgagcccgaacctgccagaataggggatctcacccacccagttcagcagcgaggacacctgcagaaatacattcccaaagcaaggctgggcggccgtgtgaaggaactccttcacagacatccttcgtgccatcctgctgtcattggaagtcctaatcgaagatccggagcttcagataaatggcttcattttaattatagactggagtaatttttccttcaaacaagcctccaaactgacaccttcaatccttaaactggccattgaagggttgcaggacagctttcctgcccgctttggaggagtccactttgtcaaccagccctggtacattcatgccctctacacactcatcaagccatttcttaaagacaagaccaggaaacggattttcctgcatggaaacaatttaaacagccttcaccagctaatacaccctgaatttttgccctctgaatttggaggaactcttcctccttatgacatgggaacttgggcccggacgttactcggtcccgactacagcgatgaaaatgactatactcacacatcctataatgcaatgcacgtgaagcatacgtcctcgaatctggagagagaatgctcacccaagctgatgaaaagatctcagtctgtggtagaagctgggaccctgaaacatgaggagaagggagagaatgagaacacccagccactcctggctctggactgaaccctgagtcaccccaatgctcctgcacactggccttcagtggtatcagccacccaggaagcacatgcacaactgacccatgcagacacgtgtgttctgcttgacacaaggtcctccactcctgaacccctgcagtgactgtcaccagccatcggtctgagcagccaaagttggacaaagacttgagagatgctttttttttcccccagtgaggggactggaggatgatgcaaggcatttatgtaaaaaagattctccctcctttcatatttattgtagtaaattgaaaaaataaagactaaatttgatggac

SEQ ID NO: 5313 - protein, 75 aa, Homo sapiens; identical to SEQ ID NO: 5311

SEQ ID NO: 5314 - DNA, 4743 bp, Homo sapiens
ctaccaaaatcacagccccttgtggagcccgagctctcattcacagctttctagagaaatctgagcccgaacctgccagaataggggatctcacccacccagttcagcagcgaggacacctgcagaaatacattcccaaagcaaggctgggcggccgtgtgaaggaactccttcacagacatccttcgtgccatcctgctgtcattggaagtcctaatcgaagatccggagcttcagataaatggcttcattttaattatagactggagtaatttttccttcaaacaagcctccaaactgacaccttcaatccttaaactggccattgaagggttgcaggacagctttcctgcccgctttggaggagtccactttgtcaaccagccctggtacattcatgccctctacacactcatcaagccatttcttaaagacaagaccaggaaacggattttcctgcatggaaacaatttaaacagccttcaccagctaatacaccctgaatttttgccctctgaatttggaggaactcttcctccttatgacatgggaacttgggcccggacgttactcggtcccgactacagcgatgaaaatgactatactcacacatcctataatgcaatgcacgtgaagcatacgtcctcgaatctggagagagaatgctcacccaagctgatgaaaagatctcagtctgtggtagaagctgggaccctgaaacatgaggagaagggagagaatgagaacacccagccactcctggctctggactgaaccctgagtcaccccaatgctcctgcacactggccttcagtggtatcagccacccaggaagcacatgcacaactgacccatgcagacacgtgtgttctgcttgacacaaggtcctccactcctgaacccctgcagtgactgtcaccagccatcggtctgagcagccaaagttggacaaagacttgagagatgctttttttttcccccagtgaggggactggaggatgatgcaaggcatttatgtaaaaaagattctccctcctttcatatttattgtagtaaattgaaaaaataaagactaaatttgatggacacactgcattaggacaagaatttttctgaggtatcacacagggaccctctccagtttttgaaaattaagtgcatttccaagtaaatgtatcagagttaaactgtacagacaccactgtcaagtttcatgtagtacaaagccctgagacaatagtatctccagtaatttccattcttactgaattatttcctttgacctcatcaccagcatcgaattgttcagcctaagagcatgttctcataggtctgggtatttgcaaagtttgcttattttgatgatatcctgcaaaaaattattttgatgtcacatctcttgtcaggtcactagctgactgtcatgagctgacgttaaaggaagacacatggacgtgaaatacgattatttcatctgagcaatgtgagttaccacaggcagctcaaaagcccattagtgcagcatgtgtctgcagaggagatgtctcatgaaaatcacatgtcagtgattaatgaatccattccagttgcctcaactgggtcactacagcaaagaaaagtgctatcaaaccatttacccttgcccccacaaccctcctgcaaccattaaagatgtggagaaagaccatggttgttgctgagagggtaaatattcaatcatggagcatgacccatatggatggctaaatatgcaagtactgaagtaagagaagactagaaatgcaggatgaaatgtcaaaggtcattttatttacctagtctccttagaaatggagtccccaactactcattcaaaagaaatcagacataaaataaacagacatcatatatgatatccttacttgtgccatgttttccaagaccagtgcatatttttagacatctcttattcgcccagccatctgcatgacatgggtatttattagtattaccagttggtgctcaaagtcaaacaaaaatattttagttaataatgggcagtaaaatatgattttacattattttaaatatttgggagagttaatttgttagctaaataattcaagggaaagagattattcaactggtcataatcacccctgataatattattactaatcttaattatttattacatcatctctttctcaatggatctaatgttttaattttttcccctattggtagagaacaataacagaagtaatttttatattatacacttggagaaataaagttgaaacagaattaaaaatatttctcaaacaactgtatcacaatataaattaaactaattcatttttgtgtagacatacgaaatcacaaaaataataacactgaaataattctaccaatgcagtgatggaaacacttttcttatgtaccaagacatagataggtaagagaaataaagaattgaagtgaattagaaaatccattttattgcttgggtttaaaatagttgtgggatacaagtatttacaatgctattggagtcaattattgacaacactttgcaacagtaataccatttctagcttttcaattggcaatacttagaaccttactgtagtgacctgattttaaataccatattatatttactaagttaagagctagtttttactctcttccataatttcattacatgaatgtaagatgatggctcaaaaatgacgacttatagtttgaatttatgtgtatgcaatatacatatgagaaccaaattcaacaagtgacatgaatgttactacatgaacattgaattgtattgcccttgtcagttatttcctctgttcaataaatactgaaggtcacaaacacctttttacttttcaagagtttgccttctcttctcgattttagtaattaatttggatatttttcctcccatgcctcttcatctgatttagtgggatgttttcaataccagcaaaacaaaagaacaggaaaagtattttgcaaactcatctactggaagctaatctccttaaggtcaagcaaaaagggtcaatttcaatttcaaagagctgttctttaaatgagataaagaaagtctccttttgtttttagatggaaaagaaagcacaagttttttctacctgtgaatgaactttggtgacctatatgtgccattcatgcagcatttttgttcatattggcttagaattcagtgcatgaatatcattacattcttatatctaacattcctagttagctttgattcaaaatatacaaaatctgatacatgaatactttgctagattaatgacttgatcatctttggaatgagtaggcaagacgatttttacctattatttctatgttgtgggtaatgttaaaactaaatacagatgataataattgctatttcacagtgatgtttaaaatggcagagatttctcaagccagagagatgggacagtcttccaaactctttcatcaaaaaggaaagtaatctggacctcctacgcccaagaaaaacatcctggcattcttggtaaccttttactctgccatccttaatctttctacagaattgtagcagaaatcatctccaagactgaagagctggcttcctgacattcacatggatctaccataggcaaagacactgtgttcccagcccttgcctcatggatggcaaagccgccaggagccagacaccctagcagccacctatccacccaaccctgaaagaacatagttttatttccgtgaactatactttttccccagaagctctaataattggcattaaaaaaatttgcatctgggatttttataacaatataaaataattccatgctcttttttcggtgtgaaaagttcctctttgaaagaaataggattttgtcaatatctccaccactagcatagtgagaagaggatctcaatcaagataaaaaaaaccaaacgatttgagagttgggatgggtacagttcatagacactgacataatgagctctttcttttttgttaggaaaataaaactgcttttttcatgagtatcttttactaagaagaattaaaagagggaagtctgagttccccagtaatgctaccattaaatagctagaagtaaagcatttatacagcttgtcattaaaataaacaaaaatgtagtggtacatgatgacaaaatagtctagctacactagaaaaatataactgcatagaaaaattacaaactaaagcaatccattcacagtttctacatatgttctcattatacattgaattagacctattctatgtggaaaaaatatctttggctggtaaggtagaagctatcaaatgttcaccttaaatactggcagaagaccagtgctgtcatgagatgacacacagcagggtgtttcctaaatgaattgcagcgaggcaaatattccctttagtgtcttctgaccctaggaggaggctttgaattactcgggctgcaagtcaagggaattgactcttggtgttcgaaattctatcctcacacccaaggagatggaaccagaaaggcagcctctctccagagtttcccaagcttgcatgaattcatgctaaattgctggaaggctgcgtctctgctgtggtgtcagttccggatgccacacatccacgatgaatatcagccggaaagatgaggcatcctgccatacctcgtgctcaaaggagtcatcaaagatgagcaccttgccttcctcccaggtcct

SEQ ID NO: 5315 - protein, 75 aa, Homo sapiens; identical to SEQ ID NO: 5311

SEQ ID NO: 5316 - DNA, 5326 bp, Homo sapiens
aggttcgtacacgcgaggccgggcgcgcgcagccggcaggcgggtgaagtcttcccagcgtcgcgtgtgtacccccgcgcactgaaggaggtccgccagccctcaccagcccccgcggaccgtgcaatggcccagcgtaagaatgccaagagcagcggcaacagcagcagcagcggctccggcagcggtagcacgagtgcgggcagcagcagccccggggcccggagagagacaaagcatggaggacacaagaatgggaggaaaggcggactctcaggaacttcattcttcacgtggtttatggtgattgcattgctgggcgtctggacatctgtagctgtcgtttggtttgatcttgttgactatgaggaagttctaggaaaactaggaatctatgatgctgatggtgatggagattttgatgtggatgatgccaaagttttattaggacttaaagagagatctacttcagagccagcagtcccgccagaagaggctgagccacacactgagcccgaggagcaggttcctgtggaggcagaaccccagaatatcgaagatgaagcaaaagaacaaattcagtcccttctccatgaaatggtacacgcagaacatgttgagggagaagacttgcaacaagaagatggacccacaggagaaccacaacaagaggatgatgagtttcttatggcgactgatgtagatgatagatttgagaccctggaacctgaagtatctcatgaagaaaccgagcatagttaccacgtggaagagacagtttcacaagactgtaatcaggatatggaagagatgatgtctgagcaggaaaatccagattccagtgaaccagtagtagaagatgaaagattgcaccatgatacagatgatgtaacataccaagtctatgaggaacaagcagtatatgaacctctagaaaatgaagggatagaaatcacagaagtaactgctccccctgaggataatcctgtagaagattcacaggtaattgtagaagaagtaagcatttttcctgtggaagaacagcaggaagtaccaccagaaacaaatagaaaaacagatgatccagaacaaaaagcaaaagttaagaaaaagaagcctaaacttttaaataaatttgataagactattaaagctgaacttgatgctgcagaaaaactccgtaaaaggggaaaaattgaggaagcagtgaatgcatttaaagaactagtacgcaaataccctcagagtccacgagcaagatatgggaaggcgcagtgtgaggatgatttggctgagaagaggagaagtaatgaggtgctacgtggagccatcgagacctaccaagaggtggccagcctacctgatgtccctgcagacctgctgaagctgagtttgaagcgtcgctcagacaggcaacaatttctaggtcatatgagaggttccctgcttaccctgcagagattagttcaactatttcccaatgatacttccttaaaaaatgaccttggcgtgggatacctcttgataggagataatgacaatgcaaagaaagtttatgaagaggtgctgagtgtgacacctaatgatggctttgctaaagtccattatggcttcatcctgaaggcacagaacaaaattgctgagagcatcccatatttaaaggaaggaatagaatccggagatcctggcactgatgatgggagattttatttccacctgggggatgccatgcagagggttgggaacaaagaggcatataagtggtatgagcttgggcacaagagaggacactttgcatctgtctggcaacgctcactctacaatgtgaatggactgaaagcacagccttggtggaccccaaaagaaacgggctacacagagttagtaaagtctttagaaagaaactggaagttaatccgagatgaaggccttgcagtgatggataaagccaaaggtctcttcctgcctgaggatgaaaacctgagggaaaaaggggactggagccagttcacgctgtggcagcaaggaagaagaaatgaaaatgcctgcaaaggagctcctaaaacctgtaccttactagaaaagttccccgagacaacaggatgcagaagaggacagatcaaatattccatcatgcaccccgggactcacgtgtggccgcacacagggcccacaaactgcaggctccgaatgcacctgggcttggtgattcccaaggaaggctgcaagattcgatgtgccaacgagaccaagacctgggaggaaggcaaggtgctcatctttgatgactcctttgagcacgaggtatggcaggatgcctcatctttccggctgatattcatcgtggatgtgtggcatccggaactgacaccacagcagagacgcagccttccagcaatttagcatgaattcatgcaagcttgggaaactctggagagaggctgcctttctggttccatctccttgggtgtgaggatagaatttcgaacaccaagagtcaattcccttgacttgcagcccgagtaattcaaagcctcctcctagggtcagaagacactaaagggaatatttgcctcgctgcaattcatttaggaaacaccctgctgtgtgtcatctcatgacagcactggtcttctgccagtatttaaggtgaacatttgatagcttctaccttaccagccaaagatattttttccacatagaataggtctaattcaatgtataatgagaacatatgtagaaactgtgaatggattgctttagtttgtaatttttctatgcagttatatttttctagtgtagctagactattttgtcatcatgtaccactacatttttgtttattttaatgacaagctgtataaatgctttacttctagctatttaatggtagcattactggggaactcagacttccctcttttaattcttcttagtaaaagatactcatgaaaaaagcagttttattttcctaacaaaaaagaaagagctcattatgtcagtgtctatgaactgtacccatcccaactctcaaatcgtttggttttttttatcttgattgagatcctcttctcactatgctagtggtggagatattgacaaaatcctatttctttcaaagaggaacttttcacaccgaaaaaagagcatggaattattttatattgttataaaaatcccagatgcaaatttttttaatgccaattattagagcttctggggaaaaagtatagttcacggaaataaaactatgttctttcagggttgggtggataggtggctgctagggtgtctggctcctggcggctttgccatccatgaggcaagggctgggaacacagtgtctttgcctatggtagatccatgtgaatgtcaggaagccagctcttcagtcttggagatgatttctgctacaattctgtagaaagattaaggatggcagagtaaaaggttaccaagaatgccaggatgtttttcttgggcgtaggaggtccagattactttcctttttgatgaaagagtttggaagactgtcccatctctctggcttgagaaatctctgccattttaaacatcactgtgaaatagcaattattatcatctgtatttagttttaacattacccacaacatagaaataataggtaaaaatcgtcttgcctactcattccaaagatgatcaagtcattaatctagcaaagtattcatgtatcagattttgtatattttgaatcaaagctaactaggaatgttagatataagaatgtaatgatattcatgcactgaattctaagccaatatgaacaaaaatgctgcatgaatggcacatataggtcaccaaagttcattcacaggtagaaaaaacttgtgctttcttttccatctaaaaacaaaaggagactttctttatctcatttaaagaacagctctttgaaattgaaattgaccctttttgcttgaccttaaggagattagcttccagtagatgagtttgcaaaatacttttcctgttcttttgttttgctggtattgaaaacatcccactaaatcagatgaagaggcatgggaggaaaaatatccaaattaattactaaaatcgagaagagaaggcaaactcttgaaaagtaaaaaggtgtttgtgaccttcagtatttattgaacagaggaaataactgacaagggcaatacaattcaatgttcatgtagtaacattcatgtcacttgttgaatttggttctcatatgtatattgcatacacataaattcaaactataagtcgtcatttttgagccatcatcttacattcatgtaatgaaattatggaagagagtaaaaactagctcttaacttagtaaatataatatggtatttaaaatcaggtcactacagtaaggttctaagtattgccaattgaaaagctagaaatggtattactgttgcaaagtgttgtcaataattgactccaatagcattgtaaatacttgtatcccacaactattttaaacccaagcaataaaatggattttctaattcacttcaattctttatttctcttacctatctatgtcttggtacataagaaaagtgtttccatcactgcattggtagaattatttcagtgttattatttttgtgatttcgtatgtctacacaaaaatgaattagtttaatttatattgtgatacagttgtttgagaaatatttttaattctgtttcaactttatttctccaagtgtataatataaaaattacttctgttattgttctctaccaataggggaaaaaattaaaacattagatccattgagaaagagatgatgtaataaataattaagattagtaataatattatcaggggtgattatgaccagttgaataatctctttcccttgaattatttagctaacaaattaactctcccaaatatttaaaataatgtaaaatcatattttactgcccattattaactaaaatatttttgtttgactttgagcaccaactggtaatactaataaatacccatgtcatgcagatggctgggcgaataagagatgtctaaaaatatgcactggtcttggaaaacatggcacaagtaaggatatcatatatgatgtctgtttattttatgtctgatttcttttgaatgagtagttggggactccatttctaaggagactaggtaaataaaatgacctttgacatttcatcctgcatttctagtcttctcttacttcagtacttgcatatttagccatccatatgggtcatgctccatgattgaatatttaccctctcagcaacaaccatggtctttctccacatcttt

SEQ ID NO: 5317 - protein, 758 aa, Homo sapiens; identical to SEQ ID NO: 717

SEQ ID NO: 5318 - DNA, 5205 bp, Homo sapiens
aggttcgtacacgcgaggccgggcgcgcgcagccggcaggcgggtgaagtcttcccagcgtcgcgtgtgtacccccgcgcactgaaggaggtccgccagccctcaccagcccccgcggaccgtgcaatggcccagcgtaagaatgccaagagcagcggcaacagcagcagcagcggctccggcagcggtagcacgagtgcgggcagcagcagccccggggcccggagagagacaaagcatggaggacacaagaatgggaggaaaggcggactctcaggaacttcattcttcacgtggtttatggtgattgcattgctgggcgtctggacatctgtagctgtcgtttggtttgatcttgttgactatgaggaagttctaggaaaactaggaatctatgatgctgatggtgatggagattttgatgtggatgatgccaaagttttattaggacttaaagagagatctacttcagagccagcagtcccgccagaagaggctgagccacacactgagcccgaggagcaggttcctgtggaggcagaaccccagaatatcgaagatgaagcaaaagaacaaattcagtcccttctccatgaaatggtacacgcagaacatgttgagggagaagacttgcaacaagaagatggacccacaggagaaccacaacaagaggatgatgagtttcttatggcgactgatgtagatgatagatttgagaccctggaacctgaagtatctcatgaagaaaccgagcatagttaccacgtggaagagacagtttcacaagactgtaatcaggatatggaagagatgatgtctgagcaggaaaatccagattccagtgaaccagtagtagaagatgaaagattgcaccatgatacagatgatgtaacataccaagtctatgaggaacaagcagtatatgaacctctagaaaatgaagggatagaaatcacagaagtaactgctccccctgaggataatcctgtagaagattcacaggtaattgtagaagaagtaagcatttttcctgtggaagaacagcaggaagtaccaccagaaacaaatagaaaaacagatgatccagaacaaaaagcaaaagttaagaaaaagaagcctaaacttttaaataaatttgataagactattaaagctgaacttgatgctgcagaaaaactccgtaaaaggggaaaaattgaggaagcagtgaatgcatttaaagaactagtacgcaaataccctcagagtccacgagcaagatatgggaaggcgcagtgtgaggatgatttggctgagaagaggagaagtaatgaggtgctacgtggagccatcgagacctaccaagaggtggccagcctacctgatgtccctgcagacctgctgaagctgagtttgaagcgtcgctcagacaggcaacaatttctaggtcatatgagaggttccctgcttaccctgcagagattagttcaactatttcccaatgatacttccttaaaaaatgaccttggcgtgggatacctcttgataggagataatgacaatgcaaagaaagtttatgaagaggtgctgagtgtgacacctaatgatggctttgctaaagtccattatggcttcatcctgaaggcacagaacaaaattgctgagagcatcccatatttaaaggaaggaatagaatccggagatcctggcactgatgatgggagattttatttccacctgggggatgccatgcagagggttgggaacaaagaggcatataagtggtatgagcttgggcacaagagaggacactttgcatctgtctggcaacgctcactctacaatgtgaatggactgaaagcacagccttggtggaccccaaaagaaacgggctacacagagttagtaaagtctttagaaagaaactggaagttaatccgagatgaaggccttgcagtgatggataaagccaaaggtctcttcctgcctgaggatgaaaacctgagggaaaaaggggactggagccagttcacgctgtggcagcaaggaagaagaaatgaaaatgcctgcaaaggagctcctaaaacctgtaccttactagaaaagttccccgagacaacaggatgcagaagaggacagatcaaatattccatcatgcaccccgggactcacgtgtggccgcacacagggcccacaaactgcaggctccgaatgcacctgggcttggtgattcccaaggaaggctgcaagattcgatgtgccaacgagaccaagacctgggaggaaggcaaggtgctcatctttgatgactcctttgagcacgaggtatggcaggatgcctcatctttccggctgatattcatcgtggatgtgtggcatccggaactgacaccacagcagagacgcagccttccagcaatttagcatgaattcatgcaagcttgggaaactctggagagaggctgcctttctggttccatctccttgggtgtgaggatagaatttcgaacaccaagagtcaattcccttgacttgcagcccgagtaattcaaagcctcctcctagggtcagaagacactaaagggaatatttgcctcgctgcaattcatttaggaaacaccctgctgtgtgtcatctcatgacagcactggtcttctgccagtatttaaggtgaacatttgatagcttctaccttaccagccaaagatattttttccacatagaataggtctaattcaatgtataatgagaacatatgtagaaactgtgaatggattgctttagtttgtaatttttctatgcagttatatttttctagtgtagctagactattttgtcatcatgtaccactacatttttgtttattttaatgacaagctgtataaatgctttacttctagctatttaatggtagcattactggggaactcagacttccctcttttaattcttcttagtaaaagatactcatgaaaaaagcagttttattttcctaacaaaaaagaaagagctcattatgtcagtgtctatgaactgtacccatcccaactctcaaatcgtttggttttttttatcttgattgagatcctcttctcactatgctagtggtggagatattgacaaaatcctatttctttcaaagaggaacttttcacaccgaaaaaagagcatggaattattttatattgttataaaaatcccagatgcaaatttttttaatgccaattattagagcttctggggaaaaagtatagttcacggaaataaaactatgttctttcagggttgggtggataggtggctgctagggtgtctggctcctggcggctttgccatccatgaggcaagggctgggaacacagtgtctttgcctatggtagatccatgtgaatgtcaggaagccagctcttcagtcttggagatgatttctgctacaattctgtagaaagattaaggatggcagagtaaaaggttaccaagaatgccaggatgtttttcttgggcgtaggaggtccagattactttcctttttgatgaaagagtttggaagactgtcccatctctctggcttgagaaatctctgccattttaaacatcactgtgaaatagcaattattatcatctgtatttagttttaacattacccacaacatagaaataataggtaaaaatcgtcttgcctactcattccaaagatgatcaagtcattaatctagcaaagtattcatgtatcagattttgtatattttgaatcaaagctaactaggaatgttagatataagaatgtaatgatattcatgcactgaattctaagccaatatgaacaaaaatgctgcatgaatggcacatataggtcaccaaagttcattcacaggtagaaaaaacttgtgctttcttttccatctaaaaacaaaaggagactttctttatctcatttaaagaacagctctttgaaattgaaattgaccctttttgcttgaccttaaggagattagcttccagtagatgagtttgcaaaatacttttcctgttcttttgttttgctggtattgaaaacatcccactaaatcagatgaagaggcatgggaggaaaaatatccaaattaattactaaaatcgagaagagaaggcaaactcttgaaaagtaaaaaggtgtttgtgaccttcagtatttattgaacagaggaaataactgacaagggcaatacaattcaatgttcatgtagtaacattcatgtcacttgttgaatttggttctcatatgtatattgcatacacataaattcaaactataagtcgtcatttttgagccatcatcttacattcatgtaatgaaattatggaagagagtaaaaactagctcttaacttagtaaatataatatggtatttaaaatcaggtcactacagtaaggttctaagtattgccaattgaaaagctagaaatggtattactgttgcaaagtgttgtcaataattgactccaatagcattgtaaatacttgtatcccacaactattttaaacccaagcaataaaatggattttctaattcacttcaattctttatttctcttacctatctatgtcttggtacataagaaaagtgtttccatcactgcattggtagaattatttcagtgttattatttttgtgatttcgtatgtctacacaaaaatgaattagtttaatttatattgtgatacagttgtttgagaaatatttttaattctgtttcaactttatttctccaagtgtataatataaaaattacttctgttattgttctctaccaataggggaaaaaattaaaacattagatccattgagaaagagatgatgtaataaataattaagattagtaataatattatcaggggtgattatgaccagttgaataatctctttcccttgaattatttagctaacaaattaactctcccaaatatttaaaataatgtaaaatcatattttactgcccattattaactaaaatatttttgtttgactttgagcaccaactggtaatactaataaatacccatgtcatgcagatggctgggcgaataagagatgtctaaaaatatgcactggtcttggaaaacatggcacaagtaaggatatcatatatgatgtctgtttattttatgtctgatttcttttgaatgagtagttggggactccatttctaaggagactaggtaaataaaatgacctttgacatttc

SEQ ID NO: 5319 - protein, 758 aa, Homo sapiens; identical to SEQ ID NO: 717

SEQ ID NO: 5320 - DNA, 4537 bp, Homo sapiens
aggttcgtacacgcgaggccgggcgcgcgcagccggcaggcgggtgaagtcttcccagcgtcgcgtgtgtacccccgcgcactgaaggaggtccgccagccctcaccagcccccgcggaccgtgcaatggcccagcgtaagaatgccaagagcagcggcaacagcagcagcagcggctccggcagcggtagcacgagtgcgggcagcagcagccccggggcccggagagagacaaagcatggaggacacaagaatgggaggaaaggcggactctcaggaacttcattcttcacgtggtttatggtgattgcattgctgggcgtctggacatctgtagctgtcgtttggtttgatcttgttgactatgaggaagttctaggaaaactaggaatctatgatgctgatggtgatggagattttgatgtggatgatgccaaagttttattaggacttaaagagagatctacttcagagccagcagtcccgccagaagaggctgagccacacactgagcccgaggagcaggttcctgtggaggcagaaccccagaatatcgaagatgaagcaaaagaacaaattcagtcccttctccatgaaatggtacacgcagaacatgttgagggagaagacttgcaacaagaagatggacccacaggagaaccacaacaagaggatgatgagtttcttatggcgactgatgtagatgatagatttgagaccctggaacctgaagtatctcatgaagaaaccgagcatagttaccacgtggaagagacagtttcacaagactgtaatcaggatatggaagagatgatgtctgagcaggaaaatccagattccagtgaaccagtagtagaagatgaaagattgcaccatgatacagatgatgtaacataccaagtctatgaggaacaagcagtatatgaacctctagaaaatgaagggatagaaatcacagaagtaactgctccccctgaggataatcctgtagaagattcacaggtaattgtagaagaagtaagcatttttcctgtggaagaacagcaggaagtaccaccagaaacaaatagaaaaacagatgatccagaacaaaaagcaaaagttaagaaaaagaagcctaaacttttaaataaatttgataagactattaaagctgaacttgatgctgcagaaaaactccgtaaaaggggaaaaattgaggaagcagtgaatgcatttaaagaactagtacgcaaataccctcagagtccacgagcaagatatgggaaggcgcagtgtgaggatgatttggctgagaagaggagaagtaatgaggtgctacgtggagccatcgagacctaccaagaggtggccagcctacctgatgtccctgcagacctgctgaagctgagtttgaagcgtcgctcagacaggcaacaatttctaggtcatatgagaggttccctgcttaccctgcagagattagttcaactatttcccaatgatacttccttaaaaaatgaccttggcgtgggatacctcttgataggagataatgacaatgcaaagaaagtttatgaagaggtgctgagtgtgacacctaatgatggctttgctaaagtccattatggcttcatcctgaaggcacagaacaaaattgctgagagcatcccatatttaaaggaaggaatagaatccggagatcctggcactgatgatgggagattttatttccacctgggggatgccatgcagagggttgggaacaaagaggcatataagtggtatgagcttgggcacaagagaggacactttgcatctgtctggcaacgctcactctacaatgtgaatggactgaaagcacagccttggtggaccccaaaagaaacgggctacacagagttagtaaagtctttagaaagaaactggaagttaatccgagatgaaggccttgcagtgatggataaagccaaaggtctcttcctgcctgaggatgaaaacctgagggaaaaaggggactggagccagttcacgctgtggcagcaaggaagaagaaatgaaaatgcctgcaaaggagctcctaaaacctgtaccttactagaaaagttccccgagacaacaggatgcagaagaggacagatcaaatattccatcatgcaccccgggactcacgtgtggccgcacacagggcccacaaactgcaggctccgaatgcacctgggcttggtgattcccaaggaaggctgcaagattcgatgtgccaacgagaccaagacctgggaggaaggcaaggtgctcatctttgatgactcctttgagcacgaggtatggcaggatgcctcatctttccggctgatattcatcgtggatgtgtggcatccggaactgacaccacagcagagacgcagccttccagcaatttagcatgaattcatgcaagcttgggaaactctggagagaggctgcctttctggttccatctccttgggtgtgaggatagaatttcgaacaccaagagtcaattcccttgacttgcagcccgagtaattcaaagcctcctcctagggtcagaagacactaaagggaatatttgcctcgctgcaattcatttaggaaacaccctgctgtgtgtcatctcatgacagcactggtcttctgccagtatttaaggtgaacatttgatagcttctaccttaccagccaaagatattttttccacatagaataggtctaattcaatgtataatgagaacatatgtagaaactgtgaatggattgctttagtttgtaatttttctatgcagttatatttttctagtgtagctagactattttgtcatcatgtaccactacatttttgtttattttaatgacaagctgtataaatgctttacttctagctatttaatggtagcattactggggaactcagacttccctcttttaattcttcttagtaaaagatactcatgaaaaaagcagttttattttcctaacaaaaaagaaagagctcattatgtcagtgtctatgaactgtacccatcccaactctcaaatcgtttggttttttttatcttgattgagatcctcttctcactatgctagtggtggagatattgacaaaatcctatttctttcaaagaggaacttttcacaccgaaaaaagagcatggaattattttatattgttataaaaatcccagatgcaaatttttttaatgccaattattagagcttctggggaaaaagtatagttcacggaaataaaactatgttctttcagggttgggtggataggtggctgctagggtgtctggctcctggcggctttgccatccatgaggcaagggctgggaacacagtgtctttgcctatggtagatccatgtgaatgtcaggaagccagctcttcagtcttggagatgatttctgctacaattctgtagaaagattaaggatggcagagtaaaaggttaccaagaatgccaggatgtttttcttgggcgtaggaggtccagattactttcctttttgatgaaagagtttggaagactgtcccatctctctggcttgagaaatctctgccattttaaacatcactgtgaaatagcaattattatcatctgtatttagttttaacattacccacaacatagaaataataggtaaaaatcgtcttgcctactcattccaaagatgatcaagtcattaatctagcaaagtattcatgtatcagattttgtatattttgaatcaaagctaactaggaatgttagatataagaatgtaatgatattcatgcactgaattctaagccaatatgaacaaaaatgctgcatgaatggcacatataggtcaccaaagttcattcacaggtagaaaaaacttgtgctttcttttccatctaaaaacaaaaggagactttctttatctcatttaaagaacagctctttgaaattgaaattgaccctttttgcttgaccttaaggagattagcttccagtagatgagtttgcaaaatacttttcctgttcttttgttttgctggtattgaaaacatcccactaaatcagatgaagaggcatgggaggaaaaatatccaaattaattactaaaatcgagaagagaaggcaaactcttgaaaagtaaaaaggtgtttgtgaccttcagtatttattgaacagaggaaataactgacaagggcaatacaattcaatgttcatgtagtaacattcatgtcacttgttgaatttggttctcatatgtatattgcatacacataaattcaaactataagtcgtcatttttgagccatcatcttacattcatgtaatgaaattatggaagagagtaaaaactagctcttaacttagtaaatataatatggtatttaaaatcaggtcactacagtaaggttctaagtattgccaattgaaaagctagaaatggtattactgttgcaaagtgttgtcaataattgactccaatagcattgtaaatacttgtatcccacaactattttaaacccaagcaataaaatggattttctaattcacttc

SEQ ID NO: 5321 - protein, 758 aa, Homo sapiens; identical to SEQ ID NO: 717

SEQ ID NO: 5322 - DNA, 2694 bp, Homo sapiens
agtctcaagctctggtaggcaagtgcatgcagtgtgcctaaaacctgccagcagtacttttgagtttttttttttgttttgttttactttagcatttattattcatggattgaagaaatcaaaatggctgaagataaagagacaaagcatggaggacacaagaatgggaggaaaggcggactctcaggaacttcattcttcacgtggtttatggtgattgcattgctgggcgtctggacatctgtagctgtcgtttggtttgatcttgttgactatgaggaagttctagccaaagcaaaggacttccgttataacttatcagaggtgcttcaaggaaaactaggaatctatgatgctgatggtgatggagattttgatgtggatgatgccaaagttttattaggacttaaagagagatctacttcagagccagcagtcccgccagaagaggctgagccacacactgagcccgaggagcaggttcctgtggaggcagaaccccagaatatcgaagatgaagcaaaagaacaaattcagtcccttctccatgaaatggtacacgcagaacatgttgagggagaagacttgcaacaagaagatggacccacaggagaaccacaacaagaggatgatgagtttcttatggcgactgatgtagatgatagatttgagaccctggaacctgaagtatctcatgaagaaaccgagcatagttaccacgtggaagagacagtttcacaagactgtaatcaggatatggaagagatgatgtctgagcaggaaaatccagattccagtgaaccagtagtagaagatgaaagattgcaccatgatacagatgatgtaacataccaagtctatgaggaacaagcagtatatgaacctctagaaaatgaagggatagaaatcacagaagtaactgctccccctgaggataatcctgtagaagattcacaggtaattgtagaagaagtaagcatttttcctgtggaagaacagcaggaagtaccaccagatacttaaagcttcaaaaagactgcccctaccaccacaggaggaccagcctaaccatacgctccaaaagatggctgtgatagatcttgtgaagcaattactgagcagatcaagatctttgggaaggaacactaaagatgttttgaatgaattatagtccactggcattttagtgtatttttttttctttttagaaacacacatttctaaaaatgtcatgttacattcctgcatgtcccttttgatagcattagtggatccattggatttcttttttctttttgtgagacagcttttagtcttacctgaatttatgtgtgtttttccgacagtggttaataattatattggtgatgtagcagcaattgtgttggcagggttttcatatattattagtaattaacactaactgttggactgacttgtgtacactgtgttaaacatgatttaaaagctattaagagtactttgtgttagcactcttaaaaacgctaacagagatcatcattagctgtgaagatttgagttgtatatacctgcactgatattcttatcaaaaatttctacattagctttaagtgttcagattaacacttttgaaatttttgtagcttttagctgattaattagaaaaatttaatatttcagtgaaagttttaaattatcatttatttatttttttaaatgagaggggaaagctgaaattccttgttaagacacaaggaaaaagaatggccctactattatcatgcaaaaatgctttgttggcacctcagattaatcatataatagctatagtctcttcagcatttgtttaaattttagaaaacctgtataaattactggtgcataacttaaagattattctgcctttggctaattgagtaattcccctccagcactagagaccgctcagtgctcttactagatgaactcagtaacgccttgagctgggttgattgaggatgtgtgaaaattaatgtggtttattttgggctcagaaataattgctctgttgaaaataatcctttgtcagaaaagaaggtagctaccacatcattttgaaaggaccatgagcaactataagcaaagccataagaagtggtttgatcgatatattaggggtagctcttgattttgttaacattaagataaggtgactttttccccctgcttttaggattaaaatcaaagatacttctatatttttatcactatagatcatagttattatacaatgtagtgagtcctgcatgggtactcgatgtgtaatgaaacctgaaataataagataataagaaaagcaataattttctaaagctgtgctgtcggtgatacagagatgatactcaaattataataaaactcttcattttgtgaattatagaagctactttttataaagccatatttttttagggaaactaaggagtgacatagaactgatgaatgagtaaaagtaagttttgctggatttttgtagaactctggacgttgaggattcattatgctgtggttaactttaaatatttttgaattccaaatatctgaattaatgagccttgtctttacaaatatgtgccattgtgcaacatcggtggattttctaaaaataatgtaaatgtcttctattaaatgttgagtgcaataaaatacagaagaattctctatattgtcatt

SEQ ID NO: 5323 - protein, 299 aa, Homo sapiens; identical to SEQ ID NO: 725

SEQ ID NO: 5324 - DNA, 2771 bp, Homo sapiens
agtctcaagctctggtaggcaagtgcatgcagtgtgcctaaaacctgccagcagtacttttgagtttttttttttgttttgttttactttagcatttattattcatggattgaagaaatcaaaatggctgaagataaagagacaaagcatggaggacacaagaatgggaggaaaggcggactctcaggaacttcattcttcacgtggtttatggtgattgcattgctgggcgtctggacatctgtagctgtcgtttggtttgatcttgttgactatgaggaagttctagccaaagcaaaggacttccgttataacttatcagaggtgcttcaaggaaaactaggaatctatgatgctgatggtgatggagattttgatgtggatgatgccaaagttttattaggacttaaagagagatctacttcagagccagcagtcccgccagaagaggctgagccacacactgagcccgaggagcaggttcctgtggaggcagaaccccagaatatcgaagatgaagcaaaagaacaaattcagtcccttctccatgaaatggtacacgcagaacatgttgagggagaagacttgcaacaagaagatggacccacaggagaaccacaacaagaggatgatgagtttcttatggcgactgatgtagatgatagatttgagaccctggaacctgaagtatctcatgaagaaaccgagcatagttaccacgtggaagagacagtttcacaagactgtaatcaggatatggaagagatgatgtctgagcaggaaaatccagattccagtgaaccagtagtagaagatgaaagattgcaccatgatacagatgatgtaacataccaagtctatgaggaacaagcagtatatgaacctctagaaaatgaagggatagaaatcacagaagtaactgctccccctgaggataatcctgtagaagattcacaggtaattgtagaagaagtaagcatttttcctgtggaagaacagcaggaagtaccaccagatacttaaagcttcaaaaagactgcccctaccaccacaggaggaccagcctaaccatacgctccaaaagatggctgtgatagatcttgtgaagcaattactgagcagatcaagatctttgggaaggaacactaaagatgttttgaatgaattatagtccactggcattttagtgtatttttttttctttttagaaacacacatttctaaaaatgtcatgttacattcctgcatgtcccttttgatagcattagtggatccattggatttcttttttctttttgtgagacagcttttagtcttacctgaatttatgtgtgtttttccgacagtggttaataattatattggtgatgtagcagcaattgtgttggcagggttttcatatattattagtaattaacactaactgttggactgacttgtgtacactgtgttaaacatgatttaaaagctattaagagtactttgtgttagcactcttaaaaacgctaacagagatcatcattagctgtgaagatttgagttgtatatacctgcactgatattcttatcaaaaatttctacattagctttaagtgttcagattaacacttttgaaatttttgtagcttttagctgattaattagaaaaatttaatatttcagtgaaagttttaaattatcatttatttatttttttaaatgagaggggaaagctgaaattccttgttaagacacaaggaaaaagaatggccctactattatcatgcaaaaatgctttgttggcacctcagattaatcatataatagctatagtctcttcagcatttgtttaaattttagaaaacctgtataaattactggtgcataacttaaagattattctgcctttggctaattgagtaattcccctccagcactagagaccgctcagtgctcttactagatgaactcagtaacgccttgagctgggttgattgaggatgtgtgaaaagctcacagagcccgatgcctgctgctatttcacggcaatgagcctttttctttctacactgaagattttcttcttatttaatgtggtttattttgggctcagaaataattgctctgttgaaaataatcctttgtcagaaaagaaggtagctaccacatcattttgaaaggaccatgagcaactataagcaaagccataagaagtggtttgatcgatatattaggggtagctcttgattttgttaacattaagataaggtgactttttccccctgcttttaggattaaaatcaaagatacttctatatttttatcactatagatcatagttattatacaatgtagtgagtcctgcatgggtactcgatgtgtaatgaaacctgaaataataagataataagaaaagcaataattttctaaagctgtgctgtcggtgatacagagatgatactcaaattataataaaactcttcattttgtgaattatagaagctactttttataaagccatatttttttagggaaactaaggagtgacatagaactgatgaatgagtaaaagtaagttttgctggatttttgtagaactctggacgttgaggattcattatgctgtggttaactttaaatatttttgaattccaaatatctgaattaatgagccttgtctttacaaatatgtgccattgtgcaacatcggtggattttctaaaaataatgtaaatgtcttctattaaatgttgagtgcaataaaatacagaagaattctctatattgtcatt

SEQ ID NO: 5325 - protein, 299 aa, Homo sapiens; identical to SEQ ID NO: 725

SEQ ID NO: 5326 - DNA, 2816 bp, Homo sapiens
aggttcgtacacgcgaggccgggcgcgcgcagccggcaggcgggtgaagtcttcccagcgtcgcgtgtgtacccccgcgcactgaaggaggtccgccagccctcaccagcccccgcggaccgtgcaatggcccagcgtaagaatgccaagagcagcggcaacagcagcagcagcggctccggcagcggtagcacgagtgcgggcagcagcagccccggggcccggagagagacaaagcatggaggacacaagaatgggaggaaaggcggactctcaggaacttcattcttcacgtggtttatggtgattgcattgctgggcgtctggacatctgtagctgtcgtttggtttgatcttgttgactatgaggaagttctaggaaaactaggaatctatgatgctgatggtgatggagattttgatgtggatgatgccaaagttttattaggacttaaagagagatctacttcagagccagcagtcccgccagaagaggctgagccacacactgagcccgaggagcaggttcctgtggaggcagaaccccagaatatcgaagatgaagcaaaagaacaaattcagtcccttctccatgaaatggtacacgcagaacatgttgagggagaagacttgcaacaagaagatggacccacaggagaaccacaacaagaggatgatgagtttcttatggcgactgatgtagatgatagatttgagaccctggaacctgaagtatctcatgaagaaaccgagcatagttaccacgtggaagagacagtttcacaagactgtaatcaggatatggaagagatgatgtctgagcaggaaaatccagattccagtgaaccagtagtagaagatgaaagattgcaccatgatacagatgatgtaacataccaagtctatgaggaacaagcagtatatgaacctctagaaaatgaagggatagaaatcacagaagtaactgctccccctgaggataatcctgtagaagattcacaggtaattgtagaagaagtaagcatttttcctgtggaagaacagcaggaagtaccaccagatacttaaagcttcaaaaagactgcccctaccaccacaggaggaccagcctaaccatacgctccaaaagatggctgtgatagatcttgtgaagcaattactgagcagatcaagatctttgggaaggaacactaaagatgttttgaatgaattatagtccactggcattttagtgtatttttttttctttttagaaacacacatttctaaaaatgtcatgttacattcctgcatgtcccttttgatagcattagtggatccattggatttcttttttctttttgtgagacagcttttagtcttacctgaatttatgtgtgtttttccgacagtggttaataattatattggtgatgtagcagcaattgtgttggcagggttttcatatattattagtaattaacactaactgttggactgacttgtgtacactgtgttaaacatgatttaaaagctattaagagtactttgtgttagcactcttaaaaacgctaacagagatcatcattagctgtgaagatttgagttgtatatacctgcactgatattcttatcaaaaatttctacattagctttaagtgttcagattaacacttttgaaatttttgtagcttttagctgattaattagaaaaatttaatatttcagtgaaagttttaaattatcatttatttatttttttaaatgagaggggaaagctgaaattccttgttaagacacaaggaaaaagaatggccctactattatcatgcaaaaatgctttgttggcacctcagattaatcatataatagctatagtctcttcagcatttgtttaaattttagaaaacctgtataaattactggtgcataacttaaagattattctgcctttggctaattgagtaattcccctccagcactagagaccgctcagtgctcttactagatgaactcagtaacgccttgagctgggttgattgaggatgtgtgaaaagctcacagagcccgatgcctgctgctatttcacggcaatgagcctttttctttctacactgaagattttcttcttatttaatgtggtttattttgggctcagaaataattgctctgttgaaaataatcctttgtcagaaaagaaggtagctaccacatcattttgaaaggaccatgagcaactataagcaaagccataagaagtggtttgatcgatatattaggggtagctcttgattttgttaacattaagataaggtgactttttccccctgcttttaggattaaaatcaaagatacttctatatttttatcactatagatcatagttattatacaatgtagtgagtcctgcatgggtactcgatgtgtaatgaaacctgaaataataagataataagaaaagcaataattttctaaagctgtgctgtcggtgatacagagatgatactcaaattataataaaactcttcattttgtgaattatagaagctactttttataaagccatatttttttagggaaactaaggagtgacatagaactgatgaatgagtaaaagtaagttttgctggatttttgtagaactctggacgttgaggattcattatgctgtggttaactttaaatatttttgaattccaaatatctgaattaatgagccttgtctttacaaatatgtgccattgtgcaacatcggtggattttctaaaaataatgtaaatgtcttctattaaatgttgagtgcaataaaatacagaagaattctctatattgtcatt

SEQ ID NO: 5327 - protein, 313 aa, Homo sapiens; identical to SEQ ID NO: 721

SEQ ID NO: 5328 - DNA, 2830 bp, Homo sapiens
ggggcgtggccgtcgggcggcgagccgcgcgctctcgccccgggagggagtcacaggttcgtacacgcgaggccgggcgcgcgcagccggcaggcgggtgaagtcttcccaggtgctgcaggcggtgctgaggcacagggtctgctgcaggagcagcggcccgaacccgctccagcggcccgccgccgccagcggttcccgcgtcgcgtgtgtacccccgcgcactgaaggaggtccgccagccctcaccagcccccgcggaccgtgcaatggcccagcgtaagaatgccaagagcagcggcaacagcagcagcagcggctccggcagcggtagcacgagtgcgggcagcagcagccccggggcccggagagagacaaagcatggaggacacaagaatgggaggaaaggcggactctcaggaacttcattcttcacgtggtttatggtgattgcattgctgggcgtctggacatctgtagctgtcgtttggtttgatcttgttgactatgaggaagttctaggaaaactaggaatctatgatgctgatggtgatggagattttgatgtggatgatgccaaagttttattaggacttaaagagagatctacttcagagccagcagtcccgccagaagaggctgagccacacactgagcccgaggagcaggttcctgtggaggcagaaccccagaatatcgaagatgaagcaaaagaacaaattcagtcccttctccatgaaatggtacacgcagaacatgaaaccgagcatagttaccacgtggaagagacagtttcacaagactgtaatcaggatatggaagagatgatgtctgagcaggaaaatccagattccagtgaaccagtagtagaagatgaaagattgcaccatgatacagatgatgtaacataccaagtctatgaggaacaagcagtatatgaacctctagaaaatgaagggatagaaatcacagaagtaactgctccccctgaggataatcctgtagaagattcacaggtaattgtagaagaagtaagcatttttcctgtggaagaacagcaggaagtaccaccagatacttaaagcttcaaaaagactgcccctaccaccacaggaggaccagcctaaccatacgctccaaaagatggctgtgatagatcttgtgaagcaattactgagcagatcaagatctttgggaaggaacactaaagatgttttgaatgaattatagtccactggcattttagtgtatttttttttctttttagaaacacacatttctaaaaatgtcatgttacattcctgcatgtcccttttgatagcattagtggatccattggatttcttttttctttttgtgagacagcttttagtcttacctgaatttatgtgtgtttttccgacagtggttaataattatattggtgatgtagcagcaattgtgttggcagggttttcatatattattagtaattaacactaactgttggactgacttgtgtacactgtgttaaacatgatttaaaagctattaagagtactttgtgttagcactcttaaaaacgctaacagagatcatcattagctgtgaagatttgagttgtatatacctgcactgatattcttatcaaaaatttctacattagctttaagtgttcagattaacacttttgaaatttttgtagcttttagctgattaattagaaaaatttaatatttcagtgaaagttttaaattatcatttatttatttttttaaatgagaggggaaagctgaaattccttgttaagacacaaggaaaaagaatggccctactattatcatgcaaaaatgctttgttggcacctcagattaatcatataatagctatagtctcttcagcatttgtttaaattttagaaaacctgtataaattactggtgcataacttaaagattattctgcctttggctaattgagtaattcccctccagcactagagaccgctcagtgctcttactagatgaactcagtaacgccttgagctgggttgattgaggatgtgtgaaaagctcacagagcccgatgcctgctgctatttcacggcaatgagcctttttctttctacactgaagattttcttcttatttaatgtggtttattttgggctcagaaataattgctctgttgaaaataatcctttgtcagaaaagaaggtagctaccacatcattttgaaaggaccatgagcaactataagcaaagccataagaagtggtttgatcgatatattaggggtagctcttgattttgttaacattaagataaggtgactttttccccctgcttttaggattaaaatcaaagatacttctatatttttatcactatagatcatagttattatacaatgtagtgagtcctgcatgggtactcgatgtgtaatgaaacctgaaataataagataataagaaaagcaataattttctaaagctgtgctgtcggtgatacagagatgatactcaaattataataaaactcttcattttgtgaattatagaagctactttttataaagccatatttttttagggaaactaaggagtgacatagaactgatgaatgagtaaaagtaagttttgctggatttttgtagaactctggacgttgaggattcattatgctgtggttaactttaaatatttttgaattccaaatatctgaattaatgagccttgtctttacaaatatgtgccattgtgcaacatcggtggattttctaaaaataatgtaaatgtcttctattaaatgttgagtgcaataaaatacagaagaattctctatattgtcatt

SEQ ID NO: 5329 - protein, 270 aa, Homo sapiens
MAQRKNAKSSGNSSSSGSGSGSTSAGSSSPGARRETKHGGHKNGRKGGLSGTSFFTWFMVIALLGVWTSVAVVWFDLVDYEEVLGKLGIYDADGDGDFDVDDAKVLLGLKERSTSEPAVPPEEAEPHTEPEEQVPVEAEPQNIEDEAKEQIQSLLHEMVHAEHETEHSYHVEETVSQDCNQDMEEMMSEQENPDSSEPVVEDERLHHDTDDVTYQVYEEQAVYEPLENEGIEITEVTAPPEDNPVEDSQVIVEEVSIFPVEEQQEVPPDT

SEQ ID NO: 5330 - DNA, 1146 bp, Homo sapiens
ggggcgtggccgtcgggcggcgagccgcgcgctctcgccccgggagggagtcacaggttcgtacacgcgaggccgggcgcgcgcagccggcaggcgggtgaagtcttcccaggtgctgcaggcggtgctgaggcacagggtctgctgcaggagcagcggcccgaacccgctccagcggcccgccgccgccagcggttcccgcgtcgcgtgtgtacccccgcgcactgaaggaggtccgccagccctcaccagcccccgcggaccgtgcaatggcccagcgtaagaatgccaagagcagcggcaacagcagcagcagcggctccggcagcggtagcacgagtgcgggcagcagcagccccggggcccggagagagacaaagcatggaggacacaagaatgggaggaaaggcggactctcaggaacttcattcttcacgtggtttatggtgattgcattgctgggcgtctggacatctgtagctgtcgtttggtttgatcttgttgactatgaggaagttctaggaaaactaggaatctatgatgctgatggtgatggagattttgatgtggatgatgccaaagttttattaggacttaaagagagatctacttcagagccagcagtcccgccagaagaggctgagccacacactgagcccgaggagcaggttcctgtggaggcagaaccccagaatatcgaagatgaagcaaaagaacaaattcagtcccttctccatgaaatggtacacgcagaacatgttgagggagaagacttgcaacaagaagatggacccacaggagaaccacaacaagaggatgatgagtttcttatggcgactgatgtagatgatagatttgagaccctggaacctgaagtatctcatgaagaaaccgagcatagttaccacgtggaagagacagattccagtgaaccagtagtagaagatgaaagattgcaccatgatacagatgatgtaacataccaagtctatgaggaacaagcagtatatgaacctctagaaaatgaagggatagaaatcacagaagtaactgctccccctgaggataatcctgtagaagattcacaggtaattgtagaagaagtaagcatttttcctgtggaagaacagcaggaagtaccaccag

SEQ ID NO: 5331 - protein, 291 aa, Homo sapiens
MAQRKNAKSSGNSSSSGSGSGSTSAGSSSPGARRETKHGGHKNGRKGGLSGTSFFTWFMVIALLGVWTSVAVVWFDLVDYEEVLGKLGIYDADGDGDFDVDDAKVLLGLKERSTSEPAVPPEEAEPHTEPEEQVPVEAEPQNIEDEAKEQIQSLLHEMVHAEHVEGEDLQQEDGPTGEPQQEDDEFLMATDVDDRFETLEPEVSHEETEHSYHVEETDSSEPVVEDERLHHDTDDVTYQVYEEQAVYEPLENEGIEITEVTAPPEDNPVEDSQVIVEEVSIFPVEEQQEVP

SEQ ID NO: 5332 - DNA, 3514 bp, Homo sapiens
atcttgtaaaggagtaggaatggattgtgctgtttcacttttctgtccttttctctctggctaagaatatggaatggtttagggggagatattttcttctgtgtgttaacagagtttttaagattctgcagaaatgaaatgggacggagaaaaggatttggctacatttttatgtgatttcattaagttgtttatgtgctctgcctttggaaagagagacaaagcatggaggacacaagaatgggaggaaaggcggactctcaggaacttcattcttcacgtggtttatggtgattgcattgctgggcgtctggacatctgtagctgtcgtttggtttgatcttgttgactatgaggaagttctaggaaaactaggaatctatgatgctgatggtgatggagattttgatgtggatgatgccaaagttttattaggtaatttgcattgtatatagatgatcgtctcaaaatttcacaatgagagactgatgaaattgacataaatcaatcagcatgaacacttgaattaatccagaggactacttaagttaattctgtaggtggttgctttattgagaatattttgtattatgacctgcttagctatgcaagtttgtaacttcagaggtcctcataatgatacttggataataaagattccccatagacacttccattgaaaaagaaaagaagtaaacaagtgtcatttgtaatttgaaatgttttaagttaactgtcatgttactgtccatgaaatggatctggtgacttaggctctatctcctgacattgatttctttctcctgtgtcctcaattatttcttctcctgttaatgcccactggtaataattctcaaaatcgattgctcagaatattccattgtaaaatgcaccttggaaatggttgttttcctcatttgtaaattgaagacaatgcctattcctcaaggtggttgtgagaaccagtcaatgttgcatatgtgtaaacagccagcacatggttgggcattcagtttccctttatcattggtagaataagaatagtaatactcaaccaaaacgtctcagtcaggggttaaaaacttggaagcactgaaactgtgcttcctattcctacttaggtcaacagattgcaaaacaaatatttcagtcctttatcctttgtaatgaatgtgtctttgtgaaatgagtatagtggagcctgatttattctattgagatcattgagggggcaaatgcaaataattataaatgttgcacatgagtgaagccgtaagaatgcttaatttttaaaagaatattgtgacaacctgaaaacacaagatatgaaggctagaaaaaaagttatgaaataaactatagccttaagtatatggtacaatcgagaagcctaataaccagcctaattgtgaaaaacttatgtttgttttgtattcagaacacatttttccatagatgagattttatggtcttcagagattttttttttactctggtccacaaaaattgatttaattctaatatccatttctgcaactctcattgtaactatgtttctatggaaaatgcatttatcattctgccttgggatattaggaatatatttagttttacttctgaatgttctccagaatttctttggttacatccatggtgttaaatccattcagataccttacatggacaaaaatcatggattggctcacataattgtaaagcccaggagtagttttggcttttttcttttgttatgctggatctaggtgcttgaacagtgttctcaacatccatctgtctatggaccctcaggaatgttggctttcttctcgggcagagtctcgtgtgctcatcttcaaccctactccttatggggtgggagataagaaagctgtgattggtgacaccctgggatatgtgagtgcccacttttaaactgttgggtaaagaaaaattggagtcctctaaggaagttagtgtgtttttaccagaaggaggaggaattgatgcactgaaagcaggcagatgatggagtttgtttcccctttttctacccatcccattcctacttctccccctgcccaaatacagagaggtgaatgggatgggccaaaataggtatttcaaaataagaagctgtggagctaaacattgggtactcatgggcataaagatggaaacaggagacactagaacttctagagaggggagagagggagggagacaagggttgaaaaactaactattggatactatgctcattacctgagtgatggaatcattcatattctaaatttcaatatcacgcaatatacccatgcagcaaacttgcacgtgctccttgaatctaaatagaagttgaagttatatttaaaaattaaaaaaaaaaaagctagggagaagagagagatctcattccaaacaattattggtcaacaatagttttagaccattgaaagaatataagagaatgttgacttgataataaatattgccatttagatgtcaggtgataaagtttattttgttgttaagctctctccattttgccccattcagtttaaaaggaaagtttttgtgtttaggaaactaaaggatgggtgatatgtagcagacccataaggttattttcatgaaaaacctagcttgggctaatctgaaagattcctcaataacagtctttggtgtcttatcctttcttctccatttgcctaagaatataattgtataagctggatgtttattccttggctatcgtttttacctaggaatcaatttctgcaagagctctgtaagccttacaaagcagaaagtcatccatttcttttttctttgttctcatttagtgcctcatttgatttcactttgtgtatctatttattgctccatgttaagtcaggtatgcatacatcatagaagtctgcctctcatttccatcttctttgccttatgtatcacttctcttgtgtcctattagagggagatgatctatgcttaaagctgttgggttatttttgataattatataacaccaacatgctgtgtctatagttcccatttattgattcaactaatatttctgagtatctacagcatgccgggactgggcaaggcatgggggatacaagagattgaggtggctgcaatccctccagtgaaatgctgcaaaataagcaaggggctgagagagaaagtaatgagactgaaacgattgtcagtacagcccactagtccctctgcctagaacgtgctcctgaatgtgctcctgctctgtgtggtgggctgcctttgtctctcccacgggacccagcccagtcatcacctctgcactcagacatctctgaccctcccaagtggctgcatcccacacactccagttatcgcactcatcaccttgcctcattcttggactttgctgccagactacgatttatctcgagcacctatcctagtaactgacactaataggcattcattgtttgtttattgaatggtgactatacaaaataaattatct

SEQ ID NO: 5333 - protein, 68 aa, Homo sapiens
MKWDGEKDLATFLCDFIKLFMCSAFGKRDKAWRTQEWEERRTLRNFILHVVYGDCIAGRLDICSCRLV

SEQ ID NO: 5334 - DNA, 3670 bp, Homo sapiens
ggggcgtggccgtcgggcggcgagccgcgcgctctcgccccgggagggagtcacaggttcgtacacgcgaggccgggcgcgcgcagccggcaggcgggtgaagtcttcccaggtgctgcaggcggtgctgaggcacagggtctgctgcaggagcagcggcccgaacccgctccagcggcccgccgccgccagcggttcccgcgtcgcgtgtgtacccccgcgcactgaaggaggtccgccagccctcaccagcccccgcggaccgtgcaatggcccagcgtaagaatgccaagagcagcggcaacagcagcagcagcggctccggcagcggtagcacgagtgcgggcagcagcagccccggggcccggagagagacaaagcatggaggacacaagaatgggaggaaaggcggactctcaggaacttcattcttcacgtggtttatggtgattgcattgctgggcgtctggacatctgtagctgtcgtttggtttgatcttgttgactatgaggaagttctaggaaaactaggaatctatgatgctgatggtgatggagattttgatgtggatgatgccaaagttttattaggtaatttgcattgtatatagatgatcgtctcaaaatttcacaatgagagactgatgaaattgacataaatcaatcagcatgaacacttgaattaatccagaggactacttaagttaattctgtaggtggttgctttattgagaatattttgtattatgacctgcttagctatgcaagtttgtaacttcagaggtcctcataatgatacttggataataaagattccccatagacacttccattgaaaaagaaaagaagtaaacaagtgtcatttgtaatttgaaatgttttaagttaactgtcatgttactgtccatgaaatggatctggtgacttaggctctatctcctgacattgatttctttctcctgtgtcctcaattatttcttctcctgttaatgcccactggtaataattctcaaaatcgattgctcagaatattccattgtaaaatgcaccttggaaatggttgttttcctcatttgtaaattgaagacaatgcctattcctcaaggtggttgtgagaaccagtcaatgttgcatatgtgtaaacagccagcacatggttgggcattcagtttccctttatcattggtagaataagaatagtaatactcaaccaaaacgtctcagtcaggggttaaaaacttggaagcactgaaactgtgcttcctattcctacttaggtcaacagattgcaaaacaaatatttcagtcctttatcctttgtaatgaatgtgtctttgtgaaatgagtatagtggagcctgatttattctattgagatcattgagggggcaaatgcaaataattataaatgttgcacatgagtgaagccgtaagaatgcttaatttttaaaagaatattgtgacaacctgaaaacacaagatatgaaggctagaaaaaaagttatgaaataaactatagccttaagtatatggtacaatcgagaagcctaataaccagcctaattgtgaaaaacttatgtttgttttgtattcagaacacatttttccatagatgagattttatggtcttcagagattttttttttactctggtccacaaaaattgatttaattctaatatccatttctgcaactctcattgtaactatgtttctatggaaaatgcatttatcattctgccttgggatattaggaatatatttagttttacttctgaatgttctccagaatttctttggttacatccatggtgttaaatccattcagataccttacatggacaaaaatcatggattggctcacataattgtaaagcccaggagtagttttggcttttttcttttgttatgctggatctaggtgcttgaacagtgttctcaacatccatctgtctatggaccctcaggaatgttggctttcttctcgggcagagtctcgtgtgctcatcttcaaccctactccttatggggtgggagataagaaagctgtgattggtgacaccctgggatatgtgagtgcccacttttaaactgttgggtaaagaaaaattggagtcctctaaggaagttagtgtgtttttaccagaaggaggaggaattgatgcactgaaagcaggcagatgatggagtttgtttcccctttttctacccatcccattcctacttctccccctgcccaaatacagagaggtgaatgggatgggccaaaataggtatttcaaaataagaagctgtggagctaaacattgggtactcatgggcataaagatggaaacaggagacactagaacttctagagaggggagagagggagggagacaagggttgaaaaactaactattggatactatgctcattacctgagtgatggaatcattcatattctaaatttcaatatcacgcaatatacccatgcagcaaacttgcacgtgctccttgaatctaaatagaagttgaagttatatttaaaaattaaaaaaaaaaaagctagggagaagagagagatctcattccaaacaattattggtcaacaatagttttagaccattgaaagaatataagagaatgttgacttgataataaatattgccatttagatgtcaggtgataaagtttattttgttgttaagctctctccattttgccccattcagtttaaaaggaaagtttttgtgtttaggaaactaaaggatgggtgatatgtagcagacccataaggttattttcatgaaaaacctagcttgggctaatctgaaagattcctcaataacagtctttggtgtcttatcctttcttctccatttgcctaagaatataattgtataagctggatgtttattccttggctatcgtttttacctaggaatcaatttctgcaagagctctgtaagccttacaaagcagaaagtcatccatttcttttttctttgttctcatttagtgcctcatttgatttcactttgtgtatctatttattgctccatgttaagtcaggtatgcatacatcatagaagtctgcctctcatttccatcttctttgccttatgtatcacttctcttgtgtcctattagagggagatgatctatgcttaaagctgttgggttatttttgataattatataacaccaacatgctgtgtctatagttcccatttattgattcaactaatatttctgagtatctacagcatgccgggactgggcaaggcatgggggatacaagagattgaggtggctgcaatccctccagtgaaatgctgcaaaataagcaaggggctgagagagaaagtaatgagactgaaacgattgtcagtacagcccactagtccctctgcctagaacgtgctcctgaatgtgctcctgctctgtgtggtgggctgcctttgtctctcccacgggacccagcccagtcatcacctctgcactcagacatctctgaccctcccaagtggctgcatcccacacactccagttatcgcactcatcaccttgcctcattcttggactttgctgccagactacgatttatctcgagcacctatcctagtaactgacactaataggcattcattgtttgtttattgaatggtgactatacaaaataaattatct

SEQ ID NO: 5335 - protein, 113 aa, Homo sapiens
MAQRKNAKSSGNSSSSGSGSGSTSAGSSSPGARRETKHGGHKNGRKGGLSGTSFFTWFMVIALLGVWTSVAVVWFDLVDYEEVLGKLGIYDADGDGDFDVDDAKVLLGNLHCI

SEQ ID NO: 5336 - DNA, 1004 bp, Homo sapiens
aagtgcatgcagtgtgcctaaaacctgccagcagtacttttgagtttttttttttgttttgttttactttagcatttattattcatggattgaagaaatcaaaatggctgaagataaagagacaaagcatggaggacacaagaatgggaggaaaggcggactctcaggaacttcattcttcacgtggtttatggtgattgcattgctgggcgtctggacatctgtagctgtcgtttggtttgatcttgttgactatgaggaagttctaggaaaactaggaatctatgatgctgatggtgatggagattttgatgtggatgatgccaaagttttattaggcaagacccagtggggtagccaagagaaaaactaaggctaaagttaaagaactcactacaaagatgacagaaaggaaagtagaagttctaccagatatgcacacttaacaaagggaaatacccagaaaagaaacggctaaagctctggcatcatcatcccagaacatggtcatgttccagattgcagtttgttacaaaaaagcatggaaaatgtaatattgctctgattggtgagggtgtgtaaattagccattgaatgtatcattggtgcttagcaagtaaattacctgaaatttaaatataccgtctcatacttctaaatgtaaaaacattttaaaaatgtcatagaatatgatgtaataacttctatttattgatcatgtattcagataaatgtatatgtatcatgaatttttatggattaatatattgaatactttcattgacgttaaataagaatattaagattttaaatgttatttctgtgcataatgccttgtaactttttcaagtatgctaaatactcagggagatggatttgctcgttgttttcttccctccttccccttcctgcttccctgtttttctctttcgtggacacctccccaggctcatgtgccaccaccttccctcctctccagccctcccagccctcccgcagccttt

SEQ ID NO: 5337 - protein, 89 aa, Homo sapiens
MAEDKETKHGGHKNGRKGGLSGTSFFTWFMVIALLGVWTSVAVVWFDLVDYEEVLGKLGIYDADGDGDFDVDDAKVLLGKTQWGSQEKN

SEQ ID NO: 5338 - DNA, 1069 bp, Homo sapiens
agtctcaagctctggtaggcaagtgcatgcagtgtgcctaaaacctgccagcagtacttttgagtttttttttttgttttgttttactttagcatttattattcatggattgaagaaatcaaaatggctgaagataaagagacaaagcatggaggacacaagaatgggaggaaaggcggactctcaggaacttcattcttcacgtggtttatggtgattgcattgctgggcgtctggacatctgtagctgtcgtttggtttgatcttgttgactatgaggaagttctagccaaagcaaaggacttccgttataacttatcagaggtgcttcaaggaaaactaggaatctatgatgctgatggtgatggagattttgatgtggatgatgccaaagttttattaggcaagacccagtggggtagccaagagaaaaactaaggctaaagttaaagaactcactacaaagatgacagaaaggaaagtagaagttctaccagatatgcacacttaacaaagggaaatacccagaaaagaaacggctaaagctctggcatcatcatcccagaacatggtcatgttccagattgcagtttgttacaaaaaagcatggaaaatgtaatattgctctgattggtgagggtgtgtaaattagccattgaatgtatcattggtgcttagcaagtaaattacctgaaatttaaatataccgtctcatacttctaaatgtaaaaacattttaaaaatgtcatagaatatgatgtaataacttctatttattgatcatgtattcagataaatgtatatgtatcatgaatttttatggattaatatattgaatactttcattgacgttaaataagaatattaagattttaaatgttatttctgtgcataatgccttgtaactttttcaagtatgctaaatactcagggagatggatttgctcgttgttttcttccctccttccccttcctgcttccctgtttttctctttcgtggacacctccccaggctcatgtgccaccaccttccctcctctccagccctcccagccctcccgcagccttt

SEQ ID NO: 5339 - protein, 104 aa, Homo sapiens
MAEDKETKHGGHKNGRKGGLSGTSFFTWFMVIALLGVWTSVAVVWFDLVDYEEVLAKAKDFRYNLSEVLQGKLGIYDADGDGDFDVDDAKVLLGKTQWGSQEKN

SEQ ID NO: 5340 - DNA, 1183 bp, Homo sapiens
aagtgcatgcagtgtgcctaaaacctgccagcagtacttttgagtttttttttttgttttgttttactttagcatttattattcatggattgaagaaatcaaaatggctgaagataaagagacaaagcatggaggacacaagaatgggaggaaaggcggactctcaggaacttcattcttcacgtggtttatggtgattgcattgctgggcgtctggacatctgtagctgtcgtttggtttgatcttgttgactatgaggaagttctaggaaaactaggaatctatgatgctgatggtgatggagattttgatgtggatgatgccaaagttttattaggcaagacccagtggggtagccaagagaaaaactaaggctaaagttaaagaactcactaaagaagagctcaagaaggagaaagagaaacctgagtcaaggaaggaaagtaagaatgaagagagaaaaaaggggaagaaagaggatgtccgaaaggataagaaaattgctgatgcagacctatccaggaaggagtctcctaagggtaaaaaggacagagaaaaagagaaagtggacctagaaaaaagtgctaaaaccaaggaaaataggaaaaaatcaacaaatatgaaggatgtttctagtaaaatggcatcccgagacaaagatgacagaaaggaaagtagaagttctaccagatatgcacacttaacaaagggaaatacccagaaaagaaacggctaaagctctggcatcatcatcccagaacatggtcatgttccagattgcagtttgttacaaaaaagcatggaaaatgtaatattgctctgattggtgagggtgtgtaaattagccattgaatgtatcattggtgcttagcaagtaaattacctgaaatttaaatataccgtctcatacttctaaatgtaaaaacattttaaaaatgtcatagaatatgatgtaataacttctatttattgatcatgtattcagataaatgtatatgtatcatgaatttttatggattaatatattgaatactttcattgacgttaaataagaatattaagattttaaatgttatttctgtgcataatgccttgtaactttttcaagtatgctaaatactcagggagatggatttgctcgttgttttcttccctccttccccttcctgcttccctgttttt

SEQ ID NO: 5341 - protein, 89 aa, Homo sapiens; identical to SEQ ID NO: 5337

SEQ ID NO: 5342 - DNA, 958 bp, Homo sapiens
agtctcaagctctggtaggcaagtgcatgcagtgtgcctaaaacctgccagcagtacttttgagtttttttttttgttttgttttactttagcatttattattcatggattgaagaaatcaaaatggctgaagataaagagacaaagcatggaggacacaagaatgggaggaaaggcggactctcaggaacttcattcttcacgtggtttatggtgattgcattgctgggcgtctggacatctgtagctgtcgtttggtttgatcttgttgactatgaggaagttctagccaaagcaaaggacttccgttataacttatcagaggtgcttcaaggaaaactaggaatctatgatgctgatggtgatggagattttgatgtggatgatgccaaagttttattaggcaagacccagtggggtagccaagagaaaaactaaggctaaagttaaagaactcactaaagaagagctcaagaaggagaaagagaaacctgagtcaaggaaggaaagtaagaatgaagagagaaaaaaggggaagaaagaggatgtccgaaaggataagaaaattgctgatgcagacctatccaggaaggagtctcctaagggtaaaaaggacagagaaaaagagaaagtggacctagaaaaaagtgctaaaaccaaggaaaataggaaaaaatcaacaaatatgaaggatgtttctagtaaaatggcatcccgagacaaagatgacagaaaggaaagtagaagttctaccagatatgcacacttaacaaagggaaatacccagaaaagaaacggctaaagctctggcatcatcatcccagaacatggtcatgttccagattgcagtttgttacaaaaaagcatggaaaatgtaatattgctctgattggtgagggtgtgtaaattagccattgaatgtatcattggtgcttagcaagtaaattacctgaaattt

SEQ ID NO: 5343 - protein, 104 aa, Homo sapiens; identical to SEQ ID NO: 5339

SEQ ID NO: 5344 - DNA, 1700 bp, Homo sapiens
ggggcgtggccgtcgggcggcgagccgcgcgctctcgccccgggagggagtcacaggttcgtacacgcgaggccgggcgcgcgcagccggcaggcgggtgaagtcttcccaggtgctgcaggcggtgctgaggcacagggtctgctgcaggagcagcggcccgaacccgctccagcggcccgccgccgccagcggttcccgcgtcgcgtgtgtacccccgcgcactgaaggaggtccgccagccctcaccagcccccgcggaccgtgcaatggcccagcgtaagaatgccaagagcagcggcaacagcagcagcagcggctccggcagcggtagcacgagtgcgggcagcagcagccccggggcccggagagagacaaagcatggaggacacaagaatgggaggaaaggcggactctcaggaacttcattcttcacgtggtttatggtgattgcattgctgggcgtctggacatctgtagctgtcgtttggtttgatcttgttgactatgaggaagttctagccaaagcaaaggacttccgttataacttatcagaggtgcttcaaggaaaactaggaatctatgatgctgatggtgatggagattttgatgtggatgatgccaaagttttattaggcaagcctgaccaaagatggcagtaatgaaaatattgattctcttgaggaagtccttaatattttagcagaggaaagttcagattggttttatggtttcctctcatttctctatgatataatgactccttttgaaatgctagaagaagaagaagaagaaagcgaaaccgcagatggtgttgatggtacgtcacagaatgaaggggttcagggaaagacttgtgtcatattggatttacataaccagtaaccttgattcagggactgaagtcattggctaatgaacacctgaagcagcctcctttttcttttctttccttggcttatgcagggcttaatgtgcagtggggtggttgtgatcttaccgtgcaagtcaaccatgtgatcttgcccagtacagctactagctagtcccttgctcgctcagctcccccaacttctattgaagaaaatggtactcctcattcttgtagtcagctacaaagtacactgaaaatgatgttcttggtggtataattggtttctgtatcgttttgtttcaactcatgtattcactgaactaaatttggacacttaacagcaaattgtgttgtggttaacccttgatgcttgtctttctaacacactattaattatgatgattctaatggatttcattataaaaatatttctggcatgatttttaagttaaatgcttctctgttctttaacatgactgatgtataaaatgatggttctttactaagctgatattttttattgtaatttgtttaggtttgtcagataggttcatacaaatttctatgtaaaattctgtgttaatggtgcttttaaaataatttaaaaataactccatgtttttgccttagagtaagttaacttactgttttcagatagtagcatgacatatttctgtctgtgaaagcaaaatttattttaaattttatttccaaatatacatccagagaaagtaatttgtattttttttaaagtaggcatattacacaagagggaacatgtgaatatgtatcttaatgttgtacatattaaaattattcatcctaa

SEQ ID NO: 5345 - protein, 130 aa, Homo sapiens
MAQRKNAKSSGNSSSSGSGSGSTSAGSSSPGARRETKHGGHKNGRKGGLSGTSFFTWFMVIALLGVWTSVAVVWFDLVDYEEVLAKAKDFRYNLSEVLQGKLGIYDADGDGDFDVDDAKVLLGKPDQRWQ

SEQ ID NO: 5346 - DNA, 546 bp, Homo sapiens
agtctcaagctctggtaggcaagtgcatgcagtgtgcctaaaacctgccagcagtacttttgagtttttttttttgttttgttttactttagcatttattattcatggattgaagaaatcaaaatggctgaagataaagagacaaagcatggaggacacaagaatgggaggaaaggcggactctcaggaacttcattcttcacgtggtttatggtgattgcattgctgggcgtctggacatctgtagctgtcgtttggtttgatcttgttgactatgaggaagttctagccaaagcaaaggacttccgttataacttatcagaggtgcttcaaggaaaactaggaatctatgatgctgatggtgatggagattttgatgtggatgatgccaaagttttattaggcaagcctgaccaaagatggcagtaatgaaaatattgattctcttgaggaagtccttaatattttagcagaggaaagttcagattggttttatggtttcctctcatttctctatgatataatgactccttttgaaatgctaga

SEQ ID NO: 5347 - protein, 101 aa, Homo sapiens
MAEDKETKHGGHKNGRKGGLSGTSFFTWFMVIALLGVWTSVAVVWFDLVDYEEVLAKAKDFRYNLSEVLQGKLGIYDADGDGDFDVDDAKVLLGKPDQRWQ

SEQ ID NO: 5348 - DNA, 1031 bp, Homo sapiens
ggggcgtggccgtcgggcggcgagccgcgcgctctcgccccgggagggagtcacaggttcgtacacgcgaggccgggcgcgcgcagccggcaggcgggtgaagtcttcccaggtgctgcaggcggtgctgaggcacagggtctgctgcaggagcagcggcccgaacccgctccagcggcccgccgccgccagcggttcccgcgtcgcgtgtgtacccccgcgcactgaaggaggtccgccagccctcaccagcccccgcggaccgtgcaatggcccagcgtaagaatgccaagagcagcggcaacagcagcagcagcggctccggcagcggtagcacgagtgcgggcagcagcagccccggggcccggagagagacaaagcatggaggacacaagaatgggaggaaaggcggactctcaggaacttcattcttcacgtggtttatggtgattgcattgctgggcgtctggacatctgtagctgtcgtttggtttgatcttgttgactatgaggaagttctaggaaaactaggaatctatgatgctgatggtgatggagattttgatgtggatgatgccaaagttttattaggcaagtacacattttatgttttttgttagtggtgataaaatgctggaaacaattatttttgctttaataatatctatctcaatagtatatatcttacaggagacttttctcccttaaatcatatatttcattactgttaaaattttaaatggcttatttttccacactctttcatgtcaatttacttttatcaatgaataagtgtatatctcttacacatatatcttttgataagtataataatttcatgtgtgtttccagatttaaagtacttcttattctgaacttagaatttgaatagataatatcctagtctgtttttagatatggtaattatagccatttttcattaacattacacattcacttccatttcaaaatgtaaatttctacaggcttacataaattaatgatgaaataaaagtgataataaacatctt

SEQ ID NO: 5349 - protein, 116 aa, Homo sapiens [sequence omitted]

SEQ ID NO: 5350 - DNA, 597 bp, Homo sapiens
ggggcgtggccgtcgggcggcgagccgcgcgctctcgccccgggagggagtcacaggttcgtacacgcgaggccgggcgcgcgcagccggcaggcgggtgaagtcttcccaggtgctgcaggcggtgctgaggcacagggtctgctgcaggagcagcggcccgaacccgctccagcggcccgccgccgccagcggttcccgcgtcgcgtgtgtacccccgcgcactgaaggaggtccgccagccctcaccagcccccgcggaccgtgcaatggcccagcgtaagaatgccaagagcagcggcaacagcagcagcagcggctccggcagcggtagcacgagtgcgggcagcagcagccccggggcccggagagagacaaagcatggaggacacaagaatgggaggaaaggcggactctcaggaacttcattcttcacgtggtttatggtgattgcattgctgggcgtctggacatctgtagctgtcgtttggtttgatcttgttgactatgaggaagttctagccaaagcaaaggacttccgttataacttatcagaggtgcttcaaggaaaactaggaatctatgatgctgatggtg

SEQ ID NO: 5351 - protein, 108 aa, Homo sapiens
MAQRKNAKSSGNSSSSGSGSGSTSAGSSSPGARRETKHGGHKNGRKGGLSGTSFFTWFMVIALLGVWTSVAVVWFDLVDYEEVLAKAKDFRYNLSEVLQGKLGIYDAD

SEQ ID NO: 5352 - DNA, 663 bp, Homo sapiens
aagaaatcaaaatggctgaagataaagagacaaagcatggaggacacaagaatgggaggaaaggcggactctcaggaacttcattcttcacgtggtttatggtgattgcattgctgggcgtctggacatctgtagctgtcgtttggtttgatcttgttgactatgaggaagttctaggtaagaattttgatatccttatgtgaatttgtaagagagtaagtgacatctcttaggagtcttgaatatttgttatcatctttctggtactggtaatttctatagcctttcagtggttctcaatagagtgaggctgaaaggggatatgaagaaggttaccttggagtattgtcttttgaactctttaaatgtgacctgtaggtttttgaaaaaaggctttatattgtatgtctgtcacacagggagaagttttatcaaacagtactcattctcactatatgcagtactttttgatttctattcaattttgttatattataaattttaaaaatacttgatcatgagccattacatttatttaaggacttgctaatggatcataaccacacaatatgcaaaactcttccttagagagggttttcaaagtacacccttctgtgtctctgttgggatgggatgagtacgtgtgcacacatataggtactg

SEQ ID NO: 5353 - protein, 63 aa, Homo sapiens
MAEDKETKHGGHKNGRKGGLSGTSFFTWFMVIALLGVWTSVAVVWFDLVDYEEVLGKNFDILM

SEQ ID NO: 5354 - DNA, 329 bp, Homo sapiens
tattattcatggattgaagaaatcaaaatggctgaagataaagaatcaatgtgaaaccagttactgtcttgtactgaagattatttgaaggactgtcagggattctgcctgaaagtttcatcataaatgacttcccaccactcagcttttctgacttcctgggcctgctcttgctgagagatctgtgcactcgataggcttttcctctgtcaccactctgttgctttgactcattgggttagattgtgtctgaaatgtagagttttgtgcatagagctagaaaacttaattgaagttgttagaatcacatctaaaataaaaatgtaaac

SEQ ID NO: 5355 - protein, 39 aa, Homo sapiens
RLFEGLSGILPESFIINDFPPLSFSDFLGLLLLRDLCTR

SEQ ID NO: 5356 - DNA, 2745 bp, Homo sapiens
ataaacaacttcaacggcctttccatgcccaaagacactgcagcagagccgtctatgaatgacagatgaaatgccttagagtcttagttccaaaccacctccccggacagtcggaaatcccactggctggaggaataaataaattccttatcttgtcaaggaagctcctcccaagctacaaaagttgcagacagcaaagggatcaagtgaccccagagatgaaatctgtgactctctggtggagcaacatgatagtaataaacaaaggttgagtgcctgctgtataaagcaacctctggagtgcctgatatctactaactcttttagcacccactcgaccctgtgagatgcgtattactttattgtatctaccactgtaaaaaagaatgaaccaagctacagcaatattatgttgcttgccctgagtcacacagctgagtaagtcacaggagtttgtgctcataatgactttgctatgctgatgtttgaacctggaaccattcagcaaccctccagctaatatggctccatgctctacttctggaaaagctgagttcctgcagccttgtcctacatcacccaaaagagctggaaaagaatgcagtgagttccattctatttgttccgagaataggaaagccacattgaagcaatatcttaaagagaaatctatagttaggagtgatgaagatttgaaacagatgtcagcagaaagaaaaagggagaggcaccatgataattatactcagtgatgctttttaaatgacatatattcagttaaatatagggaggtttgctgctagccatatgaacaaagcacaagagaattcctggatcaaggcagacttaaagagacattgaaaaaaaaacaaaattcaaaattttgacctagtgcaggaagaagtgcaagtacaggggaagtggagggaaggagtggggaggctggcacagagatggcacgggcagatacgagcagattgactcgccaggactgtcattgggccaccgctcttagcaggaatttcaccattgaatgacctaattattgtcttgggaaaaacacaagagctcctgtccataacaggataacagatgtatttcagtggagcacagaataggccggatggtgactagcaagaataaaagcccaagtggactgaagaatccatccaagatatggtcaggacgggcttgtggaaaacttgtgcaataatgagaagaaatgttatttgtcactaccttttttaggcagctgtgtggataaacctactttggggtaggagctgagcctcaggcctgtgaccgctagaagccagacttgaagccaggaaagaggccgctcttcccaggagttgggagaatttgactttggtgtagaatccaaaaggcgggagagagggttccagggaggagctgggggtggaggctaaaaaaggagccctggttgccaaagccaggaggtgactttacaggagagcagcagtgactaagccaggaagtgactttgcgggagagcagcagtgactaattcaggaggtgactttgcggaagagcagcagtgactaagccaggaggtgactttgcgggaaagctgcagtgattgtgaagttgttcacatacagggggtcatgggacaccctctacgatctcccgtgggaaatcctcagtaagcactctcactctagcaataagcactctcactctagaaagcccttttggtgcttccagtcacattgcctggcccacgctcggtgagagctcacatgcgcttctggtcctggccttctcagacgccacagtagctgcccaccctgcaaaagacctggaaggggaggggagcctgtgccacagcagccagaggatgaatgtcctgtcatgaacaattcctgggggcactatgtacattttgtagaagtcctgccagaatggaaccttgctgtctacagcagcgaccttgataacacatcatttgatttttcctccttttgtgactcatgcttctgctacctcaccctggcttcctgagatcacctcccagatgaactccctgcactgaattctggtctcagtttgctttggggagaactcaaaactaagacattcaccactgtgtttgtgtgagccaaatcttcacatcatgagcaggcgctatgtctgcgttcagccagacaaacagcaaaccagcaactgcccacatgaatacagtccatggacaagaggagagtgatagctgagcgactttgggacttgctgtcaaagatacctgtctccctctctttcattctctttacctttccatcagactatgtggctgcctcattcccccgtgtcctgcaagcaaggatattaactatacaaacagtccagcttaaaacaaaatgggcagaatatttgaatagacacttcacaaaggaagacaaacaaattaccaataagtgtgttaacaattcttaacatcgttagtcatcagggaagtggaaattaataccacaaggagaaatcactacacactaaagtggctaaaatgaaaaagagtaatgacatcaaattctaatctgagtatagagcaactgttgatggaaatataagatggtacagccactttggatataataaaatgatgcaaccactttggaaaagtttggcagctttatgtaaaactaagcaaatacctttggcccagcaattccactcaagcaatccttccctaaagaaataaaaatatatatccgccaaaagatttgt

SEQ ID NO: 5357 - protein, 68 aa, Homo sapiens
MKCLRVLVPNHLPGQSEIPLAGGINKFLILSRKLLPSYKSCRQQRDQVTPEMKSVTLWWSNMIVINKG

SEQ ID NO: 5358 - DNA, 1514 bp, Homo sapiens
caagaccaagtcgtaatagcaacttcccttcctcagctgcctgaactttttttttcccttgtagctggagagaagtgtcacattttgctcactctcaaccttcctcgcccacccccttcccggagaacctgtgcggtgtgtagagggtgctgtgagccacctccagcctcgggtggctgcttaagtaactttcaactcctctcttcttaacactatgaagtgtctcgggaagcgcaggggccaggcagctgctttcctgcctctttgctggctctttttgaagattctgcaaccggggcacagccacctttataacaaccgctatgctggtgataaagtgataagatttattcccaaaacagaagaggaagcatatgcactgaagaaaatatcctatcaacttaagggtcctcatagaagatcttcagaaaacactggagaagggaagcagcttgcacacccagagaaaccgaagatccctctctggatataattatgaagtttatcactccttagaagaaattcaaaattggatgcatcatctgaataaaactcactcaggcctcattcacatgttctctattggaagatcatatgagggaagatctctttttattttaaagctgggcagacgatcacgactcaaaagagctgtttggatagactgtggtattcatgcaagagaatggattggtcctgccttttgtcagtggtttgtaaaagaagctcttctaacatataagagtgacccagccatgagaaaaatgttgaatcatctatatttctatatcatgcctgtgtttaacgtcgatggataccattttagttggaccaatgatcgattttggagaaaaacaaggtcaaggaactcaaggtttcgctgccgtggagtggatgccaatagaaactggaaagtgaagtggtgtgatgtgagctctggtagctcaatggattgggcctacaaaaatggaataccttatgcatttgctttcgaactacgtgacactggatattttggatttttactcccagagatgctcatcaaacccacctgtacagaaactatgctggctgtgaaaaatatcacaatgcacctgctaaagaaatgtccctgagacagcccaaggctcaggtcaactgccataggattctgagcaaggcctacttggccctggatagaaattgttttcaaagagaagggcagctgcttagagtgaacatgtctatggactttaaaaagaccccacgcaatttgactttgtggcaatagaaaacagtaaaaaacagggcatagcctagtttgttataagaaaaagcatccattttctatccttttagagtcttatttgattatggtgggagggaatgttttcaaatttcccatttctcaagaaatgttcatattaattgaggatttcccttcaataaatctcatgtcctcaattaggatctaggctagtaatgatgtttaattacttggttctcattggaaatggaaaattatgaaatggaaa

SEQ ID NO: 5359 - protein, 193 aa, Homo sapiens
MHHLNKTHSGLIHMFSIGRSYEGRSLFILKLGRRSRLKRAVWIDCGIHAREWIGPAFCQWFVKEALLTYKSDPAMRKMLNHLYFYIMPVFNVDGYHFSWTNDRFWRKTRSRNSRFRCRGVDANRNWKVKWCDVSSGSSMDWAYKNGIPYAFAFELRDTGYFGFLLPEMLIKPTCTETMLAVKNITMHLLKKCP

SEQ ID NO: 5360 - DNA, 1969 bp, Homo sapiens
aagatcaggctcagctgctgctgctgctgctgctgcttgtcccaagaccaagtcgtaatagcaacttcccttcctcagctgcctgaactttttttttcccttgtagctggagagaagtgtcacattttgctcactctcaaccttcctcgcccacccccttcccggagaacctgtgcggtgtgtagagggtgctgtgagccacctccagcctcgggtggctgcttaagtaactttcaactcctctcttcttaacactatgaagtgtctcgggaagcgcaggggccaggcagctgctttcctgcctctttgctggctctttttgaagattctgcaaccggggcacagccacctttataacaaccgctatgctggtgataaagtgataagatttattcccaaaacagaagaggaagcatatgcactgaagaaaatatcctatcaacttaaggtggacctgtggcagcccagcagtatctcctatgtatcagagggaacagttactgatgtccatatcccccaaaatggttcccgagccctgttagccttcttacaggaagccaacatccagtacaaggtcctcatagaagatcttcagaaaacactggagaagggaagcagcttgcacacccagagaaaccgaagatccctctctggatataattatgaagtttatcactccttagaagaaattcaaaattggatgcatcatctgaataaaactcactcaggcctcattcacatgttctctattggaagatcatatgagggaagatctctttttattttaaagctgggcagacgatcacgactcaaaagagctgtttggatagactgtggtattcatgcaagagaatggattggtcctgccttttgtcagtggtttgtaaaagaagctcttctaacatataagagtgacccagccatgagaaaaatgttgaatcatctatatttctatatcatgcctgtgtttaacgtcgatggataccattttagttggaccaatgatcgattttggagaaaaacaaggtcaaggaactcaaggtttcgctgccgtggagtggatgccaatagaaactggaaagtgaagtggtgtgatgaaggagcttctatgcacccttgtgatgacacatactgtggcccttttccagaatctgagccggaagtgaaggctgtagctaacttccttcgaaaacacagaaagcacattagggcttatctctcctttcatgcatatgctcagatgttactgtatccctattcttacaaatatgcaacaattcccaattttagatgtgtggaatctgcagcttataaagctgtgaatgcacttcagtcagtatacggggtacgatacagatatggaccagcctccacaacgttgtatgtgagctctggtagctcaatggattgggcctacaaaaatggaataccttatgcatttgctttcgaactacgtgacactggatattttggatttttactcccagagatgctcatcaaacccacctgtacagaaactatgctggctgtgaaaaatatcacaatgcacctgctaaagaaatgtccctgagacagcccaaggctcaggtcaactgccataggattctgagcaaggcctacttggccctggatagaaattgttttcaaagagaagggcagctgcttagagtgaacatgtctatggactttaaaaagaccccacgcaatttgactttgtggcaatagaaaacagtaaaaaacagggcatagcctagtttgttataagaaaaagcatccattttctatccttttagagtcttatttgattatggtgggagggaatgttttcaaatttcccatttctcaagaaatgttcatattaattgaggatttcccttcaataaatctcatgtcctcaattaggatctaggctagtaatgatgtttaattacttggttctcattggaaatggaaaattatgaaatggaaa

SEQ ID NO: 5361 - protein, 437 aa, Homo sapiens
MKCLGKRRGQAAAFLPLCWLFLKILQPGHSHLYNNRYAGDKVIRFIPKTEEEAYALKKISYQLKVDLWQPSSISYVSEGTVTDVHIPQNGSRALLAFLQEANIQYKVLIEDLQKTLEKGSSLHTQRNRRSLSGYNYEVYHSLEEIQNWMHHLNKTHSGLIHMFSIGRSYEGRSLFILKLGRRSRLKRAVWIDCGIHAREWIGPAFCQWFVKEALLTYKSDPAMRKMLNHLYFYIMPVFNVDGYHFSWTNDRFWRKTRSRNSRFRCRGVDANRNWKVKWCDEGASMHPCDDTYCGPFPESEPEVKAVANFLRKHRKHIRAYLSFHAYAQMLLYPYSYKYATIPNFRCVESAAYKAVNALQSVYGVRYRYGPASTTLYVSSGSSMDWAYKNGIPYAFAFELRDTGYFGFLLPEMLIKPTCTETMLAVKNITMHLLKKCP

SEQ ID NO: 5362 - DNA, 1580 bp, Homo sapiens
aagatcaggctcagctgctgctgctgctgctgctgcttgtcccaagaccaagtcgtaatagcaacttcccttcctcagctgcctgaactttttttttcccttgtagctggagagaagtgtcacattttgctcactctcaaccttcctcgcccacccccttcccggagaacctgtgcggtgtgtagagggtgctgtgagccacctccagcctcgggtggctgcttaagtaactttcaactcctctcttcttaacactatgaagtgtctcgggaagcgcaggggccaggcagctgctttcctgcctctttgctggctctttttgaagattctgcaaccggggcacagccacctttataacaaccgctatgctggtgataaagtgataagatttattcccaaaacagaagaggaagcatatgcactgaagaaaatatcctatcaacttaaggtggacctgtggcagcccagcagtatctcctatgtatcagagggaacagttactgatgtccatatcccccaaaatggttcccgagccctgttagccttcttacaggaagccaacatccagtacaaggtcctcatagaagatcttcagaaaacactggagaagggaagcagcttgcacacccagagaaaccgaagatccctctctggatataattatgaagtttatcactccttagaagaaattcaaaattggatgcatcatctgaataaaactcactcaggcctcattcacatgttctctattggaagatcatatgagggaagatctctttttattttaaagctgggcagacgatcacgactcaaaagagctgtttggatagactgtggtattcatgcaagagaatggattggtcctgccttttgtcagtggtttgtaaaagaagctcttctaacatataagagtgacccagccatgagaaaaatgttgaatcatctatatttctatatcatgcctgtgtttaacgtcgatggataccattttagttggaccaatgatcgattttggagaaaaacaaggtcaaggaactcaaggtttcgctgccgtggagtggatgccaatagaaactggaaagtgaagtggtgtggtaagtttgggaccaactgggatccagatccaaaggtttctgcaggttttactctgcaaaatatgagtccagaggactctcatgggagactcatgtttttctgtatgtgaaaacctggtagagaaaggtacagatacgtacatgatagctgtaattggcaaaagaaaatgaaaggattcttttttaatatataaaaatcaaggattttaaatatgtcaattcggtcctgaaaactgaaaatttaaatacatatgtaaaagcagcaaactgaggaatatttgtcattccccaaattaaaacatgaaccgtggtgtagtataattctggttaaatctttttatccttttcatacaagcaccactgatgctgcattcggctgtctgtcgtggtcagagctgtcatgaccttgtctatattctaccactctgctggtcatacgtggattgaccatgcacattgggaatgtatttctgctgcattccatgt

SEQ ID NO: 5363 - protein, 315 aa, Homo sapiens
MKCLGKRRGQAAAFLPLCWLFLKILQPGHSHLYNNRYAGDKVIRFIPKTEEEAYALKKISYQLKVDLWQPSSISYVSEGTVTDVHIPQNGSRALLAFLQEANIQYKVLIEDLQKTLEKGSSLHTQRNRRSLSGYNYEVYHSLEEIQNWMHHLNKTHSGLIHMFSIGRSYEGRSLFILKLGRRSRLKRAVWIDCGIHAREWIGPAFCQWFVKEALLTYKSDPAMRKMLNHLYFYIMPVFNVDGYHFSWTNDRFWRKTRSRNSRFRCRGVDANRNWKVKWCGKFGTNWDPDPKVSAGFTLQNMSPEDSHGRLMFFCM

SEQ ID NO: 5364 - DNA, 2688 bp, Homo sapiens
agcagcctcggggagcagcccgggctgtttgttccgtcaccggggaaaggaggtacacacagtcgcgcgcgcacggacacacacacacacgcacgcacgcacacacaccggtggcgagttcgagccccgcggcccctgtccgcccgcgtgcgcccctcgacacagctcgcctcccgccccctgattcctgctgctgccgcccagaggagaaaggaacctctgcctcgaatttccccactgcgccgggcgctgcggagagcggcgagggtgggcgcgaggcggagaacgcgatgaatgagttctcccctcgcctcggagttgtctgagttggcggcgctgcgcccaggcttccggctctcagcgccccacgcgcgcgtggctccccgggctgccacccacgcccgcggccggggccgagccagccacgcagggcagccgaggctccggagctcctgtcccggccccagtccgggtaaaaggagggttgtccccagcggaggcgcacagccgcgcgttctccctgcactctcttcgcggtcccatctgttccccatggcgtctcatccgcaaacccggatccaggcttacctggagaagaacaagatcggtcccctgtttgaggaattaatgaccaagttaataactgagacacctgaccagccaatcccatttctcattgaccatcttcagtctaaacaagggaaccgtggacaacttcaaagaactttgtctggatctgcagctctatgggcagaaagtgaaaaatcagaatccaaaggaacaagaagggatttcagaagctatgataaaccttggcaattaaatgcaaagaagcctaaaaaatcaaaaagtgaccttgctgtgtctaatatttctccaccatcaccggactccaaatcattgccaaggtcagtagagcatccaaagtggaactggaggactaaaccacaaagccgtgattttgatgaattgaatcacatccttcaggagagcaagaagctggggaaagcccttgagaatctctctcgaagtattgcaatttcagatgaactcgataaggaaacagtgacatttaattcttctcttctgaggccccgtgtgattggagaatggattggtagagaagaaaatgatgctgatcccctagctgctgaaatgctacagcctccaattccaagaagcaaaaatgaccaatgggaaagtgaagatagtggctctagtcctgcaggaagcttaaagatggagcctaagaacaaaggattaaaacagcagcaacagcaacataagaaactcctggccgcaatgctctctcaagattcttttgagtccatccacagccctaccccatctgtaacagaagaagatattgataatgaagatgatgcaatggaattgctggaggatcttaatgatttaagaatggagggagtaacaaccctggtaccttctgggagcaaatttaaccaaggccgtcctacttaccctgctgagcctcaggccaaggtcacactgaacatctgttcaaggtgtgccaggcttcaaggagacaacctggaagaaaggacagaagagtcactaccaatactccattctccagatgaaaaaatcccagattcattcgattccttgcctgggactgaagaagcactaatggaggagggtgacgaatttgagaaagcatctaaactaacaggacctggagaagcctccagtggagtaggacactcactgaaaaactacatggaagaagatgaatccttaaagcaattgcaggtagttcatcaaccatggatcttgccaagtgacacagaaagtgaaggagtggaagcagaacaagagaaacgttccgctgatcttcttctttgcgttccatgctcttcttgtcctacgctggtctactctggtttgtgaaacagagagaagaagttgcaagtggtccttaaagaaatgcagttattcaaatccttatgtatagttctaattttatttactatgtgtaatcatttagagaatggttatttttataatctcaataataaacaagtactatcgtagccagggggtgcccaagtatgtaatcagagaacactaatcctggcaaaggattgtggggtggtcaggaggccggctgccttttgacatggttagagtcctgggtttagattactttataaatagttattaagattaatatttgatatattaaatattgcctgattcaaataactttgcttaaaatttttctgtattttaacttgtctagggttttctacttcttctatttttataatattttctcattttttagattactaaacattctacttatccacatgtgccaagatgtgccatttaggtctctgcagaaattagctgtttggtatcatcacctgccatacatgttgtgtgcagcagtgagaagtatattctctaccactgctctttctcatgattattttctctattcctattaaaatgaataattgatatgttaattaagtaaagcaaatcaataaggaatgaaatgcatggcccaaaacatagaaaatgaaaatcgtttgaccatttatccaattattgaacccaattaagatgatccattttaaatttaatatatgctcgcttttggaatgtgttatgcattgatgttaagtgaatggatctaagtaaatctattgatatctctac

SEQ ID NO: 5365 - protein, 538 aa, Homo sapiens
MSSPLASELSELAALRPGFRLSAPHARVAPRAATHARGRGRASHAGQPRLRSSCPGPSPGKRRVVPSGGAQPRVLPALSSRSHLFPMASHPQTRIQAYLEKNKIGPLFEELMTKLITETPDQPIPFLIDHLQSKQGNRGQLQRTLSGSAALWAESEKSESKGTRRDFRSYDKPWQLNAKKPKKSKSDLAVSNISPPSPDSKSLPRSVEHPKWNWRTKPQSRDFDELNHILQESKKLGKALENLSRSIAISDELDKETVTFNSSLLRPRVIGEWIGREENDADPLAAEMLQPPIPRSKNDQWESEDSGSSPAGSLKMEPKNKGLKQQQQQHKKLLAAMLSQDSFESIHSPTPSVTEEDIDNEDDAMELLEDLNDLRMEGVTTLVPSGSKFNQGRPTYPAEPQAKVTLNICSRCARLQGDNLEERTEESLPILHSPDEKIPDSFDSLPGTEEALMEEGDEFEKASKLTGPGEASSGVGHSLKNYMEEDESLKQLQVVHQPWILPSDTESEGVEAEQEKRSADLLLCVPCSSCPTLVYSGL

SEQ ID NO: 5366 - DNA, 3653 bp, Homo sapiens
gcccaggtaaagccatgttttcctacacttaaaaatgtaaataaatatcccttagataatctggacagcagtttcttatatagcatgtctgagcactatattttgctgggctataaaaggtttaattgttgtttattggtacaataagggattctagttactaatatctacctgtagtcaataaagcaaacattgattggttgatcgaatcattgattcattcaataggtattgattcagcaccagctatgagctaggcagagttctaggccctacagagaaaactgatatcaaactaagaaagtctttttccaagtgctacagtaggggtgggggaggagagagataacaaactggtgagcaaatgttaaacaaaatgattctagagagtgctaaatactgtgaggaagataaaatgataaaataataaagacttctgaagattggttagggtaacctcttgtagaagtatcattggagaccgaaggatgacacaccagccatctgaccatgagagaacatcattcaaggcaaaggaaacagaccaccaccaacaaaaaaagatgcactggggaatttccagtaacacttttgttagctctcttaatatctgattttttgagcactagaacactgcctctcacagaatcctagcttaaaacagcaatgaacagactagaattctaggctaaaaccaacaagatgaaatgtgactgatatgaatataaatggtgcacataagttcacaaacccaattacacagcacaaaatgatatccacgtggcttgacagctgttcatattagaaaaatctagggattctaatggactacatattggagattgctctttgctgttcctgactggaaaaaaaaatatgtagatattacccttgggcagatttcagcccaacttaaagtatcattagagctgtccaaaatggaacagcctgctttgcacatagagaactcacattgctcaactcaaaaaagagcagaaggaaggaagaaggaaggacacgtaacagggatttttacaaaaacagaattcggtatttcttggagactactttaagacagtttttggtttctgtaagtctgtgacttattacttgttcctttaattccaataaaattttcttcatttttgttatttttaaaacattaagaagaaaaaaatgatattgatataaggtagatggtgaagtttagcaaaagtttagtttataatgatatctctcaaaatagcaaactgaagtttaaaattcttaagctataattttaaaggaatttagattaaacttttaatatgttgttggctaagtataatacaaaataaaaactaaataaatcttggttttgccacatattagctgtgtaatatagacaatttacttctctgttattgtttcctcagaatgagggcagtaacttgtagccgtctgaaaagattgttataagcatggagttagttgctgtatataaagcagttagaccagtacctgacaatattacatgctaagtaagtgcttgctattactgttgctgttattattaattataattgtgtgctctattctgccttcaggaattaatgaccaagttaataactgagacacctgaccagccaatcccatttctcattgaccatcttcagtctaaacaagggaaccgtggacaacttcaaagaactttgtctggatctgcagctctatgggcagaaagtgaaaaatcagaatccaaaggaacaagaagggatttcagaagctatgataaaccttggcaattaaatgcaaagaagcctaaaaaatcaaaaagtgaccttgctgtgtctaatatttctccaccatcaccggactccaaatcattgccaaggtcagtagagcatccaaagtggaactggaggactaaaccacaaagccgtgattttgatgaattgaatcacatccttcaggagagcaagaagctggggaaagcccttgagaatctctctcgaagtattgcaatttcagatgaactcgataaggaaacagtgacatttaattcttctcttctgaggccccgtgtgattggagaatggattggtagagaagaaaatgatgctgatcccctagctgctgaaatgctacagcctccaattccaagaagcaaaaatgaccaatgggaaagtgaagatagtggctctagtcctgcaggaagcttaaagatggagcctaagaacaaaggattaaaacagcagcaacagcaacataagaaactcctggccgcaatgctctctcaagattcttttgagtccatccacagccctaccccatctgtaacagaagaagatattgataatgaagatgatgcaatggaattgctggaggatcttaatgatttaagaatggagggagtaacaaccctggtaccttctgggagcaaatttaaccaaggccgtcctacttaccctgctgagcctcaggccaaggtcacactgaacatctgttcaaggtgtgccaggcttcaaggagacaacctggaagaaaggacagaagagtcactaccaatactccattctccagatgaaaaaatcccagattcattcgattccttgcctgggactgaagaagcactaatggaggagggtgacgaatttgagaaagcatctaaactaacaggacctggagaagcctccagtggagtaggacactcactgaaaaactacatggaagaagatgaatccttaaagcaattgcaggtagttcatcaaccatggatcttgccaagtgacacagaaagtgaaggagtggaagcagaacaagagaaacgttccgctgatcttcttctttgcgttccatgctcttcttgtcctacgctggtctactctggtttgtgaaacagagagaagaagttgcaagtggtccttaaagaaatgcagttattcaaatccttatgtatagttctaattttatttactatgtgtaatcatttagagaatggttatttttataatctcaataataaacaagtactatcgtagccagggggtgcccaagtatgtaatcagagaacactaatcctggcaaaggattgtggggtggtcaggaggccggctgccttttgacatggttagagtcctgggtttagattactttataaatagttattaagattaatatttgatatattaaatattgcctgattcaaataactttgcttaaaatttttctgtattttaacttgtctagggttttctacttcttctatttttataatattttctcattttttagattactaaacattctacttatccacatgtgccaagatgtgccatttaggtctctgcagaaattagctgtttggtatcatcacctgccatacatgttgtgtgcagcagtgagaagtatattctctaccactgctctttctcatgattattttctctattcctattaaaatgaataattgatatgttaattaagtaaagcaaatcaataaggaatgaaatgcatggcccaaaacatagaaaatgaaaatcgtttgaccatttatccaattattgaacccaattaagatgatccattttaaatttaatatatgctcgcttttggaatgtgttatgcattgatgttaagtgaatggatctaagtaaatctattgatatctctac

SEQ ID NO: 5367 - protein, 427 aa, Homo sapiens; identical to SEQ ID NO: 729

SEQ ID NO: 5368 - DNA, 2281 bp, Homo sapiens
aagaaaatgaaacagaattgaaaatggtcttgtaaaattccacttggggtggcgatgctttgtggcttgaagtgtaagggatgagaacagcatgtgaattccaagaaagcaacacagaatggaaaatggatttacaatgtgtcagacagggaggcaacatcctgtggcatgtggcttgcatctcagcggtgggaaagaggatcttaatgatttaagaatggagggagtaacaaccctggtaccttctgggagcaaatttaaccaaggccgtcctacttaccctgctgagcctcaggccaaggtcacactgaacatctgttcaaggtgtgccaggcttcaaggagacaacctggaagaaaggacagaagagtcactaccaatactccattctccagatgaaaaaatcccagattcattcgattccttgcctgggactgaagaagcactaatggaggagggtgacgaatttgagaaagcatctaaactaacaggacctggagaagcctccagtggagtaggacactcactgaaaaactacatggaagaagatgaatccttaaagcaattgcaggtagttcatcaaccatggatcttgccaagtgacacagaaagtgaaggagtggaagcagaacaagagaaacacctactaaatcagaatctctgtggctgggactctgaattctgcatttttcatactttggcttctttcctcatctataaataagtttgaatataaaatgtgagtctggagaaaaaggaaggctaaaatttgaagaaatatacatggagaagacatgcaagacagtgtattagtcggttttcacactgctataaagaactgcctgagactgggtaattgtaaagaaaaaaggtttaattgactcacagttccccatgtctggggaggcctcaggaaacttacagtcatggcagaaggaaaaggagaagcaagcactttcttctaaggagagagagagagcagtgaaagccacacatttttaaaccatcagctctcgtgagaactcattatcaagagaacaacaagggggatatctgcccccatgatccaactacctcccaccaggcccctcttctgacacatggggattacaatttgacatgagatttgggtggggacactgagccaaataatatcagacaggtcctccagactgtgggttcaatgcttacaaaatcaaaacacaaaacatttagaatcaatttagccagtaccctctaattacattttagatttttaaaaacacaaataaataagctaaaaacacacaagcaaacaaacaaccaaaccaaaccaaaccaacaaaacaacacaaatgtcccaaataaagaaataatagccaaagtcacagatgaaagctaatgctgtcataaaacattaagacttccccacttgggtttgggtcctagttcttcctgaggtcttaatgtctgtaacaataggtaatttggccctgggtctccttaaggcagggagattgagatgatgacacggtatagagcctgtcacctgcaaggactgactcaggtataaaaagggaaataaaatacctgtactctctaactgtggaacaagccatgaaatttgctattggtattagactttgaacgaaaaatgtaaagatacacatagggaatcaaactctcagctctgtactttggttattcggttcaaacttaaactatctgtattgtcagaaaccccacattataataacaattggccagcttcattaaaattcacagggtcctctcatgtgtaaatgtaagaactggggcatttagaactcccaaagatttaaatatcaactcctgctgaagacgagctctcaatcaaattacaagctgcctgaaaagttatagtaaaacaacagagtcagcaaatgctaaaaacactagaattagaatgatgagaaaggaaagaaataagacaatcagaaagagaccatattaaaagtatgcttaagatatttaaagatatagatcaggcgcaatggctcacgtctgtaatcccagcactttcggaggccaaggcgggcagatcacgaggtcaggagatcgagaccatcctggctaacacggtgaaacgccgtctctactaaaaatacaaaaaattagtcgggcgtggtggcacacgcctgtaatcccagctactcgggaggctgaggcaggagaatcgtttgaacccgggaggtggaggttgcagtgagccgagatcacaccactgcactccagcctgggtgacagagtgagactccatctc

SEQ ID NO: 5369 - protein, 201 aa, Homo sapiens
MENGFTMCQTGRQHPVACGLHLSGGKEDLNDLRMEGVTTLVPSGSKFNQGRPTYPAEPQAKVTLNICSRCARLQGDNLEERTEESLPILHSPDEKIPDSFDSLPGTEEALMEEGDEFEKASKLTGPGEASSGVGHSLKNYMEEDESLKQLQVVHQPWILPSDTESEGVEAEQEKHLLNQNLCGWDSEFCIFHTLASFLIYK

SEQ ID NO: 5370 - DNA, 515 bp, Homo sapiens
tgtacccgggaggaagaaatgctacacagagaagccaagatgaatctgaacagacagcctttgtcagttccacagattccataaaagttaactccagagcagagaatgatgccacagtcgggataacatccaatatttgcaatcagaagaaatatgagagtcttgctccatcacccaggctgcagtgcagtggcacgatcttggctcactgcaagctccacctcccgggttcacgccattctcctgcctcagcctcccaagtagctgggactacaggcgcccaccaccacgcccagctaaatttttttgtatttttagtagagatggggtttcactgtgttagccaggatggtctcgatttcctgacctcgtgatctgcctgcctcggcctcccaaagtgctgggattacaggcgtgagccactgtgcccggccgtaattattcttttcgtgttaagcaatggtaaaagaactgactgaaaataagaatattaaaaagtttctctgctaaaaaca

SEQ ID NO: 5371 - protein, 36 aa, Homo sapiens
MRVLLHHPGCSAVARSWLTASSTSRVHAILLPQPPK

SEQ ID NO: 5372 - DNA, 2367 bp, Homo sapiens
agtcctggactgagcttcagaagatctcagatcactgacgttctgtctagaagaatactccaagatatatttctaagtaatattccttctcttgttgggggaaattagagaagatttctacctggtgccatatcaactcaaggatggagtcaaatactgagaggctctgtcatctgtctttggatctccttctgtgaaaattctaacaaggagcaaacagcaaagaactgaaatgctatacagactccagtgagaaaaaactgaggtaattggtttcggtgtgctggtgcttgaaactctatcccagtgcttccttcaactaaggctgcaaattgaaaatgtgaagaaccttgcctgcttgaaccagcctgggcttgtggcagcatcattctgtcacttaattcttctcacagagccgttaacaaaccatctgtatgcctaatattgatgctgtctttccctagtgtactggacaacctaagacagggaaataaagataaagtttggattgaagagtgaggagccaaaataatgcagcttcacatctccttaatggacagaagactacactgtttttgctgcacccagagataaaattattggttttggagtaccttcactgatgccaggggtgtcatctttaccttccatcacataatatatataaagagaatttttcttagctttaaatgagttgataagaggacaagaagaaagtcaaggactccatttccaggattaaaagcggttttttcctttgtcttccaaatcctagcagtagaagcatttgagttctgcagaaattactgaagtggttcaagtgtgggcagtcaggacactcagcccaccatactcaaccccaactcaacctcaactctcagtacggcagagagacggagaactcagagctataactttcaggaattctcaaaacctcagacaaaatgcatctttgttttaccacctgttaaagtatatcctcatctgcctcagtgcacataagtatacaacactgcagattgtgtttaacttcatttgcaattaatttaacgcattttgtatccaacatttctactaggaaatagtattagtctatccccaaactaaaattcactgcaaaaatgtaattcactcaagaaaaataatgataattcttcaaacaccttgagatgtcattcaacaatcatacccaatgggtaaaatttagagttcaacatttagcttgcatttctttctaaccaaacatctcaagttcaaaaaataaagcagattgttttgtgcatttgttatcactaccacatcaatggtcacctacacttcctgagccccaaatagaactctcagagaagcattgtgtatttgtcaatatcctggagtttcaaaactcccaagtgttgccaccatttgacctgaaatttcctctcttctcagattcctgcctctaaacacaaaacaaacaaacctttacttaacttagctcatgtgtgaatttttagggtcatttgtttcatatccagaaagacttcaagtctctttgctaaattttgatttacctaaggccagtagcctgaattcaactttagcagtcccagggctcagtagatttgccctgtagattctgtaattggatatttatgttccatgtatttcttctttcagagcatagcagaagtatagggataacaccttagctgaatgttggccctaaaatagctgctcatttgtagcactcagacgaagctgaaattattcacattcagccgacatttccgttaggtgagatgctgcctgctaattcacatttgcctgggattgctcctcagagttcagatttaattttgataacatcaactctatcatttaataaataataagcagtaaaaaattaagcctattgttattgggcattttgaatgaaagaaaagcagtatggcatattaggtttaagggttcctcaatatcttaatctatattgccttcggaaagaagcaatccttagataaaaaaataaaatactttaaaatttctctccatttcattagtgcatgagactgagacaggtattgtcactcttgccactgactcagtgacatgtcagaaacaatgaagtcttaaatatattgctcaaaatttcaactgcctatatatagcataaaattaattgcatttagaaaaaaaagttctgttctcttagcaattttcaggtagatcctaaatgttctcgacacaaaaagattcatatgtgaggtgatagatattatgattagtttgatttaatcatttcacaatgtataaaaatatcaaaacaacatgtacatcataaatatatagactttaaaatttttcaattataccttaataaagctg

SEQ ID NO: 5373 - protein, 44 aa, Homo sapiens
MCEFLGSFVSYPERLQVSLLNFDLPKASSLNSTLAVPGLSRFAL

SEQ ID NO: 5374 - DNA, 866 bp, Homo sapiens
tgaggacacagcaagaaagtggtcatctgcaagcgcaaaagacaggcctcagaagaacccaaccctattgacactatgatcttggacatccagcctccagaactgagccaaaataatgcagcttcacatctccttaatggacagaagactacactgtttttgctgcacccagagataaaattattggttttggagtaccttcactgatgccaggggtgtcatctttaccttccatcacataatatatataaagagaatttttcttagctttaaatgagttgataagaggacaagaagaaagtcaaggactccatttccaggattaaaagcggttttttcctttgtcttccaaatcctagcagtagaagcatttgagttctgcagaaattactgaagtggttcaagtgtgggcagtcaggacactcagcccaccatactcaaccccaactcaacctcaactctcagtacggcagagagacggagaactcagagctataactttcaggaattctcaaaacctcagacaaaatgcatctttgttttaccacctgttaaagtatatcctcatctgcctcagtgcacataagtatacaacactgcagattgtgtttaacttcatttgcaattaatttaacgcattttgtatccaacatttctactaggaaatagtattagtctatccccaaactaaaattcactgcaaaaatgtaattcactcaagaaaaataatgataattcttcaaacaccttgagatgtcattcaacaatcatacccaatgggtaaaatttagagttcaacatttagcttgcatttctttctaaccaaacatctcaagttcaaaaaataaagcagattgttttgtgca

SEQ ID NO: 5375 - protein, 43 aa, Homo sapiens
MILDIQPPELSQNNAASHLLNGQKTTLFLLHPEIKLLVLEYLH

SEQ ID NO: 5376 - DNA, 994 bp, Homo sapiens
gagtgcataaagaaaaggccacgtgaggacacagcaagaaagtggtcatctgcaagcgcaaaagacaggcctcagaagaacccaaccctattgacactatgatcttggacatccagcctccagaactccgttaacaaaccatctgtatgcctaatattgatgctgtctttccctagtgtactggacaacctaagacagggaaataaagataaagtttggattgaagagtgaggagccaaaataatgcagcttcacatctccttaatggacagaagactacactgtttttgctgcacccagagataaaattattggttttggagtaccttcactgatgccaggggtgtcatctttaccttccatcacataatatatataaagagaatttttcttagctttaaatgagttgataagaggacaagaagaaagtcaaggactccatttccaggattaaaagcggttttttcctttgtcttccaaatcctagcagtagaagcatttgagttctgcagaaattactgaagtggttcaagtgtgggcagtcaggacactcagcccaccatactcaaccccaactcaacctcaactctcagtacggcagagagacggagaactcagagctataactttcaggaattctcaaaacctcagacaaaatgcatctttgttttaccacctgttaaagtatatcctcatctgcctcagtgcacataagtatacaacactgcagattgtgtttaacttcatttgcaattaatttaacgcattttgtatccaacatttctactaggaaatagtattagtctatccccaaactaaaattcactgcaaaaatgtaattcactcaagaaaaataatgataattcttcaaacaccttgagatgtcattcaacaatcatacccaatgggtaaaatttagagttcaacatttagcttgcatttctttctaaccaaacatctcaagttcaaaaaataaagcagattgttttgtgca

SEQ ID NO: 5377 - protein, 36 aa, Homo sapiens
RVRSQNNAASHLLNGQKTTLFLLHPEIKLLVLEYLH

SEQ ID NO: 5378 - DNA, 976 bp, Homo sapiens
caaataattcagattaaaatttcagtataaaagacttttgtttcttagagaaagttaaaataatcccatcatgctcaacaaatgcagcatttctattgttcacacaaatttctgatcaccatggcagacgtttctgcttacctactcaacgtctatttcccattcagtttttgtaatataacctgattttcagtgaggctgtacgtagccagctgcaaattgcatttcctaacctcctttgcaggtagaagtggccatgtgatcattctggccaatgaaacaaaagtggaagtttctgggagagacttcaaggaaaactctttaaaagagactcaattccattggagccaaaataatgcagcttcacatctccttaatggacagaagactacactgtttttgctgcacccagagataaaattattggttttggagtaccttcactgatgccaggtctcataacttttaaaaaatattactaagttaaggggaattgaagcaatgaaagtcagagtaagggcggggggttcaaagttgcaagcaatttacttcctctaaacatgactgctcatttgtttttgaacaagctaccctaaccagcactttaaatattcaaacacagacttcaaacatgcacctttttatgggaaggtggagagatccttattaacctgaatgcagatattttagaatgagacgtttggtgctctctttagtaataaaagtttttgtaggtaagcttgggaaacacagtgagacctggtatctacaaaaaaaaaaaaaaaaagaagaagaagaaaaggaaagaaaaaagaaaagaaaaaataaactgggcatggtggcatgcacccacagtcccagctactcaggagactgagggagaaggatcccttgagcccaggagttcaaagctgtagtgaactacaattgcaccactgcattccagcctgggagacagagcaagaccctgtctcag

SEQ ID NO: 5379 - protein, 61 aa, Homo sapiens
MRRLVLSLVIKVFVGKLGKHSETWYLQKKKKKEEEEKERKKKRKNKLGMVACTHSPSYSGD

SEQ ID NO: 5380 - DNA, 5711 bp, Homo sapiens
aggttacttgactgggagttctcagacctccagtttcagccctgccctcagcctccaatccgtaagagacacccagccccagcaattggattgggcagcccgtcttgacacaccactgtgctgagtgcttgaggacgtgtttcaacagatggttggggttagtgtgtgtcatcacattcgagtggggattaagagaaggaaggctgccttgctggagctgtgtggtcttctccaagtgagagtcgcaggcaatagaactactttgcttttggaggaaaaggaggaattcattttcagcagacacaagaaaagcagtttttttttcagggattcttcacttctcttgaacaaggaactcactcagagactaacacaaaggaagtaatttcttacctggtcattatttagtctacaataagttcatccttcttcagtgtgaccagtaaattcttcccatactcttgaagagagcataattggaatggagaggtgctgacggccacccaccatcatctaaagaagataaacttggcaaatgacatgcaggttcttcaaggcagaataattgcagaaaatcttcaaaggaccctatctgcagatgttctgaatacctctgagaatagagattgattattcaaccaggatacctaattcaagaactccagaaatcaggagacggagacattttgtcagttttgcaacattggaccaaatacaatgaagtattcttgctgtgctctggttttggctgtcctgggcacagaattgctgggaagcctctgttcgactgtcagatccccgaggttcagaggacggatacagcaggaacgaaaaaacatccgacccaacattattcttgtgcttaccgatgatcaagatgtggagctggggtccctgcaagtcatgaacaaaacgagaaagattatggaacatgggggggccaccttcatcaatgcctttgtgactacacccatgtgctgcccgtcacggtcctccatgctcaccgggaagtatgtgcacaatcacaatgtctacaccaacaacgagaactgctcttccccctcgtggcaggccatgcatgagcctcggacttttgctgtatatcttaacaacactggctacagaacagccttttttggaaaatacctcaatgaatataatggcagctacatcccccctgggtggcgagaatggcttggattaatcaagaattctcgcttctataattacactgtttgtcgcaatggcatcaaagaaaagcatggatttgattatgcaaaggactacttcacagacttaatcactaacgagagcattaattacttcaaaatgtctaagagaatgtatccccataggcccgttatgatggtgatcagccacgctgcgccccacggccccgaggactcagccccacagttttctaaactgtaccccaatgcttcccaacacataactcctagttataactatgcaccaaatatggataaacactggattatgcagtacacaggaccaatgctgcccatccacatggaatttacaaacattctacagcgcaaaaggctccagactttgatgtcagtggatgattctgtggagaggctgtataacatgctcgtggagacgggggagctggagaatacttacatcatttacaccgccgaccatggttaccatattgggcagtttggactggtcaaggggaaatccatgccatatgactttgatattcgtgtgcctttttttattcgtggtccaagtgtagaaccaggatcaatagtcccacagatcgttctcaacattgacttggcccccacgatcctggatattgctgggctcgacacacctcctgatgtggacggcaagtctgtcctcaaacttctggacccagaaaagccaggtaacaggtttcgaacaaacaagaaggccaaaatttggcgtgatacattcctagtggaaagaggcaaatttctacgtaagaaggaagaatccagcaagaatatccaacagtcaaatcacttgcccaaatatgaacgggtcaaagaactatgccagcaggccaggtaccagacagcctgtgaacaaccggggcagaagtggcaatgcattgaggatacatctggcaagcttcgaattcacaagtgtaaaggacccagtgacctgctcacagtccggcagagcacgcggaacctctacgctcgcggcttccatgacaaagacaaagagtgcagttgtagggagtctggttaccgtgccagcagaagccaaagaaagagtcaacggcaattcttgagaaaccaggggactccaaagtacaagcccagatttgtccatactcggcagacacgttccttgtccgtcgaatttgaaggtgaaatatatgacataaatctggaagaagaagaagaattgcaagtgttgcaaccaagaaacattgctaagcgtcatgatgaaggccacaaggggccaagagatctccaggcttccagtggtggcaacaggggcaggatgctggcagatagcagcaacgccgtgggcccacctaccactgtccgagtgacacacaagtgttttattcttcccaatgactctatccattgtgagagagaactgtaccaatcggccagagcgtggaaggaccataaggcatacattgacaaagagattgaagctctgcaagataaaattaagaatttaagagaagtgagaggacatctgaagagaaggaagcctgaggaatgtagctgcagtaaacaaagctattacaataaagagaaaggtgtaaaaaagcaagagaaattaaagagccatcttcacccattcaaggaggctgctcaggaagtagatagcaaactgcaacttttcaaggagaacaaccgtaggaggaagaaggagaggaaggagaagagacggcagaggaagggggaagagtgcagcctgcctggcctcacttgcttcacgcatgacaacaaccactggcagacagccccgttctggaacctgggatctttctgtgcttgcacgagttctaacaataacacctactggtgtttgcgtacagttaatgagacgcataattttcttttctgtgagtttgctactggctttttggagtattttgatatgaatacagatccttatcagctcacaaatacagtgcacacggtagaacgaggcattttgaatcagctacacgtacaactaatggagctcagaagctgtcaaggatataagcagtgcaacccaagacctaagaatcttgatgttggaaataaagatggaggaagctatgacctacacagaggacagttatgggatggatgggaaggttaatcagccccgtctcactgcagacatcaactggcaaggcctagaggagctacacagtgtgaatgaaaacatctatgagtacagacaaaactacagacttagtctggtggactggactaattacttgaaggatttagatagagtatttgcactgctgaagagtcactatgagcaaaataaaacaaataagactcaaactgctcaaagtgacgggttcttggttgtctctgctgagcacgctgtgtcaatggagatggcctctgctgactcagatgaagacccaaggcataaggttgggaaaacacctcatttgaccttgccagctgaccttcaaaccctgcatttgaaccgaccaacattaagtccagagagtaaacttgaatggaataacgacattccagaagttaatcatttgaattctgaacactggagaaaaaccgaaaaatggacggggcatgaagagactaatcatctggaaaccgatttcagtggcgatggcatgacagagctagagctcgggcccagccccaggctgcagcccattcgcaggcacccgaaagaacttccccagtatggtggtcctggaaaggacatttttgaagatcaactatatcttcctgtgcattccgatggaatttcagttcatcagatgttcaccatggccaccgcagaacaccgaagtaattccagcatagcggggaagatgttgaccaaggtggagaagaatcacgaaaaggagaagtcacagcacctagaaggcagcgcctcctcttcactctcctctgattagatgaaactgttaccttaccctaaacacagtatttctttttaacttttttatttgtaaactaataaaggtaatcacagccaccaacattccaagctaccctgggtacctttgtgcagtagaagctagtgagcatgtgagcaagcggtgtgcacacggagactcatcgttataatttactatctgccaagagtagaaagaaaggctggggatatttgggttggcttggttttgattttttgcttgtttgtttgttttgtactaaaacagtattatcttttgaatatcgtagggacataagtatatacatgttatccaatcaagatggctagaatggtgcctttctgagtgtctaaaacttgacacccctggtaaatctttcaacacacttccactgcctgcgtaatgaagttttgattcatttttaaccactggaatttttcaatgccgtcattttcagttagatgattttgcactttgagattaaaatgccatgtctatttgattagtcttatttttttatttttacaggcttatcagtctcactgttggctgtcattgtgacaaagtcaaataaacccccaaggacgacacacagtatggatcacatattgtttgacattaagcttttgccagaaaatgttgcatgtgttttacctcgacttgctaaaatcgattagcagaaaggcatggctaataatgttggtggtgaaaataaataaataagtaaacaaaatgaagattgcctgctctctctgtgcctagcctcaaagcgttcatcatacatcatacctttaagattgctatattttgggttattttcttgacaggagaaaaagatctaaagatcttttattttcatcttttttggttttcttggcatgactaagaagcttaaatgttgataaaatatgactagttttgaatttacaccaagaacttctcaataaaagaaaatcatgaatgctccacaatttcaacataccacaagagaagttaatttcttaacattgtgttctatgattatttgtaagaccttcaccaagttctgatatcttttaaagacatagttcaaaattgcttttgaaaatctgtattcttgaaaatatccttgttgtgtattaggtttttaaataccagctaaaggattacctcactgagtcatcagtaccctcctattcagctccccaagatgatgtgtttttgcttaccctaagagaggttttcttcttatttttagataattcaagtgcttagataaattatgttttctttaagtgtttatggtaaactcttttaaagaaaatttaatatgttatagctgaatctttttggtaactttaaatctttatcatagactctgtacatatgttcaaattagctgcttgcctgatgtgtgtatcatcggtgggatgacagaacaaacatatttatgatcatgaataatgtgctttgtaaaaagatttcaagttattaggaagcatactctgttttttaatcatgtataatattccatgatacttttatagaacaattctggcttcaggaaagtctagaagcaatatttcttcaaataaaaggtgtttaaactttt

SEQ ID NO: 5381 - protein, 871 aa, Homo sapiens
MKYSCCALVLAVLGTELLGSLCSTVRSPRFRGRIQQERKNIRPNIILVLTDDQDVELGSLQVMNKTRKIMEHGGATFINAFVTTPMCCPSRSSMLTGKYVHNHNVYTNNENCSSPSWQAMHEPRTFAVYLNNTGYRTAFFGKYLNEYNGSYIPPGWREWLGLIKNSRFYNYTVCRNGIKEKHGFDYAKDYFTDLITNESINYFKMSKRMYPHRPVMMVISHAAPHGPEDSAPQFSKLYPNASQHITPSYNYAPNMDKHWIMQYTGPMLPIHMEFTNILQRKRLQTLMSVDDSVERLYNMLVETGELENTYIIYTADHGYHIGQFGLVKGKSMPYDFDIRVPFFIRGPSVEPGSIVPQIVLNIDLAPTILDIAGLDTPPDVDGKSVLKLLDPEKPGNRFRTNKKAKIWRDTFLVERGKFLRKKEESSKNIQQSNHLPKYERVKELCQQARYQTACEQPGQKWQCIEDTSGKLRIHKCKGPSDLLTVRQSTRNLYARGFHDKDKECSCRESGYRASRSQRKSQRQFLRNQGTPKYKPRFVHTRQTRSLSVEFEGEIYDINLEEEEELQVLQPRNIAKRHDEGHKGPRDLQASSGGNRGRMLADSSNAVGPPTTVRVTHKCFILPNDSIHCERELYQSARAWKDHKAYIDKEIEALQDKIKNLREVRGHLKRRKPEECSCSKQSYYNKEKGVKKQEKLKSHLHPFKEAAQEVDSKLQLFKENNRRRKKERKEKRRQRKGEECSLPGLTCFTHDNNHWQTAPFWNLGSFCACTSSNNNTYWCLRTVNETHNFLFCEFATGFLEYFDMNTDPYQLTNTVHTVERGILNQLHVQLMELRSCQGYKQCNPRPKNLDVGNKDGGSYDLHRGQLWDGWEG

SEQ ID NO: 5382 - DNA, 704 bp, Homo sapiens
cccccagtcctttcagccgtgtcccgaaattcacccttagtgtaacttctgcctctgctcctcctcttcttggaactgccttttgtttgtctggcagcgttggttctatgggggtgtgtgatgataataatacgcgggcttatataaccgtcttcatcttgcgagcacttcgcagaccgtcgctaatgaatcttggggccggtgtcgggccggggcggcttgatcggcaactaggaaaccccaggcgcagaggccaggagcgagggcagcgaggatcagaggccaggccttcccggctgccggcgctcctcggaggtcagggcagatgaggaacatgactctcccccttcggaggaggaaggaagtcccgctgccaccttatctctgctcctctgcctcctccctgttcccagagctttttctctagagaagattttgaaggcggcttttgtgctgacggccacccaccatcatctaaagaagataaacttggcaaatgacatgcaggttcttcaaggcagaataattgcagaaaatcttcaaaggaccctatctgcagatgttctgaatacctctgagaatagagattgattattcaaccaggatacctaattcaaggtattagctctcgtcagaaagcttttacatttgagctctgtgttggaaattctattttggcaatgaattgaaataggaaaagttgg

SEQ ID NO: 5383 - protein, 73 aa, Homo sapiens
MGVCDDNNTRAYITVFILRALRRPSLMNLGAGVGPGRLDRQLGNPRRRGQERGQRGSEARPSRLPALLGGQGR

SEQ ID NO: 5384 - DNA, 4978 bp, Homo sapiens
cccccagtcctttcagccgtgtcccgaaattcacccttagtgtaacttctgcctctgctcctcctcttcttggaactgccttttgtttgtctggcagcgttggttctatgggggtgtgtgatgataataatacgcgggcttatataaccgtcttcatcttgcgagcacttcgcagaccgtcgctaatgaatcttggggccggtgtcgggccggggcggcttgatcggcaactaggaaaccccaggcgcagaggccaggagcgagggcagcgaggatcagaggccaggccttcccggctgccggcgctcctcggaggtcagggcagatgaggaacatgactctcccccttcggaggaggaaggaagtcccgctgccaccttatctctgctcctctgcctcctccctgttcccagagctttttctctagagaagattttgaaggcggcttttggattcttcacttctcttgaacaaggaactcactcagagactaacacaaaggaagtaatttcttacctggtcattatttagtctacaataagttcatccttcttcagtgtgaccagtaaattcttcccatactcttgaagagagcataattggaatggagaggtgctgacggccacccaccatcatctaaagaagataaacttggcaaatgacatgcaggttcttcaaggcagaataattgcagaaaatcttcaaaggaccctatctgcagatgttctgaatacctctgagaatagagattgattattcaaccaggatacctaattcaagaactccagaaatcaggagacggagacattttgtcagttttgcaacattggaccaaatacaatgaagtattcttgctgtgctctggttttggctgtcctgggcacagaattgctgggaagcctctgttcgactgtcagatccccgaggttcagaggacggatacagcaggaacgaaaaaacatccgacccaacattattcttgtgcttaccgatgatcaagatgtggagctggggtccctgcaagtcatgaacaaaacgagaaagattatggaacatgggggggccaccttcatcaatgcctttgtgactacacccatgtgctgcccgtcacggtcctccatgctcaccgggaagtatgtgcacaatcacaatgtctacaccaacaacgagaactgctcttccccctcgtggcaggccatgcatgagcctcggacttttgctgtatatcttaacaacactggctacagaacagccttttttggaaaatacctcaatgaatataatggcagctacatcccccctgggtggcgagaatggcttggattaatcaagaattctcgcttctataattacactgtttgtcgcaatggcatcaaagaaaagcatggatttgattatgcaaaggactacttcacagacttaatcactaacgagagcattaattacttcaaaatgtctaagagaatgtatccccataggcccgttatgatggtgatcagccacgctgcgccccacggccccgaggactcagccccacagttttctaaactgtaccccaatgcttcccaacacataactcctagttataactatgcaccaaatatggataaacactggattatgcagtacacaggaccaatgctgcccatccacatggaatttacaaacattctacagcgcaaaaggctccagactttgatgtcagtggatgattctgtggagaggctgtataacatgctcgtggagacgggggagctggagaatacttacatcatttacaccgccgaccatggttaccatattgggcagtttggactggtcaaggggaaatccatgccatatgactttgatattcgtgtgcctttttttattcgtggtccaagtgtagaaccaggatcaatagtcccacagatcgttctcaacattgacttggcccccacgatcctggatattgctgggctcgacacacctcctgatgtggacggcaagtctgtcctcaaacttctggacccagaaaagccaggtaacaggtttcgaacaaacaagaaggccaaaatttggcgtgatacattcctagtggaaagaggcaaatttctacgtaagaaggaagaatccagcaagaatatccaacagtcaaatcacttgcccaaatatgaacgggtcaaagaactatgccagcaggccaggtaccagacagcctgtgaacaaccggggcagaagtggcaatgcattgaggatacatctggcaagcttcgaattcacaagtgtaaaggacccagtgacctgctcacagtccggcagagcacgcggaacctctacgctcgcggcttccatgacaaagacaaagagtgcagttgtagggagtctggttaccgtgccagcagaagccaaagaaagagtcaacggcaattcttgagaaaccaggggactccaaagtacaagcccagatttgtccatactcggcagacacgttccttgtccgtcgaatttgaaggtgaaatatatgacataaatctggaagaagaagaagaattgcaagtgttgcaaccaagaaacattgctaagcgtcatgatgaaggccacaaggggccaagagatctccaggcttccagtggtggcaacaggggcaggatgctggcagatagcagcaacgccgtgggcccacctaccactgtccgagtgacacacaagtgttttattcttcccaatgactctatccattgtgagagagaactgtaccaatcggccagagcgtggaaggaccataaggcatacattgacaaagagattgaagctctgcaagataaaattaagaatttaagagaagtgagaggacatctgaagagaaggaagcctgaggaatgtagctgcagtaaacaaagctattacaataaagagaaaggtgtaaaaaagcaagagaaattaaagagccatcttcacccattcaaggaggctgctcaggaagtagatagcaaactgcaacttttcaaggagaacaaccgtaggaggaagaaggagaggaaggagaagagacggcagaggaagggggaagagtgcagcctgcctggcctcacttgcttcacgcatgacaacaaccactggcagacagccccgttctggaacctgggatctttctgtgcttgcacgagttctaacaataacacctactggtgtttgcgtacagttaatgagacgcataattttcttttctgtgagtttgctactggctttttggagtattttgatatgaatacagatccttatcagctcacaaatacagtgcacacggtagaacgaggcattttgaatcagctacacgtacaactaatggagctcagaagctgtcaaggatataagcagtgcaacccaagacctaagaatcttgatgttggaaataaagatggaggaagctatgacctacacagaggacagttatgggatggatgggaaggttaatcagccccgtctcactgcagacatcaactggcaaggcctagaggagctacacagtgtgaatgaaaacatctatgagtacagacaaaactacagacttagtctggtggactggactaattacttgaaggatttagatagagtatttgcactgctgaagagtcactatgagcaaaataaaacaaataagactcaaactgctcaaagtgacgggttcttggttgtctctgctgagcacgctgtgtcaatggagatggcctctgctgactcagatgaagacccaaggcataaggttgggaaaacacctcatttgaccttgccagctgaccttcaaaccctgcatttgaaccgaccaacattaagtccagagagtaaacttgaatggaataacgacattccagaagttaatcatttgaattctgaacactggagaaaaaccgaaaaatggacggggcatgaagagactaatcatctggaaaccgatttcagtggcgatggcatgacagagctagagctcgggcccagccccaggctgcagcccattcgcaggcacccgaaagaacttccccagtatggtggtcctggaaaggacatttttgaagatcaactatatcttcctgtgcattccgatggaatttcagttcatcagatgttcaccatggccaccgcagaacaccgaagtaattccagcatagcggggaagatgttgaccaaggtggagaagaatcacgaaaaggagaagtcacagcacctagaaggcagcgcctcctcttcactctcctctgattagatgaaactgttaccttaccctaaacacagtatttctttttaacttttttatttgtaaactaataaaggtaatcacagccaccaacattccaagctaccctgggtacctttgtgcagtagaagctagtgagcatgtgagcaagcggtgtgcacacggagactcatcgttataatttactatctgccaagagtagaaagaaaggctggggatatttgggttggcttggttttgattttttgcttgtttgtttgttttgtactaaaacagtattatcttttgaatatcgtagggacataagtatatacatgttatccaatcaagatggctagaatggtgcctttctgagtgtctaaaacttgacacccctggtaaatctttcaacacacttccactgcctgcgtaatgaagttttgattcatttttaaccactggaatttttcaatgccgtcattttcagttagatgattttgcactttgagattaaaatgccatgtctatttgattagtcttatttttttatttttacaggcttatcagtctcactgttggctgtcattgtgacaaagtcaaataaacccccaaggacgacacacagtatggatcacatattgtttgacattaagcttttgccagaaaatgttgcatgtgttttacctcgacttgctaaaatcgattagcagaaaggcatggctaataatgttggtggtgaaaataaataaataagtaaacaaaatg

SEQ ID NO: 5385 - protein, 871 aa, Homo sapiens; identical to SEQ ID NO: 5381

SEQ ID NO: 5386 - DNA, 4816 bp, Homo sapiens
cccccagtcctttcagccgtgtcccgaaattcacccttagtgtaacttctgcctctgctcctcctcttcttggaactgccttttgtttgtctggcagcgttggttctatgggggtgtgtgatgataataatacgcgggcttatataaccgtcttcatcttgcgagcacttcgcagaccgtcgctaatgaatcttggggccggtgtcgggccggggcggcttgatcggcaactaggaaaccccaggcgcagaggccaggagcgagggcagcgaggatcagaggccaggccttcccggctgccggcgctcctcggaggtcagggcagatgaggaacatgactctcccccttcggaggaggaaggaagtcccgctgccaccttatctctgctcctctgcctcctccctgttcccagagctttttctctagagaagattttgaaggcggcttttgtgctgacggccacccaccatcatctaaagaagataaacttggcaaatgacatgcaggttcttcaaggcagaataattgcagaaaatcttcaaaggaccctatctgcagatgttctgaatacctctgagaatagagattgattattcaaccaggatacctaattcaagaactccagaaatcaggagacggagacattttgtcagttttgcaacattggaccaaatacaatgaagtattcttgctgtgctctggttttggctgtcctgggcacagaattgctgggaagcctctgttcgactgtcagatccccgaggttcagaggacggatacagcaggaacgaaaaaacatccgacccaacattattcttgtgcttaccgatgatcaagatgtggagctggggtccctgcaagtcatgaacaaaacgagaaagattatggaacatgggggggccaccttcatcaatgcctttgtgactacacccatgtgctgcccgtcacggtcctccatgctcaccgggaagtatgtgcacaatcacaatgtctacaccaacaacgagaactgctcttccccctcgtggcaggccatgcatgagcctcggacttttgctgtatatcttaacaacactggctacagaacagccttttttggaaaatacctcaatgaatataatggcagctacatcccccctgggtggcgagaatggcttggattaatcaagaattctcgcttctataattacactgtttgtcgcaatggcatcaaagaaaagcatggatttgattatgcaaaggactacttcacagacttaatcactaacgagagcattaattacttcaaaatgtctaagagaatgtatccccataggcccgttatgatggtgatcagccacgctgcgccccacggccccgaggactcagccccacagttttctaaactgtaccccaatgcttcccaacacataactcctagttataactatgcaccaaatatggataaacactggattatgcagtacacaggaccaatgctgcccatccacatggaatttacaaacattctacagcgcaaaaggctccagactttgatgtcagtggatgattctgtggagaggctgtataacatgctcgtggagacgggggagctggagaatacttacatcatttacaccgccgaccatggttaccatattgggcagtttggactggtcaaggggaaatccatgccatatgactttgatattcgtgtgcctttttttattcgtggtccaagtgtagaaccaggatcaatagtcccacagatcgttctcaacattgacttggcccccacgatcctggatattgctgggctcgacacacctcctgatgtggacggcaagtctgtcctcaaacttctggacccagaaaagccaggtaacaggtttcgaacaaacaagaaggccaaaatttggcgtgatacattcctagtggaaagaggcaaatttctacgtaagaaggaagaatccagcaagaatatccaacagtcaaatcacttgcccaaatatgaacgggtcaaagaactatgccagcaggccaggtaccagacagcctgtgaacaaccggggcagaagtggcaatgcattgaggatacatctggcaagcttcgaattcacaagtgtaaaggacccagtgacctgctcacagtccggcagagcacgcggaacctctacgctcgcggcttccatgacaaagacaaagagtgcagttgtagggagtctggttaccgtgccagcagaagccaaagaaagagtcaacggcaattcttgagaaaccaggggactccaaagtacaagcccagatttgtccatactcggcagacacgttccttgtccgtcgaatttgaaggtgaaatatatgacataaatctggaagaagaagaagaattgcaagtgttgcaaccaagaaacattgctaagcgtcatgatgaaggccacaaggggccaagagatctccaggcttccagtggtggcaacaggggcaggatgctggcagatagcagcaacgccgtgggcccacctaccactgtccgagtgacacacaagtgttttattcttcccaatgactctatccattgtgagagagaactgtaccaatcggccagagcgtggaaggaccataaggcatacattgacaaagagattgaagctctgcaagataaaattaagaatttaagagaagtgagaggacatctgaagagaaggaagcctgaggaatgtagctgcagtaaacaaagctattacaataaagagaaaggtgtaaaaaagcaagagaaattaaagagccatcttcacccattcaaggaggctgctcaggaagtagatagcaaactgcaacttttcaaggagaacaaccgtaggaggaagaaggagaggaaggagaagagacggcagaggaagggggaagagtgcagcctgcctggcctcacttgcttcacgcatgacaacaaccactggcagacagccccgttctggaacctgggatctttctgtgcttgcacgagttctaacaataacacctactggtgtttgcgtacagttaatgagacgcataattttcttttctgtgagtttgctactggctttttggagtattttgatatgaatacagatccttatcagctcacaaatacagtgcacacggtagaacgaggcattttgaatcagctacacgtacaactaatggagctcagaagctgtcaaggatataagcagtgcaacccaagacctaagaatcttgatgttggaaataaagatggaggaagctatgacctacacagaggacagttatgggatggatgggaaggttaatcagccccgtctcactgcagacatcaactggcaaggcctagaggagctacacagtgtgaatgaaaacatctatgagtacagacaaaactacagacttagtctggtggactggactaattacttgaaggatttagatagagtatttgcactgctgaagagtcactatgagcaaaataaaacaaataagactcaaactgctcaaagtgacgggttcttggttgtctctgctgagcacgctgtgtcaatggagatggcctctgctgactcagatgaagacccaaggcataaggttgggaaaacacctcatttgaccttgccagctgaccttcaaaccctgcatttgaaccgaccaacattaagtccagagagtaaacttgaatggaataacgacattccagaagttaatcatttgaattctgaacactggagaaaaaccgaaaaatggacggggcatgaagagactaatcatctggaaaccgatttcagtggcgatggcatgacagagctagagctcgggcccagccccaggctgcagcccattcgcaggcacccgaaagaacttccccagtatggtggtcctggaaaggacatttttgaagatcaactatatcttcctgtgcattccgatggaatttcagttcatcagatgttcaccatggccaccgcagaacaccgaagtaattccagcatagcggggaagatgttgaccaaggtggagaagaatcacgaaaaggagaagtcacagcacctagaaggcagcgcctcctcttcactctcctctgattagatgaaactgttaccttaccctaaacacagtatttctttttaacttttttatttgtaaactaataaaggtaatcacagccaccaacattccaagctaccctgggtacctttgtgcagtagaagctagtgagcatgtgagcaagcggtgtgcacacggagactcatcgttataatttactatctgccaagagtagaaagaaaggctggggatatttgggttggcttggttttgattttttgcttgtttgtttgttttgtactaaaacagtattatcttttgaatatcgtagggacataagtatatacatgttatccaatcaagatggctagaatggtgcctttctgagtgtctaaaacttgacacccctggtaaatctttcaacacacttccactgcctgcgtaatgaagttttgattcatttttaaccactggaatttttcaatgccgtcattttcagttagatgattttgcactttgagattaaaatgccatgtctatttgattagtcttatttttttatttttacaggcttatcagtctcactgttggctgtcattgtgacaaagtcaaataaacccccaaggacgacacacagtatggatcacatattgtttgacattaagcttttgccagaaaatgttgcatgtgttttacctcgacttgctaaaatcgattagcagaaaggcatggctaataatgttggtggtgaaaataaataaataagtaaacaaaatg

SEQ ID NO: 5387 - protein, 871 aa, Homo sapiens; identical to SEQ ID NO: 5381

SEQ ID NO: 5388 - DNA, 5672 bp, Homo sapiens
cccccagtcctttcagccgtgtcccgaaattcacccttagtgtaacttctgcctctgctcctcctcttcttggaactgccttttgtttgtctggcagcgttggttctatgggggtgtgtgatgataataatacgcgggcttatataaccgtcttcatcttgcgagcacttcgcagaccgtcgctaatgaatcttggggccggtgtcgggccggggcggcttgatcggcaactaggaaaccccaggcgcagaggccaggagcgagggcagcgaggatcagaggccaggccttcccggctgccggcgctcctcggaggtcagggcagatgaggaacatgactctcccccttcggaggaggaaggaagtcccgctgccaccttatctctgctcctctgcctcctccctgttcccagagctttttctctagagaagattttgaaggcggcttttgtgctgacggccacccaccatcatctaaagaagataaacttggcaaatgacatgcaggttcttcaaggcagaataattgcagaaaatcttcaaaggaccctatctgcagatgttctgaatacctctgagaatagagattgattattcaaccaggatacctaattcaagaactccagaaatcaggagacggagacattttgtcagttttgcaacattggaccaaatacaatgaagtattcttgctgtgctctggttttggctgtcctgggcacagaattgctgggaagcctctgttcgactgtcagatccccgaggttcagaggacggatacagcaggaacgaaaaaacatccgacccaacattattcttgtgcttaccgatgatcaagatgtggagctggggtccctgcaagtcatgaacaaaacgagaaagattatggaacatgggggggccaccttcatcaatgcctttgtgactacacccatgtgctgcccgtcacggtcctccatgctcaccgggaagtatgtgcacaatcacaatgtctacaccaacaacgagaactgctcttccccctcgtggcaggccatgcatgagcctcggacttttgctgtatatcttaacaacactggctacagaacagccttttttggaaaatacctcaatgaatataatggcagctacatcccccctgggtggcgagaatggcttggattaatcaagaattctcgcttctataattacactgtttgtcgcaatggcatcaaagaaaagcatggatttgattatgcaaaggactacttcacagacttaatcactaacgagagcattaattacttcaaaatgtctaagagaatgtatccccataggcccgttatgatggtgatcagccacgctgcgccccacggccccgaggactcagccccacagttttctaaactgtaccccaatgcttcccaacacataactcctagttataactatgcaccaaatatggataaacactggattatgcagtacacaggaccaatgctgcccatccacatggaatttacaaacattctacagcgcaaaaggctccagactttgatgtcagtggatgattctgtggagaggctgtataacatgctcgtggagacgggggagctggagaatacttacatcatttacaccgccgaccatggttaccatattgggcagtttggactggtcaaggggaaatccatgccatatgactttgatattcgtgtgcctttttttattcgtggtccaagtgtagaaccaggatcaatagtcccacagatcgttctcaacattgacttggcccccacgatcctggatattgctgggctcgacacacctcctgatgtggacggcaagtctgtcctcaaacttctggacccagaaaagccaggtaacaggtttcgaacaaacaagaaggccaaaatttggcgtgatacattcctagtggaaagaggcaaatttctacgtaagaaggaagaatccagcaagaatatccaacagtcaaatcacttgcccaaatatgaacgggtcaaagaactatgccagcaggccaggtaccagacagcctgtgaacaaccggggcagaagtggcaatgcattgaggatacatctggcaagcttcgaattcacaagtgtaaaggacccagtgacctgctcacagtccggcagagcacgcggaacctctacgctcgcggcttccatgacaaagacaaagagtgcagttgtagggagtctggttaccgtgccagcagaagccaaagaaagagtcaacggcaattcttgagaaaccaggggactccaaagtacaagcccagatttgtccatactcggcagacacgttccttgtccgtcgaatttgaaggtgaaatatatgacataaatctggaagaagaagaagaattgcaagtgttgcaaccaagaaacattgctaagcgtcatgatgaaggccacaaggggccaagagatctccaggcttccagtggtggcaacaggggcaggatgctggcagatagcagcaacgccgtgggcccacctaccactgtccgagtgacacacaagtgttttattcttcccaatgactctatccattgtgagagagaactgtaccaatcggccagagcgtggaaggaccataaggcatacattgacaaagagattgaagctctgcaagataaaattaagaatttaagagaagtgagaggacatctgaagagaaggaagcctgaggaatgtagctgcagtaaacaaagctattacaataaagagaaaggtgtaaaaaagcaagagaaattaaagagccatcttcacccattcaaggaggctgctcaggaagtagatagcaaactgcaacttttcaaggagaacaaccgtaggaggaagaaggagaggaaggagaagagacggcagaggaagggggaagagtgcagcctgcctggcctcacttgcttcacgcatgacaacaaccactggcagacagccccgttctggaacctgggatctttctgtgcttgcacgagttctaacaataacacctactggtgtttgcgtacagttaatgagacgcataattttcttttctgtgagtttgctactggctttttggagtattttgatatgaatacagatccttatcagctcacaaatacagtgcacacggtagaacgaggcattttgaatcagctacacgtacaactaatggagctcagaagctgtcaaggatataagcagtgcaacccaagacctaagaatcttgatgttggaaataaagatggaggaagctatgacctacacagaggacagttatgggatggatgggaaggttaatcagccccgtctcactgcagacatcaactggcaaggcctagaggagctacacagtgtgaatgaaaacatctatgagtacagacaaaactacagacttagtctggtggactggactaattacttgaaggatttagatagagtatttgcactgctgaagagtcactatgagcaaaataaaacaaataagactcaaactgctcaaagtgacgggttcttggttgtctctgctgagcacgctgtgtcaatggagatggcctctgctgactcagatgaagacccaaggcataaggttgggaaaacacctcatttgaccttgccagctgaccttcaaaccctgcatttgaaccgaccaacattaagtccagagagtaaacttgaatggaataacgacattccagaagttaatcatttgaattctgaacactggagaaaaaccgaaaaatggacggggcatgaagagactaatcatctggaaaccgatttcagtggcgatggcatgacagagctagagctcgggcccagccccaggctgcagcccattcgcaggcacccgaaagaacttccccagtatggtggtcctggaaaggacatttttgaagatcaactatatcttcctgtgcattccgatggaatttcagttcatcagatgttcaccatggccaccgcagaacaccgaagtaattccagcatagcggggaagatgttgaccaaggtggagaagaatcacgaaaaggagaagtcacagcacctagaaggcagcgcctcctcttcactctcctctgattagatgaaactgttaccttaccctaaacacagtatttctttttaacttttttatttgtaaactaataaaggtaatcacagccaccaacattccaagctaccctgggtacctttgtgcagtagaagctagtgagcatgtgagcaagcggtgtgcacacggagactcatcgttataatttactatctgccaagagtagaaagaaaggctggggatatttgggttggcttggttttgattttttgcttgtttgtttgttttgtactaaaacagtattatcttttgaatatcgtagggacataagtatatacatgttatccaatcaagatggctagaatggtgcctttctgagtgtctaaaacttgacacccctggtaaatctttcaacacacttccactgcctgcgtaatgaagttttgattcatttttaaccactggaatttttcaatgccgtcattttcagttagatgattttgcactttgagattaaaatgccatgtctatttgattagtcttatttttttatttttacaggcttatcagtctcactgttggctgtcattgtgacaaagtcaaataaacccccaaggacgacacacagtatggatcacatattgtttgacattaagcttttgccagaaaatgttgcatgtgttttacctcgacttgctaaaatcgattagcagaaaggcatggctaataatgttggtggtgaaaataaataaataagtaaacaaaatgaagattgcctgctctctctgtgcctagcctcaaagcgttcatcatacatcatacctttaagattgctatattttgggttattttcttgacaggagaaaaagatctaaagatcttttattttcatcttttttggttttcttggcatgactaagaagcttaaatgttgataaaatatgactagttttgaatttacaccaagaacttctcaataaaagaaaatcatgaatgctccacaatttcaacataccacaagagaagttaatttcttaacattgtgttctatgattatttgtaagaccttcaccaagttctgatatcttttaaagacatagttcaaaattgcttttgaaaatctgtattcttgaaaatatccttgttgtgtattaggtttttaaataccagctaaaggattacctcactgagtcatcagtaccctcctattcagctccccaagatgatgtgtttttgcttaccctaagagaggttttcttcttatttttagataattcaagtgcttagataaattatgttttctttaagtgtttatggtaaactcttttaaagaaaatttaatatgttatagctgaatctttttggtaactttaaatctttatcatagactctgtacatatgttcaaattagctgcttgcctgatgtgtgtatcatcggtgggatgacagaacaaacatatttatgatcatgaataatgtgctttgtaaaaagatttcaagttattaggaagcatactctgttttttaatcatgtataatattccatgatacttttatagaacaattctggcttcaggaaagtctagaagcaatatttcttcaaataaaaggtgtttaaactttt

SEQ ID NO: 5389 - protein, 871 aa, Homo sapiens; identical to SEQ ID NO: 5381

SEQ ID NO: 5390 - DNA, 468 bp, Homo sapiens
tcctttttggcctttaaccttcctccacgtaaggacacagtgaacaaggtgccatcttggaaacaaacagcagccttcaccagacaccagaccttctggcaccttgaccttgcgctttccagcctccagaaccgtgagaaatcaatgtttattgtttataaattacccaatctgtggtatttttttaaaacagcataatgggactaagacaccatcagaacttgggaccaaaagaatacttttgccctctgagagctgattcttaacacagaataaaaatgaagaattactttaaagagatggactacctcaagggactagaactattgccactgagggcaggtgaaagttcagccaactcggaacccggaggccccaccttacctccctttgtgaagagcccagagcctttgtccaaagctgcatcacttcccacccagcccttcctgagccaactccccgatgtct

SEQ ID NO: 5391 - protein, 62 aa, Homo sapiens
MKNYFKEMDYLKGLELLPLRAGESSANSEPGGPTLPPFVKSPEPLSKAASLPTQPFLSQLPD

SEQ ID NO: 5392 - DNA, 599 bp, Homo sapiens
tcctttttggcctttaaccttcctccacgtaaggacacagtgaacaaggtgccatcttggaaacaaacagcagccttcaccagacaccagaccttctggcaccttgaccttgcgctttccagcctccagaaccgactagaactattgccactgagggcaggtgaaagttcagccaactcggaacccggaggccccaccttacctccctttgtgaagagcccagagcctttgtccaaagctgcatcacttcccacccagcccttcctgagccaactccccgatgtctccagaagaacacagtcggcatcatcgtgataacatcagggaaactcctatttccagcagtttctccttcagctgcaaaaatgtgcagcagtagacagggcgtgggtttttgaagtctctgcaggaagtagagttattttctcagcaccacatctgagcgcatcttctaagggtggccgactgtgtgggagctgcaggagctcagccgggatgcagccctcccattccccaccctgtccactaccaccacgcctggatccgacaggcagggcaggaccccatgccacgtggtaactgttaaggaaaatggagcc

SEQ ID NO: 5393 - protein, 32 aa, Homo sapiens
MSPEEHSRHHRDNIRETPISSSFSFSCKNVQQ

SEQ ID NO: 5394 - DNA, 1677 bp, Homo sapiens
ctgtattcagagcttggtttataccactttggttccaaatatatctggataaaatgctgatttcctcttttgagaatatacctgacaaggatcagattcatgtaacaagaggcagccttaagtgccttgaaacaattttctgaacaaggactggatccaatcgatggagcaatgaatatcgaaaaaggttctcttgaaaaacaagccaagcatctgagagagaaagcggacaataaccaggcacccccgggctccatcgctcaggactgcaagaaatcaaactcggccgtctagcagctcccagaacccgcggctgccaccgcatccttataaacctgtcagcacgcatgagggtgtctgtgttcagggaaatgaatgactaataccattatttgagtcttatgtgaagacaacactattctaacacgagagataatatacatggtactgtttattcaactggggaaaaataaaactttgagcatttcccttggaactcgagatcagatcataactcatttgcctagaggcagcagaaatctgatcctgctactggagcttaaaataacaagtaaagaaaagtgttagaaacaaagctaaaattttaacatgattaataatagagaagttgggtttggttctgttgttatgattgttttgtcgtggtgcttgtgttcagttatattctctctctctctcatttcaaatactgcttgacaattcgaaaatgaaccaatgatgtgctgtggaatgtgatggttgtcttcatatagagtcacatggtttctctttttatgcagatatttataatcttcatcctatatcagtaggaataactataaggtgcactacaaaaagatgtatgcaaacaaacatgttttaaatcaggtcagatatctgatgaaaaatacgaactaatgttaagagcaagtagtttcaacatactccaggaactgagaaacaaaacaaagcaattgtgggttttgagctccatatactcttagcaagtaagggggcgtcttgcccctatatatcatcttcccggattccactccctgttgtgggaatcgcgcccacccccatccgtgtgttgtagccactcacggtttgcatcaagagtgttttttgtaactgcctctggacttgggacagtgagtaggatcaaaaataaataatgtacatgacggggaagggaaaaacctgttggagttgcttccagccagccacgctccgggccagcatgttggaatccagcgtggagcagatgcagtaaaaatgtggttggtttctgtgtgaagcgctgttgttgttcttttgttctctcactctcatcttttaaatatcacctccgtgaaacccatccgaaaggccaccacccggcctagtcactgcccagcagtgggattagagaatggataggctgtacctgagaaactgcagagccgcctcctgggtgactcgggccgggttcctggccaacgtcatcgcattgttcaggctttctccttattgatttgcaaacattgtgcaatgagaaaacactacatggtctaactgctcgacccaacatgacaataggaatataattatgtaagatttcacaagcaaaaccaccacaaatcatgatctggctgactcacacgcgactggagaataaacaaacagcaacataaggaa

SEQ ID NO: 5395 - protein, 40 aa, Homo sapiens
MNIEKGSLEKQAKHLREKADNNQAPPGSIAQDCKKSNSAV

SEQ ID NO: 5396 - DNA, 1636 bp, Homo sapiens
tctgacattagcccctgtgcagatgactttccatgctattggaagctccattgaagccagccatgatcaggcagccttaagtgccttgaaacaattttctgaacaaggactggatccaatcgatggagcaatgaatatcgaaaaaggttctcttgaaaaacaagccaagcatctgagagagaaagcggacaataaccaggcacccccgggctccatcgctcaggactgcaagaaatcaaactcggccgtctagcagctcccagaacccgcggctgccaccgcatccttataaacctgtcagcacgcatgagggtgtctgtgttcagggaaatgaatgactaataccattatttgagtcttatgtgaagacaacactattctaacacgagagataatatacatggtactgtttattcaactggggaaaaataaaactttgagcatttcccttggaactcgagatcagatcataactcatttgcctagaggcagcagaaatctgatcctgctactggagcttaaaataacaagtaaagaaaagtgttagaaacaaagctaaaattttaacatgattaataatagagaagttgggtttggttctgttgttatgattgttttgtcgtggtgcttgtgttcagttatattctctctctctctcatttcaaatactgcttgacaattcgaaaatgaaccaatgatgtgctgtggaatgtgatggttgtcttcatatagagtcacatggtttctctttttatgcagatatttataatcttcatcctatatcagtaggaataactataaggtgcactacaaaaagatgtatgcaaacaaacatgttttaaatcaggtcagatatctgatgaaaaatacgaactaatgttaagagcaagtagtttcaacatactccaggaactgagaaacaaaacaaagcaattgtgggttttgagctccatatactcttagcaagtaagggggcgtcttgcccctatatatcatcttcccggattccactccctgttgtgggaatcgcgcccacccccatccgtgtgttgtagccactcacggtttgcatcaagagtgttttttgtaactgcctctggacttgggacagtgagtaggatcaaaaataaataatgtacatgacggggaagggaaaaacctgttggagttgcttccagccagccacgctccgggccagcatgttggaatccagcgtggagcagatgcagtaaaaatgtggttggtttctgtgtgaagcgctgttgttgttcttttgttctctcactctcatcttttaaatatcacctccgtgaaacccatccgaaaggccaccacccggcctagtcactgcccagcagtgggattagagaatggataggctgtacctgagaaactgcagagccgcctcctgggtgactcgggccgggttcctggccaacgtcatcgcattgttcaggctttctccttattgatttgcaaacattgtgcaatgagaaaacactacatggtctaactgctcgacccaacatgacaataggaatataattatgtaagatttcacaagcaaaaccaccacaaatcatgatctggctgactcacacgcgactggagaataaacaaacagcaacataaggaa

SEQ ID NO: 5397 - protein, 76 aa, Homo sapiens [sequence omitted]

SEQ ID NO: 5398 - DNA, 3268 bp, Homo sapiens
gggggcggggagcccgaggggtggaagccggcggcggccgagcggggtcagttctctgtagtgtttgccaatgttggagccgtctgcaaagtgtccccggcaagaagaggctgcctaccacaaggactttagcttactttttaaagattgaagaaaaaaaagaagacagaaaaagaagaactcaaagatacacaaagtaatttgaaccaaggctcagaagtttttggagccgtgagggatacagcagtttggtcaatattgtcttaacatgcttcaaataaatcagatgttctcagtgcagctgagtcttggtgagcagacatgggaatccgaaggcagcagtataaagaaggctcagcaggctgttgccaataaagctttgactgaatctacgcttcccaaaccagttcagaagccacccaaaagtaatgttaacaataacccaggcagtataactccaactgtggaactgaatgggcttgctatgaaaaggggagagcctgccatctacaggccattagatccaaagccattcccaaattatagagctaattacaactttcggggcatgtacaatcagaggtatcattgcccagtgcctaagatcttttatgttcagctcactgtaggaaataatgaattttttggggaaggaaagactcgacaagctgctagacacaatgctgcaatgaaagccctccaagcactgcagaatgaacctattccagaaagatctcctcagaatggtgaatcaggaaaggatgtggatgatgacaaagatgcaaataagtctgagatcagcttagtgtttgaaattgctctgaagcgaaatatgcctgtcagttttgaggttattaaagaaagtggaccaccacatatgaaaagctttgttactcgagtgtcagtaggagagttctctgcagaaggagaaggaaatagcaaaaaactctccaagaagcgcgctgcgaccaccgtcttacaggagcttaaaaaacttccacctcttcctgtggtggaaaagccaaaactattttttaaaaaacgccctaaaacaatagtaaaggccggaccagaatatggccaagggatgaaccctattagccgcctggcgcaaattcaacaggccaaaaaggaaaaggagccggattatgttttgctttcagaaagaggaatgcctcgacgtcgagaatttgtgatgcaggtgaaggtaggcaatgaagttgctacaggaacaggacctaataaaaagatagccaaaaaaaatgctgcagaagcaatgctgttacaacttggttataaagcatccactaatcttcaggatcaacttgagaagacaggggaaaacaaaggatggagtggtccaaagcctgggtttcctgaaccaacaaataatactccaaaaggaattcttcatttgtctcctgatgtttatcaagagatggaagccagccgccacaaagtaatctctggcactactctaggctatttgtcacccaaagatatgaaccaaccttcaagctctttcttcagtatatctcccacatcgaatagttcagctacaattgccagggaactccttatgaatggaacatcttctacagctgaagccataggtttaaaaggaagttctcctactcccccttgttctccagtacaaccttcaaaacaactggaatatttagcaaggattcaaggctttcaggcagccttaagtgccttgaaacaattttctgaacaaggactggatccaatcgatggagcaatgaatatcgaaaaaggttctcttgaaaaacaagccaagcatctgagagagaaagcggacaataaccaggcacccccgggctccatcgctcaggactgcaagaaatcaaactcggccgtctagcagctcccagaacccgcggctgccaccgcatccttataaacctgtcagcacgcatgagggtgtctgtgttcagggaaatgaatgactaataccattatttgagtcttatgtgaagacaacactattctaacacgagagataatatacatggtactgtttattcaactggggaaaaataaaactttgagcatttcccttggaactcgagatcagatcataactcatttgcctagaggcagcagaaatctgatcctgctactggagcttaaaataacaagtaaagaaaagtgttagaaacaaagctaaaattttaacatgattaataatagagaagttgggtttggttctgttgttatgattgttttgtcgtggtgcttgtgttcagttatattctctctctctctcatttcaaatactgcttgacaattcgaaaatgaaccaatgatgtgctgtggaatgtgatggttgtcttcatatagagtcacatggtttctctttttatgcagatatttataatcttcatcctatatcagtaggaataactataaggtgcactacaaaaagatgtatgcaaacaaacatgttttaaatcaggtcagatatctgatgaaaaatacgaactaatgttaagagcaagtagtttcaacatactccaggaactgagaaacaaaacaaagcaattgtgggttttgagctccatatactcttagcaagtaagggggcgtcttgcccctatatatcatcttcccggattccactccctgttgtgggaatcgcgcccacccccatccgtgtgttgtagccactcacggtttgcatcaagagtgttttttgtaactgcctctggacttgggacagtgagtaggatcaaaaataaataatgtacatgacggggaagggaaaaacctgttggagttgcttccagccagccacgctccgggccagcatgttggaatccagcgtggagcagatgcagtaaaaatgtggttggtttctgtgtgaagcgctgttgttgttcttttgttctctcactctcatcttttaaatatcacctccgtgaaacccatccgaaaggccaccacccggcctagtcactgcccagcagtgggattagagaatggataggctgtacctgagaaactgcagagccgcctcctgggtgactcgggccgggttcctggccaacgtcatcgcattgttcaggctttctccttattgatttgcaaacattgtgcaatgagaaaacactacatggtctaactgctcgacccaacatgacaataggaatataattatgtaagatttcacaagcaaaaccaccacaaatcatgatctggctgactcacacgcgactggagaataaacaaacagcaacataaggaa

SEQ ID NO: 5399 - protein, 538 aa, Homo sapiens
MLQINQMFSVQLSLGEQTWESEGSSIKKAQQAVANKALTESTLPKPVQKPPKSNVNNNPGSITPTVELNGLAMKRGEPAIYRPLDPKPFPNYRANYNFRGMYNQRYHCPVPKIFYVQLTVGNNEFFGEGKTRQAARHNAAMKALQALQNEPIPERSPQNGESGKDVDDDKDANKSEISLVFEIALKRNMPVSFEVIKESGPPHMKSFVTRVSVGEFSAEGEGNSKKLSKKRAATTVLQELKKLPPLPVVEKPKLFFKKRPKTIVKAGPEYGQGMNPISRLAQIQQAKKEKEPDYVLLSERGMPRRREFVMQVKVGNEVATGTGPNKKIAKKNAAEAMLLQLGYKASTNLQDQLEKTGENKGWSGPKPGFPEPTNNTPKGILHLSPDVYQEMEASRHKVISGTTLGYLSPKDMNQPSSSFFSISPTSNSSATIARELLMNGTSSTAEAIGLKGSSPTPPCSPVQPSKQLEYLARIQGFQAALSALKQFSEQGLDPIDGAMNIEKGSLEKQAKHLREKADNNQAPPGSIAQDCKKSNSAV

SEQ ID NO: 5400 - DNA, 3442 bp, Homo sapiens
gcggcgggagcgccggggaggcgggcggaggcgggcggaggcggggggcggggagcccgaggggtggaagccggcggcggccgagcggggtcagttctctgtagtgtttgccaatgttggagccgtctgcaaagtgtccccggcaagaagaggctgcctaccacaaggactttagcttactttttaaagattgaagaaaaaaaagaagacagaaaaagaagaactcaaagatacacaaagtaatttgaaccaaggctcagaagtttttggagccgtgagggatacagcagtttggtcaatattgtcttaacatgcttcaaataaatcagcttctctccaagataaaatggcaaacccaaaagagaaaactgcaatgtgtctggtaaatgagttagcccgtttcaatagagtccaaccccagtataaacttctgaatgaaagagggcctgctcattcaaagatgttctcagtgcagctgagtcttggtgagcagacatgggaatccgaaggcagcagtataaagaaggctcagcaggctgttgccaataaagctttgactgaatctacgcttcccaaaccagttcagaagccacccaaaagtaatgttaacaataacccaggcagtataactccaactgtggaactgaatgggcttgctatgaaaaggggagagcctgccatctacaggccattagatccaaagccattcccaaattatagagctaattacaactttcggggcatgtacaatcagaggtatcattgcccagtgcctaagatcttttatgttcagctcactgtaggaaataatgaattttttggggaaggaaagactcgacaagctgctagacacaatgctgcaatgaaagccctccaagcactgcagaatgaacctattccagaaagatctcctcagaatggtgaatcaggaaaggatgtggatgatgacaaagatgcaaataagtctgagatcagcttagtgtttgaaattgctctgaagcgaaatatgcctgtcagttttgaggttattaaagaaagtggaccaccacatatgaaaagctttgttactcgagtgtcagtaggagagttctctgcagaaggagaaggaaatagcaaaaaactctccaagaagcgcgctgcgaccaccgtcttacaggagcttaaaaaacttccacctcttcctgtggtggaaaagccaaaactattttttaaaaaacgccctaaaacaatagtaaaggccggaccagaatatggccaagggatgaaccctattagccgcctggcgcaaattcaacaggccaaaaaggaaaaggagccggattatgttttgctttcagaaagaggaatgcctcgacgtcgagaatttgtgatgcaggtgaaggtaggcaatgaagttgctacaggaacaggacctaataaaaagatagccaaaaaaaatgctgcagaagcaatgctgttacaacttggttataaagcatccactaatcttcaggatcaacttgagaagacaggggaaaacaaaggatggagtggtccaaagcctgggtttcctgaaccaacaaataatactccaaaaggaattcttcatttgtctcctgatgtttatcaagagatggaagccagccgccacaaagtaatctctggcactactctaggctatttgtcacccaaagatatgaaccaaccttcaagctctttcttcagtatatctcccacatcgaatagttcagctacaattgccagggaactccttatgaatggaacatcttctacagctgaagccataggtttaaaaggaagttctcctactcccccttgttctccagtacaaccttcaaaacaactggaatatttagcaaggattcaaggctttcaggcagccttaagtgccttgaaacaattttctgaacaaggactggatccaatcgatggagcaatgaatatcgaaaaaggttctcttgaaaaacaagccaagcatctgagagagaaagcggacaataaccaggcacccccgggctccatcgctcaggactgcaagaaatcaaactcggccgtctagcagctcccagaacccgcggctgccaccgcatccttataaacctgtcagcacgcatgagggtgtctgtgttcagggaaatgaatgactaataccattatttgagtcttatgtgaagacaacactattctaacacgagagataatatacatggtactgtttattcaactggggaaaaataaaactttgagcatttcccttggaactcgagatcagatcataactcatttgcctagaggcagcagaaatctgatcctgctactggagcttaaaataacaagtaaagaaaagtgttagaaacaaagctaaaattttaacatgattaataatagagaagttgggtttggttctgttgttatgattgttttgtcgtggtgcttgtgttcagttatattctctctctctctcatttcaaatactgcttgacaattcgaaaatgaaccaatgatgtgctgtggaatgtgatggttgtcttcatatagagtcacatggtttctctttttatgcagatatttataatcttcatcctatatcagtaggaataactataaggtgcactacaaaaagatgtatgcaaacaaacatgttttaaatcaggtcagatatctgatgaaaaatacgaactaatgttaagagcaagtagtttcaacatactccaggaactgagaaacaaaacaaagcaattgtgggttttgagctccatatactcttagcaagtaagggggcgtcttgcccctatatatcatcttcccggattccactccctgttgtgggaatcgcgcccacccccatccgtgtgttgtagccactcacggtttgcatcaagagtgttttttgtaactgcctctggacttgggacagtgagtaggatcaaaaataaataatgtacatgacggggaagggaaaaacctgttggagttgcttccagccagccacgctccgggccagcatgttggaatccagcgtggagcagatgcagtaaaaatgtggttggtttctgtgtgaagcgctgttgttgttcttttgttctctcactctcatcttttaaatatcacctccgtgaaacccatccgaaaggccaccacccggcctagtcactgcccagcagtgggattagagaatggataggctgtacctgagaaactgcagagccgcctcctgggtgactcgggccgggttcctggccaacgtcatcgcattgttcaggctttctccttattgatttgcaaacattgtgcaatgagaaaacactacatggtctaactgctcgacccaacatgacaataggaatataattatgtaagatttcacaagcaaaaccaccacaaatcatgatctggctgactcacacgcgactggagaataaacaaacagcaacataaggaa

SEQ ID NO: 5401 - protein, 570 aa, Homo sapiens
MANPKEKTAMCLVNELARFNRVQPQYKLLNERGPAHSKMFSVQLSLGEQTWESEGSSIKKAQQAVANKALTESTLPKPVQKPPKSNVNNNPGSITPTVELNGLAMKRGEPAIYRPLDPKPFPNYRANYNFRGMYNQRYHCPVPKIFYVQLTVGNNEFFGEGKTRQAARHNAAMKALQALQNEPIPERSPQNGESGKDVDDDKDANKSEISLVFEIALKRNMPVSFEVIKESGPPHMKSFVTRVSVGEFSAEGEGNSKKLSKKRAATTVLQELKKLPPLPVVEKPKLFFKKRPKTIVKAGPEYGQGMNPISRLAQIQQAKKEKEPDYVLLSERGMPRRREFVMQVKVGNEVATGTGPNKKIAKKNAAEAMLLQLGYKASTNLQDQLEKTGENKGWSGPKPGFPEPTNNTPKGILHLSPDVYQEMEASRHKVISGTTLGYLSPKDMNQPSSSFFSISPTSNSSATIARELLMNGTSSTAEAIGLKGSSPTPPCSPVQPSKQLEYLARIQGFQAALSALKQFSEQGLDPIDGAMNIEKGSLEKQAKHLREKADNNQAPPGSIAQDCKKSNSAV

SEQ ID NO: 5402 - DNA, 539 bp, Homo sapiens
gtttattctccagtcgcgtgtgagtcagccagatcatgatttgtggtggttttgcttgtgaaatcttacataattatattcctattgtcatgttgggtcgagcagttagaccatgtagtgttttctcattgcacaatgtttgcaaatcaataaggagaaagcctgaacaatgcgatgacgttggccaggaacccggcccgagtcacccaggaggcggctctgcagtttctcaggaggacacatttggacctgaccttcaccactggtcatgtgagaaagcctctatacctggttcctcaacgtctccgtttagaagactgcatcagcaaaaccatcctaccatgggaattaactgatggatgtgtctggacttcccagggggttctccatggacagtattgtgctggtaaatatttaacaactgactcttcgtggggagaaaatcactaagtgtagcatctgttaacacctccaccctggctgatgcgcagttgggaagacatgtgcacagctggcaccgtgagctggcaggagctgct

SEQ ID NO: 5403 - protein, 106 aa, Homo sapiens
MICGGFACEILHNYIPIVMLGRAVRPCSVFSLHNVCKSIRRKPEQCDDVGQEPGPSHPGGGSAVSQEDTFGPDLHHWSCEKASIPGSSTSPFRRLHQQNHPTMGIN

SEQ ID NO: 5404 - DNA, 2066 bp, Homo sapiens
acataattatattcctattgtcatgttgggtcgagcagttagaccatgtagtgttttctcattgcacaatgtttgcaaatcaataaggagaaagcctgaacaatgcgatgacgttggccaggaacccggcccgagtcacccaggaggcggctctgcagtttctcaggaggacacatttggacctgaccttcaccactggtcatgtgagaaagcctctatacctggttcctcaacgtctccgtttagaagactgcatcagcaaaaccatcctaccatgggaattaactgatggatgtgtctggacttcccagggggttctccatggacagtattgtgctgttaaagacgaggagacggagacctagaggaagtcatttgtacaaggccatatggcttgctcctgatagatctggaatttggactcaggcagcctggttctggagctgaattctgaactacctatatcatcccacctcagtccagtgagagaacgtgtcacctgagtgctcaagatacatcaagagcccgaccatgtcctggagcctcttaagagcgaagctcagggtgcaggacctgagagggtgttaatcagccgcttccatttttttcttaatatgggaagaccagattttgcttggcttctggaaaccgctgccatcttgcttttcctcctacttcagctcttggtctcctgtgcagctggcttttccttcttcctgacttttcaagcccatccttggacctcttatcttctccatcaaaattctctccctggatgatttcactgaggccgatggcttaaatcccttagaaatactgatagctccaaatccctatctttagcctggcctcctgccctagaattcacttgtctaagtgcctagtggatttctccacttagatgtctcataagcatttcaaacctgcccaaaacgaaacttgattaccatccccaaaccactcttccctaagaaaatggtgtccccgttccaccagttgctcaggcaaaaaccctagcaatcagcctcacttgctttcattctctctcatctcccacatcaaacccattagcaaattctgttggttcttttttgaaatgtactcggaggctacttctcaccacatgctctgctatggttctagcccaagccactgtcagtctctcccagagacacaagctgtaccttcctaactcgcacccctgtgtgcatccctgtgtgcatccctgctcacccaaagccaaccctttgcatataaccagagtgatttttttgaaatgtaaataagaaccggtcaccaccctattcaaatcctccaggggcttctcatttctcttagaacaaaacccagactcctgactacagccccaaagccctacatgatcctgccccatttacagctccaggctcattacctacctcgtgctcccagcccacggatcatcgcctaccacatgctcccagcccccggatctccagcacatcagcctcttggctcttcttagaactccctgaattcactcctgtctcaaggactttcctgtgcttttccttagacaggagacacccctcccagttcacatggctcactcgcttcatccaggtctcttctccagtgtcccctccttgtgacccctggatctaaaggagttgaaccaccccactcctacccttatattctcatagctcctcacgctgcctcacttttagcaagatttcattaaaattttattgctgtctaaaattctattatatatttaaccatttacttgtttagtatctgtgtcttccattagcaagtaagttctggccaggcgtggtggctcacacctgtaatcccagcactttgggaggctgaggcaggcagatcacctgaggtcaggagtttgagaccagcctggtcaacgtggtgaaaccctgtctctactaaaaatacaaaaatttgccgggtgtggtggcatgcacctgtaatctcagctactcgggaggctgaggcaggagaatcgcttgaacctgggaggtggaggctgcagtgagccaaaagaaagaaagaaagtaagttccatg

SEQ ID NO: 5405 - protein, 88 aa, Homo sapiens
MLGRAVRPCSVFSLHNVCKSIRRKPEQCDDVGQEPGPSHPGGGSAVSQEDTFGPDLHHWSCEKASIPGSSTSPFRRLHQQNHPTMGIN

SEQ ID NO: 5406 - DNA, 1295 bp, Homo sapiens
ctgtattcagagcttggtttataccactttggttccaaatatatctggataaaatgctgatttcctcttttgagaatatacctgacaaggatcagattcatgtaacaagaggcagccttaagtgccttgaaacaattttctgaacaaggactggatccaatcgatggagcaatgaatatcgaaaaaggttctcttgaaaaacaagccaagcatctgagagagaaagcggacaataaccaggcacccccgggctccatcgctcaggactgcaagaaatcaaactcggccgtctagcagctcccagaacccgcggctgccaccgcatccttataaacctgtcagcacgcatgagggtgtctgtgttcagggaaatgaatgactaataccattatttgagtcttatgtgaagacaacactattctaacacgagagataatatacatggtactgtttattcaactggggaaaaataaaactttgagcatttcccttggaactcgagatcagatcataactcatttgcctagaggcagcagaaatctgatcctgctactggagcttaaaataacaagtaaagaaaagtgttagaaacaaagctaaaattttaacatgattaataatagagaagttgggtttggttctgttgttatgattgttttgtcgtggtgcttgtgttcagttatattctctctctctctcatttcaaatactgcttgacaattcgaaaatgaaccaatgatgtgctgtggaatgtgatggttgtcttcatatagagtcacatggtttctctttttatgcagatatttataatcttcatcctatatcagtaggaataactataaggtgcactacaaaaagatgtatgcaaacaaacatgttttaaatcaggtcagatatctgatgaaaaatacgaactaatgttaagagcaagtagtttcaacatactccaggaactgagaaacaaaacaaagcaattgtgggttttgagctccatatactcttagcaagtaagggggcgtcttgcccctatatatcatcttcccggattccactccctgttgtgggaatcgcgcccacccccatccgtgtgttgtagccactcacggtttgcatcaagagtgttttttgtaactgcctctggacttgggacagtgagtaggatcaaaaataaataatgtacatgacggggaagggaaaaacctgttggagttgcttccagccagccacgctccgggccagcatgttggaatccagcgtggagcagatgcagtaaaaatgtggttggtttctgtgtg

SEQ ID NO: 5407 - protein, 40 aa, Homo sapiens; identical to SEQ ID NO: 5395

SEQ ID NO: 5408 - DNA, 1254 bp, Homo sapiens
tctgacattagcccctgtgcagatgactttccatgctattggaagctccattgaagccagccatgatcaggcagccttaagtgccttgaaacaattttctgaacaaggactggatccaatcgatggagcaatgaatatcgaaaaaggttctcttgaaaaacaagccaagcatctgagagagaaagcggacaataaccaggcacccccgggctccatcgctcaggactgcaagaaatcaaactcggccgtctagcagctcccagaacccgcggctgccaccgcatccttataaacctgtcagcacgcatgagggtgtctgtgttcagggaaatgaatgactaataccattatttgagtcttatgtgaagacaacactattctaacacgagagataatatacatggtactgtttattcaactggggaaaaataaaactttgagcatttcccttggaactcgagatcagatcataactcatttgcctagaggcagcagaaatctgatcctgctactggagcttaaaataacaagtaaagaaaagtgttagaaacaaagctaaaattttaacatgattaataatagagaagttgggtttggttctgttgttatgattgttttgtcgtggtgcttgtgttcagttatattctctctctctctcatttcaaatactgcttgacaattcgaaaatgaaccaatgatgtgctgtggaatgtgatggttgtcttcatatagagtcacatggtttctctttttatgcagatatttataatcttcatcctatatcagtaggaataactataaggtgcactacaaaaagatgtatgcaaacaaacatgttttaaatcaggtcagatatctgatgaaaaatacgaactaatgttaagagcaagtagtttcaacatactccaggaactgagaaacaaaacaaagcaattgtgggttttgagctccatatactcttagcaagtaagggggcgtcttgcccctatatatcatcttcccggattccactccctgttgtgggaatcgcgcccacccccatccgtgtgttgtagccactcacggtttgcatcaagagtgttttttgtaactgcctctggacttgggacagtgagtaggatcaaaaataaataatgtacatgacggggaagggaaaaacctgttggagttgcttccagccagccacgctccgggccagcatgttggaatccagcgtggagcagatgcagtaaaaatgtggttggtttctgtgtg

SEQ ID NO: 5409 - protein, 76 aa, Homo sapiens [sequence omitted]

SEQ ID NO: 5410 - DNA, 2886 bp, Homo sapiens
gggggcggggagcccgaggggtggaagccggcggcggccgagcggggtcagttctctgtagtgtttgccaatgttggagccgtctgcaaagtgtccccggcaagaagaggctgcctaccacaaggactttagcttactttttaaagattgaagaaaaaaaagaagacagaaaaagaagaactcaaagatacacaaagtaatttgaaccaaggctcagaagtttttggagccgtgagggatacagcagtttggtcaatattgtcttaacatgcttcaaataaatcagatgttctcagtgcagctgagtcttggtgagcagacatgggaatccgaaggcagcagtataaagaaggctcagcaggctgttgccaataaagctttgactgaatctacgcttcccaaaccagttcagaagccacccaaaagtaatgttaacaataacccaggcagtataactccaactgtggaactgaatgggcttgctatgaaaaggggagagcctgccatctacaggccattagatccaaagccattcccaaattatagagctaattacaactttcggggcatgtacaatcagaggtatcattgcccagtgcctaagatcttttatgttcagctcactgtaggaaataatgaattttttggggaaggaaagactcgacaagctgctagacacaatgctgcaatgaaagccctccaagcactgcagaatgaacctattccagaaagatctcctcagaatggtgaatcaggaaaggatgtggatgatgacaaagatgcaaataagtctgagatcagcttagtgtttgaaattgctctgaagcgaaatatgcctgtcagttttgaggttattaaagaaagtggaccaccacatatgaaaagctttgttactcgagtgtcagtaggagagttctctgcagaaggagaaggaaatagcaaaaaactctccaagaagcgcgctgcgaccaccgtcttacaggagcttaaaaaacttccacctcttcctgtggtggaaaagccaaaactattttttaaaaaacgccctaaaacaatagtaaaggccggaccagaatatggccaagggatgaaccctattagccgcctggcgcaaattcaacaggccaaaaaggaaaaggagccggattatgttttgctttcagaaagaggaatgcctcgacgtcgagaatttgtgatgcaggtgaaggtaggcaatgaagttgctacaggaacaggacctaataaaaagatagccaaaaaaaatgctgcagaagcaatgctgttacaacttggttataaagcatccactaatcttcaggatcaacttgagaagacaggggaaaacaaaggatggagtggtccaaagcctgggtttcctgaaccaacaaataatactccaaaaggaattcttcatttgtctcctgatgtttatcaagagatggaagccagccgccacaaagtaatctctggcactactctaggctatttgtcacccaaagatatgaaccaaccttcaagctctttcttcagtatatctcccacatcgaatagttcagctacaattgccagggaactccttatgaatggaacatcttctacagctgaagccataggtttaaaaggaagttctcctactcccccttgttctccagtacaaccttcaaaacaactggaatatttagcaaggattcaaggctttcaggcagccttaagtgccttgaaacaattttctgaacaaggactggatccaatcgatggagcaatgaatatcgaaaaaggttctcttgaaaaacaagccaagcatctgagagagaaagcggacaataaccaggcacccccgggctccatcgctcaggactgcaagaaatcaaactcggccgtctagcagctcccagaacccgcggctgccaccgcatccttataaacctgtcagcacgcatgagggtgtctgtgttcagggaaatgaatgactaataccattatttgagtcttatgtgaagacaacactattctaacacgagagataatatacatggtactgtttattcaactggggaaaaataaaactttgagcatttcccttggaactcgagatcagatcataactcatttgcctagaggcagcagaaatctgatcctgctactggagcttaaaataacaagtaaagaaaagtgttagaaacaaagctaaaattttaacatgattaataatagagaagttgggtttggttctgttgttatgattgttttgtcgtggtgcttgtgttcagttatattctctctctctctcatttcaaatactgcttgacaattcgaaaatgaaccaatgatgtgctgtggaatgtgatggttgtcttcatatagagtcacatggtttctctttttatgcagatatttataatcttcatcctatatcagtaggaataactataaggtgcactacaaaaagatgtatgcaaacaaacatgttttaaatcaggtcagatatctgatgaaaaatacgaactaatgttaagagcaagtagtttcaacatactccaggaactgagaaacaaaacaaagcaattgtgggttttgagctccatatactcttagcaagtaagggggcgtcttgcccctatatatcatcttcccggattccactccctgttgtgggaatcgcgcccacccccatccgtgtgttgtagccactcacggtttgcatcaagagtgttttttgtaactgcctctggacttgggacagtgagtaggatcaaaaataaataatgtacatgacggggaagggaaaaacctgttggagttgcttccagccagccacgctccgggccagcatgttggaatccagcgtggagcagatgcagtaaaaatgtggttggtttctgtgtg

SEQ ID NO: 5411 - protein, 538 aa, Homo sapiens; identical to SEQ ID NO: 5399

SEQ ID NO: 5412 - DNA, 3060 bp, Homo sapiens
gcggcgggagcgccggggaggcgggcggaggcgggcggaggcggggggcggggagcccgaggggtggaagccggcggcggccgagcggggtcagttctctgtagtgtttgccaatgttggagccgtctgcaaagtgtccccggcaagaagaggctgcctaccacaaggactttagcttactttttaaagattgaagaaaaaaaagaagacagaaaaagaagaactcaaagatacacaaagtaatttgaaccaaggctcagaagtttttggagccgtgagggatacagcagtttggtcaatattgtcttaacatgcttcaaataaatcagcttctctccaagataaaatggcaaacccaaaagagaaaactgcaatgtgtctggtaaatgagttagcccgtttcaatagagtccaaccccagtataaacttctgaatgaaagagggcctgctcattcaaagatgttctcagtgcagctgagtcttggtgagcagacatgggaatccgaaggcagcagtataaagaaggctcagcaggctgttgccaataaagctttgactgaatctacgcttcccaaaccagttcagaagccacccaaaagtaatgttaacaataacccaggcagtataactccaactgtggaactgaatgggcttgctatgaaaaggggagagcctgccatctacaggccattagatccaaagccattcccaaattatagagctaattacaactttcggggcatgtacaatcagaggtatcattgcccagtgcctaagatcttttatgttcagctcactgtaggaaataatgaattttttggggaaggaaagactcgacaagctgctagacacaatgctgcaatgaaagccctccaagcactgcagaatgaacctattccagaaagatctcctcagaatggtgaatcaggaaaggatgtggatgatgacaaagatgcaaataagtctgagatcagcttagtgtttgaaattgctctgaagcgaaatatgcctgtcagttttgaggttattaaagaaagtggaccaccacatatgaaaagctttgttactcgagtgtcagtaggagagttctctgcagaaggagaaggaaatagcaaaaaactctccaagaagcgcgctgcgaccaccgtcttacaggagcttaaaaaacttccacctcttcctgtggtggaaaagccaaaactattttttaaaaaacgccctaaaacaatagtaaaggccggaccagaatatggccaagggatgaaccctattagccgcctggcgcaaattcaacaggccaaaaaggaaaaggagccggattatgttttgctttcagaaagaggaatgcctcgacgtcgagaatttgtgatgcaggtgaaggtaggcaatgaagttgctacaggaacaggacctaataaaaagatagccaaaaaaaatgctgcagaagcaatgctgttacaacttggttataaagcatccactaatcttcaggatcaacttgagaagacaggggaaaacaaaggatggagtggtccaaagcctgggtttcctgaaccaacaaataatactccaaaaggaattcttcatttgtctcctgatgtttatcaagagatggaagccagccgccacaaagtaatctctggcactactctaggctatttgtcacccaaagatatgaaccaaccttcaagctctttcttcagtatatctcccacatcgaatagttcagctacaattgccagggaactccttatgaatggaacatcttctacagctgaagccataggtttaaaaggaagttctcctactcccccttgttctccagtacaaccttcaaaacaactggaatatttagcaaggattcaaggctttcaggcagccttaagtgccttgaaacaattttctgaacaaggactggatccaatcgatggagcaatgaatatcgaaaaaggttctcttgaaaaacaagccaagcatctgagagagaaagcggacaataaccaggcacccccgggctccatcgctcaggactgcaagaaatcaaactcggccgtctagcagctcccagaacccgcggctgccaccgcatccttataaacctgtcagcacgcatgagggtgtctgtgttcagggaaatgaatgactaataccattatttgagtcttatgtgaagacaacactattctaacacgagagataatatacatggtactgtttattcaactggggaaaaataaaactttgagcatttcccttggaactcgagatcagatcataactcatttgcctagaggcagcagaaatctgatcctgctactggagcttaaaataacaagtaaagaaaagtgttagaaacaaagctaaaattttaacatgattaataatagagaagttgggtttggttctgttgttatgattgttttgtcgtggtgcttgtgttcagttatattctctctctctctcatttcaaatactgcttgacaattcgaaaatgaaccaatgatgtgctgtggaatgtgatggttgtcttcatatagagtcacatggtttctctttttatgcagatatttataatcttcatcctatatcagtaggaataactataaggtgcactacaaaaagatgtatgcaaacaaacatgttttaaatcaggtcagatatctgatgaaaaatacgaactaatgttaagagcaagtagtttcaacatactccaggaactgagaaacaaaacaaagcaattgtgggttttgagctccatatactcttagcaagtaagggggcgtcttgcccctatatatcatcttcccggattccactccctgttgtgggaatcgcgcccacccccatccgtgtgttgtagccactcacggtttgcatcaagagtgttttttgtaactgcctctggacttgggacagtgagtaggatcaaaaataaataatgtacatgacggggaagggaaaaacctgttggagttgcttccagccagccacgctccgggccagcatgttggaatccagcgtggagcagatgcagtaaaaatgtggttggtttctgtgtg

SEQ ID NO: 5413 - protein, 570 aa, Homo sapiens; identical to SEQ ID NO: 5401

SEQ ID NO: 5414 - DNA, 3133 bp, Homo sapiens
aatcgcggcagcagcggcagaggcggcggcagctgcgcgcctcgggcccaaccccgctcggctccccctctcgccggcgccctgcctgtcttgcgtgtgcgtgtgcgtgtgctcagcctcagcgtgaggggcacctgctcgtctgggctcacagcgaaggcagcctcgccgcgagctgccgctgccgctgctgccgccactggtgttgccgctctcaggcgccaggctccccgtcgccgccgccgccgcctcgccagccagagttgggctccgtgggcttcccccctcgcagcctcggtccttccccgctgcctgcaagtcagcctggctccgagtcacgtgtcagtgcctgaggcagagactgcgagaaaaaaacgcgcttcattccttcttccaccgccatactgtattttatactaaatctcatttttattccaacattttactcccgctcggtgagtaccttctcagtggcattcttgtcctattcttttttttgtccttttttttggttttttgttttttttgtttttgttttttttctttttttccacttctttgattattgtttatatttgggaaagctggaggagcatggttttgagccttttcctgaatccaagtttttctagcatgcgatcgttctgtagacaaggcgctgtgtctcggagtccgcggcgaccgtgcccgctgggagcgtctcccaagtccagcaaaatgtgcaactggttttatggaaaaagcgatgtgaagtatggtgcctatttttttcctttgtaaaaataaaaagcatgtttctaactctttttttgcatactctttttctgataacatttttgtataggtgggattttacggcagtgtttacaagtttgtggtcttgcaatactggtgcaaaccactgagcaaagacattaattttatattttttgtgccctttttggaagccggtgaaaacaaattcgttttttttccctcctgtttttgatacccattgataacatgaaacttttcttacagctggtgattgggatcatttttaagcaaaatacttttttcctcctttaaattaactatgacttttgcacatttgacttttttaaaaaaccgagataattttatgatagatatcctgatatctatatctatattgtcccttatttctcccccttccctccccgtaaatcaattttcaaatgatggcagtggaaggtttttctggaaaaaaaaaaatgaagtgcggtttggtttccttgtcaacggaggatgaagtgaacagctgagcagctcgcagagagcaggattaaagcaaggagagccaatcatgactggcaaaacacagaccagcaacgtcaccaataagaatgaccccaagtccatcaactcccgtgttttcatcggcaatctaaatacggcaattgtcaagaaagttgacattgaagccattttttcaaagtatggaaaaatagttggatgttccgttcacaaaggttatgcatttgtacagtacatgagtgagcgacatgcaagagctgcagtggctggagaaaatgccagagtcatcgccggccaaccacttgatatcaacatggcaggagagcccaaaccatacagaccaaaacctggaaacaagaggcccctttctgcactttacagacttgaatcaaaggaacctttcctgtctgttggcggttatgtctttgactatgattactacagagatgatttctacaatcggttatttgattaccacgggcgtgtgcctccacctccccgtgcagtaattccgctgaagcgtcccagagtggcagtcacaacgactcgcagggggaaaggagtcttttccatgaaaggtggatcgagatctactgccagtgggtcaacaggttctaaattgaaatcagatgagttacagaccatcaagaaagaattaacccagatcaaaactaaaattgactccttgctagggcgcctggagaagattgagaaacagcagaaggcggaggcagaagctcagaagaagcaattggaagagagtctagtgctgatccaagaggaatgtgtgtcagagattgcagatcactctacagaggagcctgctgaaggagggccagatgccgatggagaagagatgacagatgggatagaggaggacttcgatgaagatgggggtcatgagctgtttctacagataaagtgatctgaaataacgcatgatgccacaaagcagaaaagagaaactgtgacaacccccagaaatgtgaaaggaggtttcttactggacagcagcatctttggttcaatttatataaaaacccaaataaataaaatggacagtattgctcagttttagaaattccatttcttctatgttttaagctgtacaattgtcaggtttttatggtttaaattgtaaatgtgttttcccctttgctaattatgttttttttttcagtcttaaaatgtgaaaggcatttatgaatggtaagggaaacactatatacaaatgtatatttgtaaaagctatttttatgattagcatgtttcactgttgatcatatataaagtcaggtgatattgcaattctgtatttaaagcttatttccaacaatgtcatgtaagaaaagatgcatcttatgctagtttttataatttatttataatttatagtttaaagtacttcagatcataatgataaaatacttgaaaaagttatatttctgccctgtataagcaccctttttattaataaagaatgcagatatttcagatgtgatataatagttaaagaactgttggtttgatctgtgattaagttgagcatgctccgctctactgaactaaatgatccaattattacttcagtctgggtatgagattccatggacaagtaaggactagattgccaaggaaaagactgtcttgcccttggatccaaaagtttaaattagtgcatacatcatgtcatttcacctcctgttcctaggaactctccattcccaagcattgccagtgttttccagataatcttagctgttgtcttgtgctgtggaaatggaagaaaccatcttcacagaccgtaggagaattcaacatataatttcttaataaatactgtttcttttaaaacaaa

SEQ ID NO: 5415 - protein, 291 aa, Homo sapiens; identical to SEQ ID NO: 733

SEQ ID NO: 5416 - DNA, 3100 bp, Homo sapiens
aatcgcggcagcagcggcagaggcggcggcagctgcgcgcctcgggcccaaccccgctcggctccccctctcgccggcgccctgcctgtcttgcgtgtgcgtgtgcgtgtgctcagcctcagcgtgaggggcacctgctcgtctgggctcacagcgaaggcagcctcgccgcgagctgccgctgccgctgctgccgccactggtgttgccgctctcaggcgccaggctccccgtcgccgccgccgccgcctcgccagccagagttgggctccgtgggcttcccccctcgcagcctcggtccttccccgctgcctgcaagtcagcctggctccgagtcacgtgtcagtgcctgaggcagagactgcgagaaaaaaacgcgcttcattccttcttccaccgccatactgtattttatactaaatctcatttttattccaacattttactcccgctcggtgagtaccttctcagtggcattcttgtcctattcttttttttgtccttttttttggttttttgttttttttgtttttgttttttttctttttttccacttctttgattattgtttatatttgggaaagctggaggagcatggttttgagccttttcctgaatccaagtttttctagcatgcgatcgttctgtagacaaggcgctgtgtctcggagtccgcggcgaccgtgcccgctgggagcgtctcccaagtccagcaaaatgtgcaactggttttatggaaaaagcgatgtgaagtatggtgcctatttttttcctttgtaaaaataaaaagcatgtttctaactctttttttgcatactctttttctgataacatttttgtataggtgggattttacggcagtgtttacaagtttgtggtcttgcaatactggtgcaaaccactgagcaaagacattaattttatattttttgtgccctttttggaagccggtgaaaacaaattcgttttttttccctcctgtttttgatacccattgataacatgaaacttttcttacagctggtgattgggatcatttttaagcaaaatacttttttcctcctttaaattaactatgacttttgcacatttgacttttttaaaaaaccgagataattttatgatagatatcctgatatctatatctatattgtcccttatttctcccccttccctccccgtaaatcaattttcaaatgatggcagtggaaggtttttctggaaaaaaaaaaatgaagtgcggtttggtttccttgtcaacggaggatgaagtgaacagctgagcagctcgcagagagcaggattaaagcaaggagagccaatcatgactggcaaaacacagaccagcaacgtcaccaataagaatgaccccaagtccatcaactcccgtgttttcatcggcaatctaaatacggcaattgtcaagaaagttgacattgaagccattttttcaaagtatggaaaaatagttggatgttccgttcacaaaggttatgcatttgtacagtacatgagtgagcgacatgcaagagctgcagtggctggagaaaatgccagagtcatcgccggccaaccacttgatatcaacatggcaggagagcccaaaccatacagaccaaaacctggaaacaagaggcccctttctgcactttacagcggttatgtctttgactatgattactacagagatgatttctacaatcggttatttgattaccacgggcgtgtgcctccacctccccgtgcagtaattccgctgaagcgtcccagagtggcagtcacaacgactcgcagggggaaaggagtcttttccatgaaaggtggatcgagatctactgccagtgggtcaacaggttctaaattgaaatcagatgagttacagaccatcaagaaagaattaacccagatcaaaactaaaattgactccttgctagggcgcctggagaagattgagaaacagcagaaggcggaggcagaagctcagaagaagcaattggaagagagtctagtgctgatccaagaggaatgtgtgtcagagattgcagatcactctacagaggagcctgctgaaggagggccagatgccgatggagaagagatgacagatgggatagaggaggacttcgatgaagatgggggtcatgagctgtttctacagataaagtgatctgaaataacgcatgatgccacaaagcagaaaagagaaactgtgacaacccccagaaatgtgaaaggaggtttcttactggacagcagcatctttggttcaatttatataaaaacccaaataaataaaatggacagtattgctcagttttagaaattccatttcttctatgttttaagctgtacaattgtcaggtttttatggtttaaattgtaaatgtgttttcccctttgctaattatgttttttttttcagtcttaaaatgtgaaaggcatttatgaatggtaagggaaacactatatacaaatgtatatttgtaaaagctatttttatgattagcatgtttcactgttgatcatatataaagtcaggtgatattgcaattctgtatttaaagcttatttccaacaatgtcatgtaagaaaagatgcatcttatgctagtttttataatttatttataatttatagtttaaagtacttcagatcataatgataaaatacttgaaaaagttatatttctgccctgtataagcaccctttttattaataaagaatgcagatatttcagatgtgatataatagttaaagaactgttggtttgatctgtgattaagttgagcatgctccgctctactgaactaaatgatccaattattacttcagtctgggtatgagattccatggacaagtaaggactagattgccaaggaaaagactgtcttgcccttggatccaaaagtttaaattagtgcatacatcatgtcatttcacctcctgttcctaggaactctccattcccaagcattgccagtgttttccagataatcttagctgttgtcttgtgctgtggaaatggaagaaaccatcttcacagaccgtaggagaattcaacatataatttcttaataaatactgtttcttttaaaacaaa

SEQ ID NO: 5417 - protein, 280 aa, Homo sapiens
MTGKTQTSNVTNKNDPKSINSRVFIGNLNTAIVKKVDIEAIFSKYGKIVGCSVHKGYAFVQYMSERHARAAVAGENARVIAGQPLDINMAGEPKPYRPKPGNKRPLSALYSGYVFDYDYYRDDFYNRLFDYHGRVPPPPRAVIPLKRPRVAVTTTRRGKGVFSMKGGSRSTASGSTGSKLKSDELQTIKKELTQIKTKIDSLLGRLEKIEKQQKAEAEAQKKQLEESLVLIQEECVSEIADHSTEEPAEGGPDADGEEMTDGIEEDFDEDGGHELFLQIK

SEQ ID NO: 5418 - DNA, 2317 bp, Homo sapiens
aatcgcggcagcagcggcagaggcggcggcagctgcgcgcctcgggcccaaccccgctcggctccccctctcgccggcgccctgcctgtcttgcgtgtgcgtgtgcgtgtgctcagcctcagcgtgaggggcacctgctcgtctgggctcacagcgaaggcagcctcgccgcgagctgccgctgccgctgctgccgccactggtgttgccgctctcaggcgccaggctccccgtcgccgccgccgccgcctcgccagccagagttgggctccgtgggcttcccccctcgcagcctcggtccttccccgctgcctgcaagtcagcctggctccgagtcacgtgtcagtgcctgaggcagagactgcgagaaaaaaacgcgcttcattccttcttccaccgccatactgtattttatactaaatctcatttttattccaacattttactcccgctcggtgagtaccttctcagtggcattcttgtcctattcttttttttgtccttttttttggttttttgattaaagcaaggagagccaatcatgactggcaaaacacagaccagcaacgtcaccaataagaatgaccccaagtccatcaactcccgtgttttcatcggcaatctaaatacggcaattgtcaagaaagttgacattgaagccattttttcaaagtatggaaaaatagttggatgttccgttcacaaaggttatgcatttgtacagtacatgagtgagcgacatgcaagagctgcagtggctggagaaaatgccagagtcatcgccggccaaccacttgatatcaacatggcaggagagcccaaaccatacagaccaaaacctggaaacaagaggcccctttctgcactttacagcggttatgtctttgactatgattactacagagatgatttctacaatcggttatttgattaccacgggcgtgtgcctccacctccccgtgcagtaattccgctgaagcgtcccagagtggcagtcacaacgactcgcagggggaaaggagtcttttccatgaaaggtggatcgagatctactgccagtgggtcaacaggttctaaattgaaatcagatgagttacagaccatcaagaaagaattaacccagatcaaaactaaaattgactccttgctagggcgcctggagaagattgagaaacagcagaaggcggaggcagaagctcagaagaagcaattggaagagagtctagtgctgatccaagaggaatgtgtgtcagagattgcagatcactctacagaggagcctgctgaaggagggccagatgccgatggagaagagatgacagatgggatagaggaggacttcgatgaagatgggggtcatgagctgtttctacagataaagtgatctgaaataacgcatgatgccacaaagcagaaaagagaaactgtgacaacccccagaaatgtgaaaggaggtttcttactggacagcagcatctttggttcaatttatataaaaacccaaataaataaaatggacagtattgctcagttttagaaattccatttcttctatgttttaagctgtacaattgtcaggtttttatggtttaaattgtaaatgtgttttcccctttgctaattatgttttttttttcagtcttaaaatgtgaaaggcatttatgaatggtaagggaaacactatatacaaatgtatatttgtaaaagctatttttatgattagcatgtttcactgttgatcatatataaagtcaggtgatattgcaattctgtatttaaagcttatttccaacaatgtcatgtaagaaaagatgcatcttatgctagtttttataatttatttataatttatagtttaaagtacttcagatcataatgataaaatacttgaaaaagttatatttctgccctgtataagcaccctttttattaataaagaatgcagatatttcagatgtgatataatagttaaagaactgttggtttgatctgtgattaagttgagcatgctccgctctactgaactaaatgatccaattattacttcagtctgggtatgagattccatggacaagtaaggactagattgccaaggaaaagactgtcttgcccttggatccaaaagtttaaattagtgcatacatcatgtcatttcacctcctgttcctaggaactctccattcccaagcattgccagtgttttccagataatcttagctgttgtcttgtgctgtggaaatggaagaaaccatcttcacagaccgtaggagaattcaacatataatttcttaataaatactgtttcttttaaaacaaa

SEQ ID NO: 5419 - protein, 280 aa, Homo sapiens; identical to SEQ ID NO: 5417

SEQ ID NO: 5420 - DNA, 2237 bp, Homo sapiens
tgcctgtcttgcgtgtgcgtgtgcgtgtgctcagcctcagcgtgaggggcacctgctcgtctgggctcacagcgaaggcagcctcgccgcgagctgccgctgccgctgctgccgccactggtgttgccgctctcaggcgccaggctccccgtcgccgccgccgccgcctcgccagccagagttgggctccgtgggcttcccccctcgcagcctcggtccttccccgctgcctgcaagtcagcctggctccgagtcacgtgtcagtgcctgaggcagagactgcgagaaaaaaacgcgcttcattccttcttccaccgccatactgtattttatactaaatctcatttttattccaacattttactcccgctcgatatagcccttggcgaggtgcctggctccatagattaaagcaaggagagccaatcatgactggcaaaacacagaccagcaacgtcaccaataagaatgaccccaagtccatcaactcccgtgttttcatcggcaatctaaatacggcaattgtcaagaaagttgacattgaagccattttttcaaagtatggaaaaatagttggatgttccgttcacaaaggttatgcatttgtacagtacatgagtgagcgacatgcaagagctgcagtggctggagaaaatgccagagtcatcgccggccaaccacttgatatcaacatggcaggagagcccaaaccatacagaccaaaacctggaaacaagaggcccctttctgcactttacagacttgaatcaaaggaacctttcctgtctgttggcggttatgtctttgactatgattactacagagatgatttctacaatcggttatttgattaccacgggcgtgtgcctccacctccccgtgcagtaattccgctgaagcgtcccagagtggcagtcacaacgactcgcagggggaaaggagtcttttccatgaaaggtggatcgagatctactgccagtgggtcaacaggttctaaattgaaatcagatgagttacagaccatcaagaaagaattaacccagatcaaaactaaaattgactccttgctagggcgcctggagaagattgagaaacagcagaaggcggaggcagaagctcagaagaagcaattggaagagagtctagtgctgatccaagaggaatgtgtgtcagagattgcagatcactctacagaggagcctgctgaaggagggccagatgccgatggagaagagatgacagatgggatagaggaggacttcgatgaagatgggggtcatgagctgtttctacagataaagtgatctgaaataacgcatgatgccacaaagcagaaaagagaaactgtgacaacccccagaaatgtgaaaggaggtttcttactggacagcagcatctttggttcaatttatataaaaacccaaataaataaaatggacagtattgctcagttttagaaattccatttcttctatgttttaagctgtacaattgtcaggtttttatggtttaaattgtaaatgtgttttcccctttgctaattatgttttttttttcagtcttaaaatgtgaaaggcatttatgaatggtaagggaaacactatatacaaatgtatatttgtaaaagctatttttatgattagcatgtttcactgttgatcatatataaagtcaggtgatattgcaattctgtatttaaagcttatttccaacaatgtcatgtaagaaaagatgcatcttatgctagtttttataatttatttataatttatagtttaaagtacttcagatcataatgataaaatacttgaaaaagttatatttctgccctgtataagcaccctttttattaataaagaatgcagatatttcagatgtgatataatagttaaagaactgttggtttgatctgtgattaagttgagcatgctccgctctactgaactaaatgatccaattattacttcagtctgggtatgagattccatggacaagtaaggactagattgccaaggaaaagactgtcttgcccttggatccaaaagtttaaattagtgcatacatcatgtcatttcacctcctgttcctaggaactctccattcccaagcattgccagtgttttccagataatcttagctgttgtcttgtgctgtggaaatggaagaaaccatcttcacagaccgtaggagaattcaacatataatttcttaataaatactgtttcttttaaaacaaa

SEQ ID NO: 5421 - protein, 291 aa, Homo sapiens; identical to SEQ ID NO: 733

SEQ ID NO: 5422 - DNA, 2205 bp, Homo sapiens
tgcctgtcttgcgtgtgcgtgtgcgtgtgctcagcctcagcgtgaggggcacctgctcgtctgggctcacagcgaaggcagcctcgccgcgagctgccgctgccgctgctgccgccactggtgttgccgctctcaggcgccaggctccccgtcgccgccgccgccgcctcgccagccagagttgggctccgtgggcttcccccctcgcagcctcggtccttccccgctgcctgcaagtcagcctggctccgagtcacgtgtcagtgcctgaggcagagactgcgagaaaaaaacgcgcttcattccttcttccaccgccatactgtattttatactaaatctcatttttattccaacattttactcccgctcggattaaagcaaggagagccaatcatgactggcaaaacacagaccagcaacgtcaccaataagaatgaccccaagtccatcaactcccgtgttttcatcggcaatctaaatacggcaattgtcaagaaagttgacattgaagccattttttcaaagtatggaaaaatagttggatgttccgttcacaaaggttatgcatttgtacagtacatgagtgagcgacatgcaagagctgcagtggctggagaaaatgccagagtcatcgccggccaaccacttgatatcaacatggcaggagagcccaaaccatacagaccaaaacctggaaacaagaggcccctttctgcactttacagacttgaatcaaaggaacctttcctgtctgttggcggttatgtctttgactatgattactacagagatgatttctacaatcggttatttgattaccacgggcgtgtgcctccacctccccgtgcagtaattccgctgaagcgtcccagagtggcagtcacaacgactcgcagggggaaaggagtcttttccatgaaaggtggatcgagatctactgccagtgggtcaacaggttctaaattgaaatcagatgagttacagaccatcaagaaagaattaacccagatcaaaactaaaattgactccttgctagggcgcctggagaagattgagaaacagcagaaggcggaggcagaagctcagaagaagcaattggaagagagtctagtgctgatccaagaggaatgtgtgtcagagattgcagatcactctacagaggagcctgctgaaggagggccagatgccgatggagaagagatgacagatgggatagaggaggacttcgatgaagatgggggtcatgagctgtttctacagataaagtgatctgaaataacgcatgatgccacaaagcagaaaagagaaactgtgacaacccccagaaatgtgaaaggaggtttcttactggacagcagcatctttggttcaatttatataaaaacccaaataaataaaatggacagtattgctcagttttagaaattccatttcttctatgttttaagctgtacaattgtcaggtttttatggtttaaattgtaaatgtgttttcccctttgctaattatgttttttttttcagtcttaaaatgtgaaaggcatttatgaatggtaagggaaacactatatacaaatgtatatttgtaaaagctatttttatgattagcatgtttcactgttgatcatatataaagtcaggtgatattgcaattctgtatttaaagcttatttccaacaatgtcatgtaagaaaagatgcatcttatgctagtttttataatttatttataatttatagtttaaagtacttcagatcataatgataaaatacttgaaaaagttatatttctgccctgtataagcaccctttttattaataaagaatgcagatatttcagatgtgatataatagttaaagaactgttggtttgatctgtgattaagttgagcatgctccgctctactgaactaaatgatccaattattacttcagtctgggtatgagattccatggacaagtaaggactagattgccaaggaaaagactgtcttgcccttggatccaaaagtttaaattagtgcatacatcatgtcatttcacctcctgttcctaggaactctccattcccaagcattgccagtgttttccagataatcttagctgttgtcttgtgctgtggaaatggaagaaaccatcttcacagaccgtaggagaattcaacatataatttcttaataaatactgtttcttttaaaacaaa

SEQ ID NO: 5423 - protein, 291 aa, Homo sapiens; identical to SEQ ID NO: 733

SEQ ID NO: 5424 - DNA, 1982 bp, Homo sapiens
gggtagaagcggcagagaccgcatattccggaggggctggctccaggccacgcgagccggagctggagacatttccagagccttgaggatggcaccggccctcgcacgctcaactcctgctcctcctcttcgcaatgagtaaacgacgcagattaaagcaaggagagccaatcatgactggcaaaacacagaccagcaacgtcaccaataagaatgaccccaagtccatcaactcccgtgttttcatcggcaatctaaatacggcaattgtcaagaaagttgacattgaagccattttttcaaagtatggaaaaatagttggatgttccgttcacaaaggttatgcatttgtacagtacatgagtgagcgacatgcaagagctgcagtggctggagaaaatgccagagtcatcgccggccaaccacttgatatcaacatggcaggagagcccaaaccatacagaccaaaacctggaaacaagaggcccctttctgcactttacagacttgaatcaaaggaacctttcctgtctgttggcggttatgtctttgactatgattactacagagatgatttctacaatcggttatttgattaccacgggcgtgtgcctccacctccccgtgcagtaattccgctgaagcgtcccagagtggcagtcacaacgactcgcagggggaaaggagtcttttccatgaaaggtggatcgagatctactgccagtgggtcaacaggttctaaattgaaatcagatgagttacagaccatcaagaaagaattaacccagatcaaaactaaaattgactccttgctagggcgcctggagaagattgagaaacagcagaaggcggaggcagaagctcagaagaagcaattggaagagagtctagtgctgatccaagaggaatgtgtgtcagagattgcagatcactctacagaggagcctgctgaaggagggccagatgccgatggagaagagatgacagatgggatagaggaggacttcgatgaagatgggggtcatgagctgtttctacagataaagtgatctgaaataacgcatgatgccacaaagcagaaaagagaaactgtgacaacccccagaaatgtgaaaggaggtttcttactggacagcagcatctttggttcaatttatataaaaacccaaataaataaaatggacagtattgctcagttttagaaattccatttcttctatgttttaagctgtacaattgtcaggtttttatggtttaaattgtaaatgtgttttcccctttgctaattatgttttttttttcagtcttaaaatgtgaaaggcatttatgaatggtaagggaaacactatatacaaatgtatatttgtaaaagctatttttatgattagcatgtttcactgttgatcatatataaagtcaggtgatattgcaattctgtatttaaagcttatttccaacaatgtcatgtaagaaaagatgcatcttatgctagtttttataatttatttataatttatagtttaaagtacttcagatcataatgataaaatacttgaaaaagttatatttctgccctgtataagcaccctttttattaataaagaatgcagatatttcagatgtgatataatagttaaagaactgttggtttgatctgtgattaagttgagcatgctccgctctactgaactaaatgatccaattattacttcagtctgggtatgagattccatggacaagtaaggactagattgccaaggaaaagactgtcttgcccttggatccaaaagtttaaattagtgcatacatcatgtcatttcacctcctgttcctaggaactctccattcccaagcattgccagtgttttccagataatcttagctgttgtcttgtgctgtggaaatggaagaaaccatcttcacagaccgtaggagaattcaacatataatttcttaataaatactgtttcttttaaaacaaa

SEQ ID NO: 5425 - protein, 304 aa, Homo sapiens
MSKRRRLKQGEPIMTGKTQTSNVTNKNDPKSINSRVFIGNLNTAIVKKVDIEAIFSKYGKIVGCSVHKGYAFVQYMSERHARAAVAGENARVIAGQPLDINMAGEPKPYRPKPGNKRPLSALYRLESKEPFLSVGGYVFDYDYYRDDFYNRLFDYHGRVPPPPRAVIPLKRPRVAVTTTRRGKGVFSMKGGSRSTASGSTGSKLKSDELQTIKKELTQIKTKIDSLLGRLEKIEKQQKAEAEAQKKQLEESLVLIQEECVSEIADHSTEEPAEGGPDADGEEMTDGIEEDFDEDGGHELFLQIK

SEQ ID NO: 5426 - DNA, 1687 bp, Homo sapiens
agtgagcaacagtcttactgcaaagcaggagcacaacccgtctctttgtctccgtggtcaaatcaattacttcttagaaagtctaatttttttcaaaatgaccatgtacaagagcaaacgcagacatcagagatatatcaacatggcaggagagcccaaaccatacagaccaaaacctggaaacaagaggcccctttctgcactttacagacttgaatcaaaggaacctttcctgtctgttggcggttatgtctttgactatgattactacagagatgatttctacaatcggttatttgattaccacgggcgtgtgcctccacctccccgtgcagtaattccgctgaagcgtcccagagtggcagtcacaacgactcgcagggggaaaggagtcttttccatgaaaggtggatcgagatctactgccagtgggtcaacaggttctaaattgaaatcagatgagttacagaccatcaagaaagaattaacccagatcaaaactaaaattgactccttgctagggcgcctggagaagattgagaaacagcagaaggcggaggcagaagctcagaagaagcaattggaagagagtctagtgctgatccaagaggaatgtgtgtcagagattgcagatcactctacagaggagcctgctgaaggagggccagatgccgatggagaagagatgacagatgggatagaggaggacttcgatgaagatgggggtcatgagctgtttctacagataaagtgatctgaaataacgcatgatgccacaaagcagaaaagagaaactgtgacaacccccagaaatgtgaaaggaggtttcttactggacagcagcatctttggttcaatttatataaaaacccaaataaataaaatggacagtattgctcagttttagaaattccatttcttctatgttttaagctgtacaattgtcaggtttttatggtttaaattgtaaatgtgttttcccctttgctaattatgttttttttttcagtcttaaaatgtgaaaggcatttatgaatggtaagggaaacactatatacaaatgtatatttgtaaaagctatttttatgattagcatgtttcactgttgatcatatataaagtcaggtgatattgcaattctgtatttaaagcttatttccaacaatgtcatgtaagaaaagatgcatcttatgctagtttttataatttatttataatttatagtttaaagtacttcagatcataatgataaaatacttgaaaaagttatatttctgccctgtataagcaccctttttattaataaagaatgcagatatttcagatgtgatataatagttaaagaactgttggtttgatctgtgattaagttgagcatgctccgctctactgaactaaatgatccaattattacttcagtctgggtatgagattccatggacaagtaaggactagattgccaaggaaaagactgtcttgcccttggatccaaaagtttaaattagtgcatacatcatgtcatttcacctcctgttcctaggaactctccattcccaagcattgccagtgttttccagataatcttagctgttgtcttgtgctgtggaaatggaagaaaccatcttcacagaccgtaggagaattcaacatataatttcttaataaatactgtttcttttaaaacaaa

SEQ ID NO: 5427 - protein, 218 aa, Homo sapiens
MTMYKSKRRHQRYINMAGEPKPYRPKPGNKRPLSALYRLESKEPFLSVGGYVFDYDYYRDDFYNRLFDYHGRVPPPPRAVIPLKRPRVAVTTTRRGKGVFSMKGGSRSTASGSTGSKLKSDELQTIKKELTQIKTKIDSLLGRLEKIEKQQKAEAEAQKKQLEESLVLIQEECVSEIADHSTEEPAEGGPDADGEEMTDGIEEDFDEDGGHELFLQIK

SEQ ID NO: 5428 - DNA, 588 bp, Homo sapiens; identical to SEQ ID NO: 734

SEQ ID NO: 5429 - protein, 101 aa, Homo sapiens; identical to SEQ ID NO: 735

SEQ ID NO: 5430 - DNA, 289 bp, Homo sapiens
agacttcagaagaactgacccaaggacaaaggtccacccaggccatggaagaggctcctcaaccgtttgggtgcctggctacttcaagagttgagctaatcacagggaagattcagtctcagttcagctgcctcatttgatcagctcaagactgagtccaacaaaagtggtctgtctaatgaaactcattttcattttttctcattagtctatacacgattgagactgtagaacgacaaaagaataaaaagaagaatgacaattaaaaatcattttctctggcccttga

SEQ ID NO: 5431 - protein, 31 aa, Homo sapiens
MEEAPQPFGCLATSRVELITGKIQSQFSCLI

SEQ ID NO: 5432 - DNA, 798 bp, Homo sapiens
gtgcatgaaggcttcttagatgaagagtaatggggatgtcttacacagcaagatgagaaaacacagaccacttggctctctagcgaggaccagaatttgagtcaaaattatatgcatgtcccagcaaagcttcgcaaagatgtcagtattaattgtcaccatcctccagggagaaagcaacagcccacaattgcctgcattttctttcctcttcaaaaccacttctgctccaaagaccatgaacctgaactgaagaaacgactccttcctgctggtgtgagataattcagtctccatgatgtcttaatcctgggcctcccttaattgacttctaactgtgctgaactgtggctgctaggagttgcaatgtggatcgcaatttacaaggaagagaaaaagaccggtctctgtttggaaattacaaacatagaagaacttagaaacaatgggtttctagattgggtggaaggactggcttgggatcctgagagagcaagaaaagtttaccgggagcttcagaaaaagttattcatcatttttggagtggatattcagaagtgacttccctcttttgctctggtgcctggctacttcaagagttgagctaatcacagggaagattcagtctcagttcagctgcctcatttgatcagctcaagactgagtccaacaaaagtggtctgtctaatgaaactcattttcattttttctcattagtctatacacgattgagactgtagaacgacaaaagaataaaaagaagaatgacaattaaaaatcattttctctggcccttga

SEQ ID NO: 5433 - protein, 64 aa, Homo sapiens
MWIAIYKEEKKTGLCLEITNIEELRNNGFLDWVEGLAWDPERARKVYRELQKKLFIIFGVDIQK

SEQ ID NO: 5434 - DNA, 1951 bp, Homo sapiens
aggtctttgccccgcctctcggccccgcggcctggccggcaagcagggctgcagtcacggggcggcgcggagggccccagcccagtcaggggtgtggccgccgccaccgtaaggctaggccgcgagcttagtcctgggagccgcctccgtcgccgccgtcagagccgccctatcagattatcttaacaagaaaaccaactggaaaaaaaaatgaaattccttatcttcgcatttttcggtggtgttcaccttttatccctgtgctctgggaaagctatatgcaagaatggcatctctaagaggacttttgaagaaataaaagaagaaatagccagctgtggagatgttgctaaagcaatcatcaacctagctgtttatggtaaagcccagaacagatcctatgagcgattggcacttctggttgatactgttggacccagactgagtggctccaagaacctagaaaaagccatccaaattatgtaccaaaacctgcagcaagatgggctggagaaagttcacctggagccagtgagaataccccactgggagaggggagaagaatcagctgtgatgctggagccaagaattcataagatagccatcctgggtcttggcagcagcattgggactcctccagaaggcattacagcagaagttctggtggtgacctctttcgatgaactgcagagaagggcctcagaagcaagagggaagattgttgtttataaccaaccttacatcaactactcaaggacggtgcaataccgaacgcagggggcggtggaagctgccaaggtgggggctttggcatctctcattcgatccgtggcctccttctccatctacagtcctcacacaggtattcaggaataccaggatggcgtgcccaagattccaacagcctgtattacggtggaagatgcagaaatgatgtcaagaatggcttctcatgggatcaaaattgtcattcagctaaagatgggggcaaagacctacccagatactgattccttcaacactgtagcagagatcactgggagcaaatatccagaacaggttgtactggtcagtggacatctggacagctgggatgttgggcagggtgccatggatgatggcggtggagcctttatatcatgggaagcactctcacttattaaagatcttgggctgcgtccaaagaggactctgcggctggtgctctggactgcagaagaacaaggtggagttggtgccttccagtattatcagttacacaaggtaaatatttccaactacagtctggtgatggagtctgacgcaggaaccttcttacccactgggctgcaattcactggcagtgaaaaggccagggccatcatggaggaggttatgagcctgctgcagcccctcaatatcactcaggtcctgagccatggagaagggacagacatcaacttttggatccaagctggagtgcctggagccagtctacttgatgacttatacaagtatttcttcttccatcactcccacggagacaccatgactgtcatggatccaaagcagatgaatgttgctgctgctgtttgggctgttgtttcttatgttgttgcagacatggaagaaatgctgcctaggtcctagaaacagtaagaaagaaacgttttcatgcttctggccaggaatcctgggtctgcaactttggaaaactcctcttcacataacaatttcatccaattcatcttcaaagcacaactctatttcatgctttctgttattatctttcttgatactttccaaattctctgattctagaaaaaggaatcattctcccctccctcccaccacatagaatcaacatatggtagggattacagtgggggcatttctttatatcacctcttaaaaacattgtttccactttaaaagtaaacacttaataaatttttggaagatctctgatttt

SEQ ID NO: 5435 - protein, 472 aa, Homo sapiens; identical to SEQ ID NO: 737

SEQ ID NO: 5436 - DNA, 747 bp, Homo sapiens
aaaaaaaaatgaaattccttatcttcgcatttttcggtggtgttcaccttttatccctgtgctctgggaaagctatatgcaagaatggcatctctaagaggacttttgaagaaataaaagaagaaatagccagctgtggagatgttgctaaagcaatcatcaacctagctgtttatggtaaagcccagaacagatcctatgagcgattggcacttctggttgatactgttggacccagactgagtggctccaagaacctagaaaaagccatccaaattatgtaccaaaacctgcagcaagatgggctggagaaagttcacctggagccagtgagaataccccactgggagaggggagaagaatcagcttttgggctgttgtttcttatgttgttgcagacatggaagaaatgctgcctaggtcctagaaacagtaagaaagaaacgttttcatgcttctggccaggaatcctgggtctgcaactttggaaaactcctcttcacataacaatttcatccaattcatcttcaaagcacaactctatttcatgctttctgttattatctttcttgatactttccaaattctctgattctagaaaaaggaatcattctcccctccctcccaccacatagaatcaacatatggtagggattacagtgggggcatttctttatatcacctcttaaaaacattgtttccactttaaaagtaaacacttaataaatttttggaagatctctgatt

SEQ ID NO: 5437 - protein, 208 aa, Homo sapiens
MKFLIFAFFGGVHLLSLCSGKAICKNGISKRTFEEIKEEIASCGDVAKAIINLAVYGKAQNRSYERLALLVDTVGPRLSGSKNLEKAIQIMYQNLQQDGLEKVHLEPVRIPHWERGEESAFGLLFLMLLQTWKKCCLGPRNSKKETFSCFWPGILGLQLWKTPLHITISSNSSSKHNSISCFLLLSFLILSKFSDSRKRNHSPLPPTT

SEQ ID NO: 5438 - DNA, 2218 bp, Homo sapiens
gaataacttttacaaataaccagcaggaaccggggagtcggtggtgggggcacgcatgagtttcctttcctctgaagccttggttctttaaattggcagcataaccactgttcccgtgcacacacggatatttgaaggcatcagtgaaaaggatgcagggtaaacatgaagcagaggacacggtgggttggcagatgtgggctgggtcctggaagctcacatggacctggaagtttattccatcctgagttctcgtcgtggctctgtgtgttctgcttctctgggaatctcgggcagttggagtctttctgtacacttctcagtgcctggctgtgtggggtagaagcaagtatttgtgaaactcgggccaaggtattatcattttccatctgtgctaccatgtgaaaaaggttgggaaactctactggaaactgacctcgctcttgggacccaccctgccaggcaaaaggggacacctgaggaaagagtttggaaaagagacagtggtcagaaaagaactgacaggattttccagtgtctagaaatgcactgcttgaagagcagcagaatatattacactggagaagagaagactgtaaggggctagatgcttcatctgcaagaagagtagacttgccctgaaggaataatcaggccagtgagaaagagcatatgcacatagatttgagctcagtaaagaataaacctgagcagtcccacaagggaacagtactccccagaggataagctgccaaatatgggcagtgttcaagcagaggtgcaaggaacacctgccaggtaaacaatggacacctgccctgaggaggccgtgagatagatcatctccaaagacaccatcaacctctatgaaaaggaaggatgggcttattatgaccactattcagagagaagaaactcttaatgttttcctgtgatattagtattgttttctagtgcaaattcctatcatcatgctgctcttcaactggaaccaaaacaaaaatttaacattatattatactactaataaaattaatgattaaggaaatctgccatcctaaacagaaccttttatgacttaaaatttgccttcctgaattggagctatgctgtattgacaacttccattggaaccctggcacatacagtaggaaggcataataactaagatccctatcaataccagcttttaggggagaactccatactttatagtgtcctttgataatccatgatggactgttatttctacatttgcctgttttcacatttattttttatgttttgattctacagatggaaagttccacaaaattatcatccactgtgtaaaacagtacttcattttatctcaactaaaattactttcttaagtatgaaatacataacaatcataattttgtagacatttctaaataagacttttttctctatttgcaggctaaagattgctataccccttataatagtctcatcatgccattttggtggttccttctgaaactttcttgaattccactagattttggagatgtagcaagcaaaactatgatatatcctatacatttttttgtatgttatatataaactgtaagaaccttcttgacagctcccaagatttactcaatctttttaattgcatagagctacagacattaggaaacctacaatgattctagattcctttgcaggctcctacaatcacaccctatcaaagctagaatgactttaggagattgtggccaacattctacttttccacagagaaggaatgtttgcccaagtggcagggcctgaaaatagaagccagagagtttgacccagagctgaggactatttcaatcatatccctctgtatgcttcactaaagatggggcagaagctacttttgactgctttttttctaatgcatgaccttttatttgagtatgctaaaaattaatctgccagtttttgcttactcacatggcataatgggtgctttcaataatttctcactaccaccttgacatgagcaagttacttaatctctctaacctttgtttctctctctgtaaagtgggaatgataatacgaacctacccttaaaaagtgtgttgtaagaaataaatgagatgacttgtttatcatgatcatattccgggcacatagtgtaaactctttaaattgtttccattactgattatgcataattattgtaagatgacctcaaacattc

SEQ ID NO: 5439 - protein, 79 aa, Homo sapiens
MKQRTRWVGRCGLGPGSSHGPGSLFHPEFSSWLCVFCFSGNLGQLESFCTLLSAWLCGVEASICETRAKVLSFSICATM

SEQ ID NO: 5440 - DNA, 945 bp, Homo sapiens
gctgaaggaaggcaagggctgaaacggagacaggatgctactgcagtactccacgtgaaggctggtggtcgcttggactgagtcagaacagggaaactgatgggaagttgtcggagagaggatgagaaaaccagccaagaaaaatgagaaggatcatccagtaaagcataaaaagagccaagagtctgaggttccagaagccaaggcaagaatgcatttccaggagtaaacaaatgtcaagtgcagctccatcacaggtaaatatttccaactacagtctggtgatggagtctgacgcaggaaccttcttacccactgggctgcaattcactggcagtgaaaaggccagggccatcatggaggaggttatgagcctgctgcagcccctcaatatcactcaggtcctgagccatggagaagggacagacatcaacttttggatccaagctggagtgcctggagccagtctacttgatgacttatacaagtatttcttcttccatcactcccacggagacaccatgactgtcatggatccaaagcagatgaatgttgctgctgctgtttgggctgttgtttcttatgttgttgcagacatggaagaaatgctgcctaggtcctagaaacagtaagaaagaaacgttttcatgcttctggccaggaatcctgggtctgcaactttggaaaactcctcttcacataacaatttcatccaattcatcttcaaagcacaactctatttcatgctttctgttattatctttcttgatactttccaaattctctgattctagaaaaaggaatcattctcccctccctcccaccacatagaatcaacatatggtagggattacagtgggggcatttctttatatcacctcttaaaaacattgtttccactttaaaagtaaacacttaataaatttttggaagatctctgatttt

SEQ ID NO: 5441 - protein, 129 aa, Homo sapiens [sequence omitted]

SEQ ID NO: 5442 - DNA, 804 bp, Homo sapiens
ctgaaggaaggcaagggctgaaacggagacaggatgctactgcagtactccacgtgaaggctggtggtcgcttggactgagtcagaacagggaaactgatgggaagttgtcggagagtaaatatttccaactacagtctggtgatggagtctgacgcaggaaccttcttacccactgggctgcaattcactggcagtgaaaaggccagggccatcatggaggaggttatgagcctgctgcagcccctcaatatcactcaggtcctgagccatggagaagggacagacatcaacttttggatccaagctggagtgcctggagccagtctacttgatgacttatacaagtatttcttcttccatcactcccacggagacaccatgactgtcatggatccaaagcagatgaatgttgctgctgctgtttgggctgttgtttcttatgttgttgcagacatggaagaaatgctgcctaggtcctagaaacagtaagaaagaaacgttttcatgcttctggccaggaatcctgggtctgcaactttggaaaactcctcttcacataacaatttcatccaattcatcttcaaagcacaactctatttcatgctttctgttattatctttcttgatactttccaaattctctgattctagaaaaaggaatcattctcccctccctcccaccacatagaatcaacatatggtagggattacagtgggggcatttctttatatcacctcttaaaaacattgtttccactttaaaagtaaacacttaataaatttttggaagatctctgatttt

SEQ ID NO: 5443 - protein, 127 aa, Homo sapiens
MGSCRRVNISNYSLVMESDAGTFLPTGLQFTGSEKARAIMEEVMSLLQPLNITQVLSHGEGTDINFWIQAGVPGASLLDDLYKYFFFHHSHGDTMTVMDPKQMNVAAAVWAVVSYVVADMEEMLPRS

SEQ ID NO: 5444 - DNA, 551 bp, Homo sapiens
aaggaagtcaccggggaggggatggtgagatgacgcactaaagtaaaactccttgtttgtaaaaggagccagtctacttgatgacttatacaagtatttcttcttccatcactcccacggagacaccatgactgtcatggatccaaagcagatgaatgttgctgctgctgtttgggctgttgtttcttatgttgttgcagacatggaagaaatgctgcctaggtcctagaaacagtaagaaagaaacgttttcatgcttctggccaggaatcctgggtctgcaactttggaaaactcctcttcacataacaatttcatccaattcatcttcaaagcacaactctatttcatgctttctgttattatctttcttgatactttccaaattctctgattctagaaaaaggaatcattctcccctccctcccaccacatagaatcaacatatggtagggattacagtgggggcatttctttatatcacctcttaaaaacattgtttccactttaaaagtaaacacttaataaatttttggaagatctctgatttt

SEQ ID NO: 5445 - protein, 93 aa, Homo sapiens
MLLLLFGLLFLMLLQTWKKCCLGPRNSKKETFSCFWPGILGLQLWKTPLHITISSNSSSKHNSISCFLLLSFLILSKFSDSRKRNHSPLPPTT

SEQ ID NO: 5446 - DNA, 3007 bp, Homo sapiens
ccctccacccaccaagtagcgagtcattcaatctgtacacctcctgggctgggaatcgcaattgcgaagttgggaggcggggtgacaacgtttgggaagggccagggcgaccggcagtgtgcacagggactgtgtcgggcttggacctcacctgatcctctctcttagcgcgacccttcctctgctccctgtctcctctttctgccacttgtgcgctgcttccgcgcactcccggctccctagcggcaggaggaggaaggcgcacagcgggtggagagggtgcgccaaggagaggtaaccccttcgggagcccggggaatcccggccgccaccaggggccgtgccaccgccctcgcgggaccaaagcttccggcgtgtccccaactttgtggcgccctcaggccgcggcgactgggttagagatgccttccagcggcagagcgctgctggactcgccgctggacagcggctccctgacctccctggactctagtgtcttctgcagcgagggtgaaggggagcccttggcgctcggggactgcttcacggtcaacgtgggcggcagccgcttcgtgctctcgcagcaggcgctgtcctgcttcccgcacacgcgccttggcaagctggccgtggtggtggcttcctaccgccgccccggggccctggccgccgtgcccagccctctggagctttgcgacgatgccaaccccgtggacaacgagtacttcttcgaccgcagctcgcaggcgttccgatatgtcctgcactactaccgcaccggccgcctgcatgtcatggagcagctgtgcgcgctctccttcctgcaggagatccagtactggggcatcgatgagctcagcatcgattcctgctgcagggacagatacttcagaaggaaagagctgagtgaaactttagacttcaagaaggacacagaagaccaggaaagtcaacatgagagtgaacaggacttctcccaaggaccttgtcccactgttcgccagaagctctggaatatcctggagaaacctggatcttccacagctgcccgtatctttggcgtcatctccattatcttcgtggtggtgtccatcattaacatggccctgatgtcagctgagttaagctggctggacctgcagctgctggaaatcctggagtatgtgtgcattagctggttcaccggggagtttgtcctccgcttcctgtgtgtgcgggacaggtgtcgcttcctaagaaaggtgccaaacatcatagacctccttgccatcttgcccttctacatcactcttctggtagagagcctaagtgggagccagaccacgcaggagctggagaacgtggggcgcattgtccaggtgttgaggctgctcagggctctgcgcatgctaaagctgggcagacattccacaggattacgctcccttgggatgacaatcacccagtgttacgaagaagtcggcctactgctcctatttctatccgtgggaatctctatattttcaactgtagaatactttgctgagcaaagcattcctgacacaaccttcacaagtgtcccttgtgcatggtggtgggccaccacctctatgactactgtgggatatggggacattagaccagacaccaccacaggcaaaatcgtggccttcatgtgtatattatcgggaattcttgtcttggccttgcctattgctattattaacgatcgcttctctgcttgctacttcaccttgaaactcaaggaagcagctgttagacagcgtgaagccctaaagaagcttaccaagaatatagccactgactcatatatcagtgttaacttgagagatgtctatgcccggagtatcatggagatgctgcgactgaaaggcagagaaagagcaagtactaggagcagcgggggagatgatttctggttttgaattaattttcaatttatttacaaaagctatgtacaattaactaaaatgataaagcagtgatgtggatttctgtattctgatgatgagtctcttcagagtactgctcatcttaattaatttttgctgatatattgcttcatctactagaatatttcacatcacctataacaactgcacagtgttctgacacatttgagtgtccaaaatagccaattaacacaaccaaatacaactgggccaatataaacatgtttgaattgtcaaatataaaataatgttattgcaatacatacaaaaaagttaaagattttatgtatcactaacattagaagttttttgcaccactaattttttaaaaatggaaggtaaactgcatagcccagagaaagataagtaaatatttaagaacatattgaacaactttgctatttaaagatattatccaagtacataaattactccgttctctatcagttaaagctattgaatataatacttagctttacaagagaaaacccatatttgatgggcagagattatatccctatcttctttttcatgtaaaccactggtcacaaatgaactgatctctgtatcccattattactataagaggtgggaatcccaaaactgcttagattgcagtacatgagtctacacaaagacttcaacaattgcacatcttcattctcccaactgagtgtagtatgtggagcataaaacagcatatttcttagtatttcatgaatatcagatggtctttaaatgtctctttatggatgtattgttcacattatggctttaaaataatgaatatgtaaaagtgaggtagtgaacatcctaaatttctacactggaattactaaataatcttatttcataaaatgggaaatatatgttaaatgacatcactggatgaacttgaagatcttttacttgttaacaaaaaaatactatggacagctttctgattgttggggtaaatagcaaatgttcaaactttgcaggcattttgacattcatcataacaacacaattcctagacattgtattatataattaaagccaaaacctctaaagct

SEQ ID NO: 5447 - protein, 500 aa, Homo sapiens; identical to SEQ ID NO: 739

SEQ ID NO: 5448 - DNA, 1998 bp, Homo sapiens
ccctccacccaccaagtagcgagtcattcaatctgtacacctcctgggctgggaatcgcaattgcgaagttgggaggcggggtgacaacgtttgggaagggccagggcgaccggcagtgtgcacagggactgtgtcgggcttggacctcacctgatcctctctcttagcgcgacccttcctctgctccctgtctcctctttctgccacttgtgcgctgcttccgcgcactcccggctccctagcggcaggaggaggaaggcgcacagcgggtggagagggtgcgccaaggagaggtaaccccttcgggagcccggggaatcccggccgccaccaggggccgtgccaccgccctcgcgggaccaaagcttccggcgtgtccccaactttgtggcgccctcaggccgcggcgactgggttagagatgccttccagcggcagagcgctgctggactcgccgctggacagcggctccctgacctccctggactctagtgtcttctgcagcgagggtgaaggggagcccttggcgctcggggactgcttcacggtcaacgtgggcggcagccgcttcgtgctctcgcagcaggcgctgtcctgcttcccgcacacgcgccttggcaagctggccgtggtggtggcttcctaccgccgccccggggccctggccgccgtgcccagccctctggagctttgcgacgatgccaaccccgtggacaacgagtacttcttcgaccgcagctcgcaggcgttccgatatgtcctgcactactaccgcaccggccgcctgcatgtcatggagcagctgtgcgcgctctccttcctgcaggagatccagtactggggcatcgatgagctcagcatcgattcctgctgcagggacagatacttcagaaggaaagagctgagtgaaactttagacttcaagaaggacacagaagaccaggaaagtcaacatgagagtgaacaggacttctcccaaggaccttgtcccactgttcgccagaagctctggaatatcctggagaaacctggatcttccacagctgcccgtatctttggcgtcatctccattatcttcgtggtggtgtccatcattaacatggccctgatgtcagctgagttaagctggctggacctgcagctgctggaaatcctggagtatgtgtgcattagctggttcaccggggagtttgtcctccgcttcctgtgtgtgcgggacaggtgtcgcttcctaagaaaggtgccaaacatcatagacctccttgccatcttgcccttctacatcactcttctggtagagagcctaagtgggagccagaccacgcaggagctggagaacgtggggcgcattgtccaggtgttgaggctgctcagggctctgcgcatgctaaagctgggcagacattccacaggattacgctcccttgggatgacaatcacccagtgttacgaagaagtcggcctactgctcctatttctatccgtgggaatctctatattttcaactgtagaatactttgctgagcaaagcattcctgacacaaccttcacaagtgtcccttgtgcatggtggtgggccaccacctctatgactactgtgggatatggggacattagaccagacaccaccacaggcaaaatcgtggccttcatgtgtatattatcgggaattcttgtcttggccttgcctattgctattattaacgatcgcttctctgcttgctacttcaccttgaaactcaaggaagcagctgttagacagcgtgaagccctaaagaagcttaccaagaatatagccactgactcatatatcagtgttaacttgagagatgtctatgcccggagtatcatggagatgctgcgactgaaaggcagagaaagagcaagtactaggagcagcgggggagatgatttctggttttgaattaattttcaatttatttacaaaagctatgtacaattaactaaaatgataaagcagtgatgtggatttctgt

SEQ ID NO: 5449 - protein, 500 aa, Homo sapiens; identical to SEQ ID NO: 739

SEQ ID NO: 5450 - DNA, 1210 bp, Homo sapiens
agtttccctcctggaccggtcgagtcagacctcacgtgtagactaagaggatcaaaagaagagtacgttacctgcggcgccggttgtgcgcagaccagatgtgccgggagctgcaggaggtcagaacctaagggagacggcggaagaaaatggagcgtcagtgatcatcagactagaatgagagtgaattgggagaaaatggtgcggccccctcacccagagaaccctcccccacctgctcacacccccagcgaacaccccgggggaggcctatgaagcagcagtaaaagaaaagggaggaatataaattctcaagttggaagggacccggttaccacttcctttgctttctgaactttttgttttggtctcctgcgggcaggagtgagtctcgccatcccccttgcttgcttgcttgcttgcgttcagctaagagtcatcttctctcctcttcctcctcctccgccccacatctccctccttcctcccttccccaacccctccacccaccaagtagcgagtcattcaatctgtacacctcctgggctgggaatcgcaattgcgaagttgggaggcggggtgacaacgtttgggaagggccagggcgaccggcagtgtgcacagggactgtgtcgggcttggacctcacctgatcctctctcttagcgcgacccttcctctgctccctgtctcctctttctgccacttgtgcgctgcttccgcgcactcccggctccctagcggcaggaggaggaaggcgcacagcgggtggagagggtgcgccaaggagaggtaaccccttcgggagcccggggaatcccggccgccaccaggggccgtgccaccgccctcgcgggaccaaagcttccggcgtgtccccaactttgtggcgccctcaggccgcggcgactgggttagagatgccttccagcggcagagcgctgctggactcgccgctggacagcggctccctgacctccctggactctagtgtcttctgcagcgagggtgaaggggagcccttggcgctcggggactgcttcacggtcaacgtgggcggcagccgcttcgtgctctcgcagcaggcgctgtcctgcttcccgcacacgcgccttggcaagctggccgtggtggtggcttcctaccgccgccccggggccctggccgccgtgcccagccctctggagctttgcgacgatgccaaccccgt

SEQ ID NO: 5451 - protein, 95 aa, Homo sapiens
MPSSGRALLDSPLDSGSLTSLDSSVFCSEGEGEPLALGDCFTVNVGGSRFVLSQQALSCFPHTRLGKLAVVVASYRRPGALAAVPSPLELCDDAN

SEQ ID NO: 5452 - DNA, 631 bp, Homo sapiens
gaccggtcgagtcagacctcacgtgtagactaagaggatcaaaagaagagtacgttacctgcggcgccggttgtgcgcagaccagatgtgccgggagctgcaggaggtcagaacctaagggagacggcggaagaaaatggagcgtcagtgatcatcagactagaatgagagtgaattgggagaaaatggtgcggccccctcacccagagaaccctcccccacctgctcacacccccagcgaacaccccgggggaggcctatgaagcagcagtaaaagaaaagggaggaatataaattctcaagttggaagggacccggttaccacttcctttgctttctgaactttttgttttggtctcctgcgggcaggagtgagtctcgccatcccccttgcttgcttgcttgcttgcgttcagctaagagtcatctcacctgatcctctctcttagcgcgacccttcctctgctccctgtctcctctttctgccacttgtgcgctgcttccgcgcactcccggctccctagcggcaggaggaggaaggcgcacagcgggtggagagggtgcgccaaggagaggtaaccccttcgggagcccggggaatcccggccgccaccaggggccgtgccaccgc

SEQ ID NO: 5453 - protein, 32 aa, Homo sapiens
MRVNWEKMVRPPHPENPPPPAHTPSEHPGGGL

SEQ ID NO: 5454 - DNA, 10155 bp, Homo sapiens
aatagtgttggtgtcttgaaactgacgtaatgcgcggagactgaggtcctgacaagcgataacatttctgataaagacccgatcttactgcaatctctagcgtcctcttttttggtgctgctggtttctccagacctcgcgtcctctcgattgctctctcgccttcctatttcttttttttttttttaaacaaaaaacaacaccccctcccctctcccacccggcaccgggcacatccttgctctatttcctttctctttctctctctctctctctctctctcttttttaataagggtgggggagggaaaggggggggatgcaggaaagacctttttctctcccccccgcaataatccaagatcaactctgcaaacaacagaagacggttcatggctttggccgccgcgccaccatctttcgggctgccgagggtgttcttgacgattaatcaacagatatggtccggaaaaagaacccccctctgagaaacgttgcaagtgaaggcgagggccagatcctggagcctataggtacagaaagcaaggtatctggaaagaacaaagaattttctgcagatcagatgtcagaaaatacggatcagagtgatgctgcagaactaaatcataaggaggaacatagcttgcatgttcaagatccatcttctagcagtaagaaggacttgaaaagcgcagttctgagtgagaaggctggcttcaattatgaaagccccagtaagggaggaaactttccctcctttccgcatgatgaggtgacagacagaaatatgttggctttctcatctccagctgctgggggagtctgtgagcccttgaagtctccgcaaagagcagaggcagatgaccctcaagatatggcctgcaccccctcaggggactcactggagacaaaggaagatcagaagatgtcaccaaaggctacagaggaaacagggcaagcacagagtggtcaagccaattgtcaaggtttgagcccagtttcagtggcctcaaaaaacccacaagtgccttcagatgggggtgtaagactgaataaatccaaaactgacttactggtgaatgacaacccagacccggcacctctgtctccagagcttcaggactttaaatgcaatatctgtggatatggttactacggcaacgaccccacagatctgattaagcacttccgaaagtatcacttaggactgcataaccgcaccaggcaagatgctgagctggacagcaaaatcttggcccttcataacatggtgcagttcagccattccaaagacttccagaaggtcaaccgttctgtgttttctggtgtgctgcaggacatcaattcttcaaggcctgttttactaaatgggacctatgatgtgcaggtgacttcaggtggaacattcattggcattggacggaaaacaccagattgccaagggaacaccaagtatttccgctgtaaattctgcaatttcacttatatgggcaactcatccaccgaattagaacaacattttcttcagactcacccaaacaaaataaaagcttctctcccctcctctgaggttgcaaaaccttcagagaaaaactctaacaagtccatccctgcacttcaatccagtgattctggagacttgggaaaatggcaggacaagataacagtcaaagcaggagatgacactcctgttgggtactcagtgcccataaagcccctcgattcctctagacaaaatggtacagaggccaccagttactactggtgtaaattttgtagtttcagctgtgagtcatctagctcacttaaactgctagaacattatggcaagcagcacggagcagtgcagtcaggcggccttaatccagagttaaatgataagctttccaggggctctgtcattaatcagaatgatctagccaaaagttcagaaggagagacaatgaccaagacagacaagagctcgagtggggctaaaaagaaggacttctccagcaagggagccgaggataatatggtaacgagctataattgtcagttctgtgacttccgatattccaaaagccatggccctgatgtaattgtagtggggccacttctccgtcattatcaacagctccataacattcacaagtgtaccattaaacactgtccattctgtcccagaggactttgcagcccagaaaagcaccttggagaaattacttatccgtttgcttgtagaaaaagtaattgttcccactgtgcactcttgcttctgcacttgtctcctggggcggctggaagctcgcgagtcaaacatcagtgccatcagtgttcattcaccacccctgacgtagatgtactcctctttcactatgaaagtgtgcatgagtcccaagcatcggatgtcaaacaagaagcaaatcacctgcaaggatcggatgggcagcagtctgtcaaggaaagcaaagaacactcatgtaccaaatgtgattttattacccaagtggaagaagagatttcccgacactacaggagagcacacagctgctacaaatgccgtcagtgcagttttacagctgccgatactcagtcactactggagcacttcaacactgttcactgccaggaacaggacatcactacagccaacggcgaagaggacggtcatgccatatccaccatcaaagaggagcccaaaattgacttcagggtctacaatctgctaactccagactctaaaatgggagagccagtttctgagagtgtggtgaagagagagaagctggaagagaaggacgggctcaaagagaaagtttggaccgagagttccagtgatgaccttcgcaatgtgacttggagaggggcagacatcctgcgggggagtccgtcatacacccaagcaagcctggggctgctgacgcctgtgtctggcacccaagagcagacaaagactctaagggatagtcccaatgtggaggccgcccatctggcgcgacctatttatggcttggctgtggaaaccaagggattcctgcagggggcgccagctggcggagagaagtctggggccctcccccagcagtatcctgcatcgggagaaaacaagtccaaggatgaatcccagtccctgttacggaggcgtagaggctccggtgttttttgtgccaattgcctgaccacaaagacctctctctggcgaaagaatgcaaatggcggatatgtatgcaacgcgtgtggcctctaccagaagcttcactcgactcccaggcctttaaacatcattaaacaaaacaacggtgagcagattattaggaggagaacaagaaagcgccttaacccagaggcacttcaggctgagcagctcaacaaacagcagaggggcagcaatgaggagcaagtcaatggaagcccgttagagaggaggtcagaagatcatctaactgaaagtcaccagagagaaattccactccccagcctaagtaaatacgaagcccagggttcattgactaaaagccattctgctcagcagccagtcctggtcagccaaactctggatattcacaaaaggatgcaacctttgcacattcagataaaaagtcctcaggaaagtactggagatccaggaaatagttcatccgtatctgaagggaaaggaagttctgagagaggcagtcctatagaaaagtacatgagacctgcgaaacacccaaattattcaccaccaggcagccctattgaaaagtaccagtacccactttttggacttccctttgtacataatgacttccagagtgaagctgattggctgcggttctggagtaaatataagctctccgttcctgggaatccgcactacttgagtcacgtgcctggcctaccaaatccttgccaaaactatgtgccttatcccaccttcaatctgcctcctcatttttcagctgttggatcagacaatgacattcctctagatttggcgatcaagcattccagacctgggccaactgcaaacggtgcctccaaggagaaaacgaaggcaccaccaaatgtaaaaaatgaaggtcccttgaatgtagtaaaaacagagaaagttgatagaagtactcaagatgaactttcaacaaaatgtgtgcactgtggcattgtctttctggatgaagtgatgtatgctttgcatatgagttgccatggtgacagtggacctttccagtgcagcatatgccagcatctttgcacggacaaatatgacttcacaacacatatccagaggggcctgcataggaacaatgcacaagtggaaaaaaatggaaaacctaaagagtaaaaccttagcacttagcacaattaaatagaaataggttttcttgatgggaattcaatagcttgtaatgtcttatgaagacctattaaaaaaatacttcatagagcctgccttatccaacatgaaattcccttcttttgttattctttcttttgatgagtaggttaccaagattaaaaagtgagataaatggtcaatgagaaagaatggaagatggtaaacaatcactttttaaaacctgttaagtcaaaaccatcttggctaatatgtactggggaaataatccataagagatatcaccagactagaattaatatatttataaagaaagagaccaaaactgtctagaatttgaaagggtttacatattattatactaaagcagtactggactggccattggaccatttgttccaaaacccataaattgttgcctaaatttataatgatcatgaaaccctaggcagaggaggagaaattgaaggtccagggcaatgaaagaaaaatggcgccctctcaatttagtcttctctcattggccatgtttcagattttgacctagaaatgcgagctgtggttaggcttggttagagtgcagcaagcaacatgacagatggtggcacgctgtttttacccagccctgcctgtacatacacatgcacaccctctctgatatttttgtcctttagatgttcaaatactcagtagtccttttgtttgcggtttagattcattttgtccacacatgtacccattttaaaaaacaatgtcctcgatgcttctgtagtgatttcattttagccaggtatttctttcttgtgtgtgatgaaccagtatggatttgcttttctaagcctcctgttggttactaatctcacttggcacattataactaaaggaatcccctcaattcaaaagcatagatggatacaaatgtcagaccgtgggtttaatttgtttagaacacatggcatttcttcacaaggtaacctgctgtatttatttattttcttttggttaaatataatttccaaactttgtggtcaggcagcgtctaaggttacgttaccacagactgacagttggtatatgtaccagccaatcccttcattaaatgtatacagatttagttaagtagcattaaataggattcttagaagtatgtcctcatagaacttttaatacttaaggctttgtaaaaactatccatgaagggaaagctcctcagcataactgctcagggaaatagggctaaataactgaacattaaataattggttaaaggtgctgttagtcgagcctcaatgcttgctacaaggatgtatgtacaaggactgactttaataatttgcattatattgtcccaaccagtagtttattttttgccacggagatgtagaagatattacaagctactggatgcactgtcagattaacttatttcattaaagaagttgggagaacaaataggaaaaaaaaaacttatttttctagtaaatattaatgtattacatttcaaataatggtgcctgacatattgaataattattttctacagtgtacgtatgcaacaaagatattccatcatgcattagagtcagttctggctctgcctagctgtttacatttgcaaatgtagcaaacaaggtaatgaagcaactatttctattgcagtagatatccttttgtgtgtgtgtgtgtgcattaaagttgtaaacggtaacatgaaacaaatgaaagttcttgctataatggtatggaaaacaagaaggaaatgaaaatatttttatgcctacttaggaaaaaaagggtagcacttattcattccaagtacttttttttttttaatttttaagctcttaactcacattgttatgcttaagatgataaacatatatcctctttttattgctttgtctatgtttcatatgaaacatttcagaaattattttgataagtgttgctggaatctgcaacgctgatttttttttgcattctgtagtcgcatttgcactccatttttacattaattcgcagttgctttgtatcattgttttgtttgggttttgtttctttttcacagtgccgggtcttcgtttcttaaagttggatggcaggtagagttcaaccagttcgtgactgttgtagcgaatgaagttaaaaaaatgtctttctgatgttgtgttgtcattttcatttttgcatttttttgtttgcatattaaaaaaagagaaaagagaaagcaagagacagaaatcaggactaagtcctctgcttcagtttcattgttaacgggccttattctgatctcacctgtcgcgtagctctaatattcacataaactgaaataaagaagtggaatgaggagctttgacattcaaattatgtgatgtaatttatcttccttaggaattttgatggatgcatctcaaaatgtatagccagacttgagaggtgacaattaaagatctaaaaaagagaggagattcccccaaacaacaatatttaattttcttagtaaaaagaataacagaatgcatcgtggcaatccttaagcaacattatctatgtggactgcttaaatcagcaaaacaccagaagtttggttaacttgggcaatatgacaagtattactttttgggcaaaactactcattaagcaatttctctagtgtgtcggacacaaataggttctttatttttggcatgtatgcctttttattttcattcaattttttttttttctcagacagacatagtagtatcaactagcattggaaaatacatatcactattcttggaatatttatggtcagtctactttttagtaaaatatttttggatagcgttgacacgatagatcttattccatacttctttattattgataattttattttcattttttgctttcattattatacatattttggtggagaagaggttgggcttttttgaaagagacaaaaatttattataacactaaacactccttttttgacatattaaagcctttattccatctctcaagatatattataaaatttatttttttaatttaagatttctgaattattttatcttaaattgtgattttaaacgagctattatggtacggaactttttttaatgaggaatttcatgatgatttaggaattttctctcttggaaaaggcttcccctgtgatgaaaatgatgtgccagctaaaattgtgtgccatttaaaaactgaaaatattttaaaattatttgtctatattctaaattgagctttggatcaaactttaggccaggaccagctcatgcgttctcattcttccttttctcactctttctctcatcactcacctctgtattcattctgttgtttgggatagaaaaatcataaagagccaacccatctcagaacgttgtggattgagagagacactacatgactccaagtatatgagaaaaggacagagctctaattgataactctgtagttcaaaaggaaaagagtatgcccaattctctctacatgacatattgagattttttttaatcaacttttaagatagtgatgttctgttctaaactgttctgttttagtgaaggtagatttttataaaacaagcatggggattcttttctaaggtaatattaatgagaagggaaaaaagtatctttaacagctctttgttgaagcctgtggtagcacattatgtttataattgcacatgtgcacataatctattatgatccaatgcaaatacagctccaaaaatattaaatgtatatatattttaaaatgcctgaggaaatacatttttcttaataaactgaagagtctcagtatggctattaaaataattattagcctcctgttgtgtggctgcaaaacatcacaaagtgaccggtcttgagacctgtgaactgctgccctgtttagtaaataaaattaatgcatttctagagggggaatatctgccatccagtggtggaaatgtggagtaaagaagctggtggtctgcttctgtgctgtatgccagccttttgccttaagttgagaggaggtcaactttagctactgtctttggtttgagagccatggcaaaaaaaaaaaaagaaaaaaagatcaagtcgtctttggtgagccagtaaggtgaaagcttgctgactgtccaaggcacaagagaaaattgaggaattgaaatgcaacctgagtatcaaactaaatattctaatcaaaggtaggtactgttaggtggaattctatcagcaggcaactgcaaatgagaagaagatagaaggacgcccgtcgggactttggagggcattgttattttcccaaagaaagacggccaagggcagaggcatggattctttgcagagcacttccttttggtttttcagtactgtttcatagacagtgggctcacatgttcctgatagtgctgcagttgcttagaaagcatcccagttaattgcagtaattagaacttctggaatatgctagggcagaagtatgtcaagtatgtcacatgaagaaaatgtgaaattcaagagtaatccacacgtgagaaactagacaatgtacattcatgtgttctcttgaaaggaaagggagagctgtaagcttcactctgtcctacaccggagaaaagcaggaataactttaccgtggaaataatgtttagcttttatcagagaaaattgtccttctagagcatagagtcccaaaactcaattctggttttcccctgttttttttttttttttttttcccaacatatgaactgcagcatatcactttttctttttgtgcctcaggttcctcacctgtaaaattgaaaaatatatgtattaataatattattaataataataatggtaatgtagtacttgtttgtaaagcactttgagatccttggttgaaaggcaccataggagtgccaagtattattatgtggccaagggggttatttaaactgtcagttcccaaaggccaggaaaggttggggtcatttttcttaaagacgagctgtaaatatcaactaggcagccaatagtgttgactatgaagatgcaaaactattactaggctgataaaatcatagtttcttaatggctaccaataaggcaaatatcacaataataaacgccaaattccttagggcggactatttgacaaccacatggaaaactttgggggaggcatgaggggggaacatctcaaaatgccaatgtaaaatttaacttacagcaatattcaccagcagaaaatgtctttcatatggaatgatttcatgttgctaagaaaaagaattcaatttgtagtcctgatttgaatactagaatgttggctataatagttctgttcttacaacacatgaaattttttcgttttattttattttgttttcatagtgcatgttcatttctactcacaaacatgttcttggtgtatttcttatgcaaacaatcttcaggcagcaaagatgtctgttacatctaaacttgaataataaagttttaccaccagttacacataacggcgttggtatggtttatatggattcactttcatccttctagcaataggaaatacagatcattgtaatatatatatatatatatatatatatatatatatatatatatatatatatatatacaggctctgctgaattgaaatggtgaaatcaaatcaccattctaaaaaattattacttatattgataaagcctggactctctcaacttgttgtgctttgattttttttcttaaacaaacactctctcactgatatattttgtgtaaaaagatatatactactttctccagagagataacataaaaatgtgtttatttc

SEQ ID NO: 5455 - protein, 1281 aa, Homo sapiens
MVRKKNPPLRNVASEGEGQILEPIGTESKVSGKNKEFSADQMSENTDQSDAAELNHKEEHSLHVQDPSSSSKKDLKSAVLSEKAGFNYESPSKGGNFPSFPHDEVTDRNMLAFSSPAAGGVCEPLKSPQRAEADDPQDMACTPSGDSLETKEDQKMSPKATEETGQAQSGQANCQGLSPVSVASKNPQVPSDGGVRLNKSKTDLLVNDNPDPAPLSPELQDFKCNICGYGYYGNDPTDLIKHFRKYHLGLHNRTRQDAELDSKILALHNMVQFSHSKDFQKVNRSVFSGVLQDINSSRPVLLNGTYDVQVTSGGTFIGIGRKTPDCQGNTKYFRCKFCNFTYMGNSSTELEQHFLQTHPNKIKASLPSSEVAKPSEKNSNKSIPALQSSDSGDLGKWQDKITVKAGDDTPVGYSVPIKPLDSSRQNGTEATSYYWCKFCSFSCESSSSLKLLEHYGKQHGAVQSGGLNPELNDKLSRGSVINQNDLAKSSEGETMTKTDKSSSGAKKKDFSSKGAEDNMVTSYNCQFCDFRYSKSHGPDVIVVGPLLRHYQQLHNIHKCTIKHCPFCPRGLCSPEKHLGEITYPFACRKSNCSHCALLLLHLSPGAAGSSRVKHQCHQCSFTTPDVDVLLFHYESVHESQASDVKQEANHLQGSDGQQSVKESKEHSCTKCDFITQVEEEISRHYRRAHSCYKCRQCSFTAADTQSLLEHFNTVHCQEQDITTANGEEDGHAISTIKEEPKIDFRVYNLLTPDSKMGEPVSESVVKREKLEEKDGLKEKVWTESSSDDLRNVTWRGADILRGSPSYTQASLGLLTPVSGTQEQTKTLRDSPNVEAAHLARPIYGLAVETKGFLQGAPAGGEKSGALPQQYPASGENKSKDESQSLLRRRRGSGVFCANCLTTKTSLWRKNANGGYVCNACGLYQKLHSTPRPLNIIKQNNGEQIIRRRTRKRLNPEALQAEQLNKQQRGSNEEQVNGSPLERRSEDHLTESHQREIPLPSLSKYEAQGSLTKSHSAQQPVLVSQTLDIHKRMQPLHIQIKSPQESTGDPGNSSSVSEGKGSSERGSPIEKYMRPAKHPNYSPPGSPIEKYQYPLFGLPFVHNDFQSEADWLRFWSKYKLSVPGNPHYLSHVPGLPNPCQNYVPYPTFNLPPHFSAVGSDNDIPLDLAIKHSRPGPTANGASKEKTKAPPNVKNEGPLNVVKTEKVDRSTQDELSTKCVHCGIVFLDEVMYALHMSCHGDSGPFQCSICQHLCTDKYDFTTHIQRGLHRNNAQVEKNGKPKE

SEQ ID NO: 5456 - DNA, 9829 bp, Homo sapiens
aatagtgttggtgtcttgaaactgacgtaatgcgcggagactgaggtcctgacaagcgataacatttctgataaagacccgatcttactgcaatctctagcgtcctcttttttggtgctgctggtttctccagacctcgcgtcctctcgattgctctctcgccttcctatttcttttttttttttttaaacaaaaaacaacaccccctcccctctcccacccggcaccgggcacatccttgctctatttcctttctctttctctctctctctctctctctctcttttttaataagggtgggggagggaaaggggggggatgcaggaaagacctttttctctcccccccgcaataatccaagatcaactctgcaaacaacagaagacggttcatggctttggccgccgcgccaccatctttcgggctgccgagggtgttcttgacgattaatcaacagatatggtccggaaaaagaacccccctctgagaaacgttgcaagtgaaggcgagggccagatcctggagcctataggtacagaaagcaaggtatctggaaagaacaaagaattttctgcagatcagatgtcagaaaatacggatcagagtgatgctgcagaactaaatcataaggaggaacatagcttgcatgttcaagatccatcttctagcagtaagaaggacttgaaaagcgcagttctgagtgagaaggctggcttcaattatgaaagccccagtaagggaggaaactttccctcctttccgcatgatgaggtgacagacagaaatatgttggctttctcatctccagctgctgggggagtctgtgagcccttgaagtctccgcaaagagcagaggcagatgaccctcaagatatggcctgcaccccctcaggggactcactggagacaaaggaagatcagaagatgtcaccaaaggctacagaggaaacagggcaagcacagagtggtcaagccaattgtcaaggtttgagcccagtttcagtggcctcaaaaaacccacaagtgccttcagatgggggtgtaagactgaataaatccaaaactgacttactggtgaatgacaacccagacccggcacctctgtctccagagcttcaggactttaaatgcaatatctgtggatatggttactacggcaacgaccccacagatctgattaagcacttccgaaagtatcacttaggactgcataaccgcaccaggcaagatgctgagctggacagcaaaatcttggcccttcataacatggtgcagttcagccattccaaagacttccagaaggtcaaccgttctgtgttttctggtgtgctgcaggacatcaattcttcaaggcctgttttactaaatgggacctatgatgtgcaggtgacttcaggtggaacattcattggcattggacggaaaacaccagattgccaagggaacaccaagtatttccgctgtaaattctgcaatttcacttatatgggcaactcatccaccgaattagaacaacattttcttcagactcacccaaacaaaataaaagcttctctcccctcctctgaggttgcaaaaccttcagagaaaaactctaacaagtccatccctgcacttcaatccagtgattctggagacttgggaaaatggcaggacaagataacagtcaaagcaggagatgacactcctgttgggtactcagtgcccataaagcccctcgattcctctagacaaaatggtacagaggccaccagttactactggtgtaaattttgtagtttcagctgtgagtcatctagctcacttaaactgctagaacattatggcaagcagcacggagcagtgcagtcaggcggccttaatccagagttaaatgataagctttccaggggctctgtcattaatcagaatgatctagccaaaagttcagaaggagagacaatgaccaagacagacaagagctcgagtggggctaaaaagaaggacttctccagcaagggagccgaggataatatggtaacgagctataattgtcagttctgtgacttccgatattccaaaagccatggccctgatgtaattgtagtggggccacttctccgtcattatcaacagctccataacattcacaagtgtaccattaaacactgtccattctgtcccagaggactttgcagcccagaaaagcaccttggagaaattacttatccgtttgcttgtagaaaaagtaattgttcccactgtgcactcttgcttctgcacttgtctcctggggcggctggaagctcgcgagtcaaacatcagtgccatcagtgttcattcaccacccctgacgtagatgtactcctctttcactatgaaagtgtgcatgagtcccaagcatcggatgtcaaacaagaagcaaatcacctgcaaggatcggatgggcagcagtctgtcaaggaaagcaaagaacactcatgtaccaaatgtgattttattacccaagtggaagaagagatttcccgacactacaggagagcacacagctgctacaaatgccgtcagtgcagttttacagctgccgatactcagtcactactggagcacttcaacactgttcactgccaggaacaggacatcactacagccaacggcgaagaggacggtcatgccatatccaccatcaaagaggagcccaaaattgacttcagggtctacaatctgctaactccagactctaaaatgggagagccagtttctgagagtgtggtgaagagagagaagctggaagagaaggacgggctcaaagagaaagtttggaccgagagttccagtgatgaccttcgcaatgtgacttggagaggggcagacatcctgcgggggagtccgtcatacacccaagcaagcctggggctgctgacgcctgtgtctggcacccaagagcagacaaagactctaagggatagtcccaatgtggaggccgcccatctggcgcgacctatttatggcttggctgtggaaaccaagggattcctgcagggggcgccagctggcggagagaagtctggggccctcccccagcagtatcctgcatcgggagaaaacaagtccaaggatgaatcccagtccctgttacggaggcgtagaggctccggtgttttttgtgccaattgcctgaccacaaagacctctctctggcgaaagaatgcaaatggcggatatgtatgcaacgcgtgtggcctctaccagaagcttcactcgactcccaggcctttaaacatcattaaacaaaacaacggtgagcagattattaggaggagaacaagaaagcgccttaacccagaggcacttcaggctgagcagctcaacaaacagcagaggggcagcaatgaggagcaagtcaatggaagcccgttagagaggaggtcagaagatcatctaactgaaagtcaccagagagaaattccactccccagcctaagtaaatacgaagcccagggttcattgactaaaagccattctgctcagcagccagtcctggtcagccaaactctggatattcacaaaaggatgcaacctttgcacattcagataaaaagtcctcaggaaagtactggagatccaggaaatagttcatccgtatctgaagggaaaggaagttctgagagaggcagtcctatagaaaagtacatgagacctgcgaaacacccaaattattcaccaccaggcagccctattgaaaagtaccagtacccactttttggacttccctttgtacataatgacttccagagtgaagctgattggctgcggttctggagtaaatataagctctccgttcctgggaatccgcactacttgagtcacgtgcctggcctaccaaatccttgccaaaactatgtgccttatcccaccttcaatctgcctcctcatttttcagctgttggatcagacaatgacattcctctagatttggcgatcaagcattccagacctgggccaactgcaaacggtgcctccaaggagaaaacgaaggcaccaccaaatgtaaaaaatgaaggtcccttgaatgtagtaaaaacagagaaagttgatagaagtactcaagatgaactttcaacaaaatgtgtgcactgtggcattgtctttctggatgaagtgatgtatgctttgcatatgagttgccatggtgacagtggacctttccagtgcagcatatgccagcatctttgcacggacaaatatgacttcacaacacatatccagaggggcctgcataggaacaatgcacaagtggaaaaaaatggaaaacctaaagagtaaaaccttagcacttagcacaattaaatagaaataggttttcttgatgggaattcaatagcttgtaatgtcttatgaagacctattaaaaaaatacttcatagagcctgccttatccaacatgaaattcccttcttttgttattctttcttttgatgagtaggttaccaagattaaaaagtgagataaatggtcaatgagaaagaatggaagatggtaaacaatcactttttaaaacctgttaagtcaaaaccatcttggctaatatgtactggggaaataatccataagagatatcaccagactagaattaatatatttataaagaaagagaccaaaactgtctagaatttgaaagggtttacatattattatactaaagcagtactggactggccattggaccatttgttccaaaacccataaattgttgcctaaatttataatgatcatgaaaccctaggcagaggaggagaaattgaaggtccagggcaatgaaagaaaaatggcgccctctcaatttagtcttctctcattggccatgtttcagattttgacctagaaatgcgagctgtggttaggcttggttagagtgcagcaagcaacatgacagatggtggcacgctgtttttacccagccctgcctgtacatacacatgcacaccctctctgatatttttgtcctttagatgttcaaatactcagtagtccttttgtttgcggtttagattcattttgtccacacatgtacccattttaaaaaacaatgtcctcgatgcttctgtagtgatttcattttagccaggtatttctttcttgtgtgtgatgaaccagtatggatttgcttttctaagcctcctgttggttactaatctcacttggcacattataactaaaggaatcccctcaattcaaaagcatagatggatacaaatgtcagaccgtgggtttaatttgtttagaacacatggcatttcttcacaaggtaacctgctgtatttatttattttcttttggttaaatataatttccaaactttgtggtcaggcagcgtctaaggttacgttaccacagactgacagttggtatatgtaccagccaatcccttcattaaatgtatacagatttagttaagtagcattaaataggattcttagaagtatgtcctcatagaacttttaatacttaaggctttgtaaaaactatccatgaagggaaagctcctcagcataactgctcagggaaatagggctaaataactgaacattaaataattggttaaaggtgctgttagtcgagcctcaatgcttgctacaaggatgtatgtacaaggactgactttaataatttgcattatattgtcccaaccagtagtttattttttgccacggagatgtagaagatattacaagctactggatgcactgtcagattaacttatttcattaaagaagttgggagaacaaataggaaaaaaaaaacttatttttctagtaaatattaatgtattacatttcaaataatggtgcctgacatattgaataattattttctacagtgtacgtatgcaacaaagatattccatcatgcattagagtcagttctggctctgcctagctgtttacatttgcaaatgtagcaaacaaggtaatgaagcaactatttctattgcagtagatatccttttgtgtgtgtgtgtgtgcattaaagttgtaaacggtaacatgaaacaaatgaaagttcttgctataatggtatggaaaacaagaaggaaatgaaaatatttttatgcctacttaggaaaaaaagggtagcacttattcattccaagtacttttttttttttaatttttaagctcttaactcacattgttatgcttaagatgataaacatatatcctctttttattgctttgtctatgtttcatatgaaacatttcagaaattattttgataagtgttgctggaatctgcaacgctgatttttttttgcattctgtagtcgcatttgcactccatttttacattaattcgcagttgctttgtatcattgttttgtttgggttttgtttctttttcacagtgccgggtcttcgtttcttaaagttggatggcaggtagagttcaaccagttcgtgactgttgtagcgaatgaagttaaaaaaatgtctttctgatgttgtgttgtcattttcatttttgcatttttttgtttgcatattaaaaaaagagaaaagagaaagcaagagacagaaatcaggactaagtcctctgcttcagtttcattgttaacgggccttattctgatctcacctgtcgcgtagctctaatattcacataaactgaaataaagaagtggaatgaggagctttgacattcaaattatgtgatgtaatttatcttccttaggaattttgatggatgcatctcaaaatgtatagccagacttgagaggtgacaattaaagatctaaaaaagagaggagattcccccaaacaacaatatttaattttcttagtaaaaagaataacagaatgcatcgtggcaatccttaagcaacattatctatgtggactgcttaaatcagcaaaacaccagaagtttggttaacttgggcaatatgacaagtattactttttgggcaaaactactcattaagcaatttctctagtgtgtcggacacaaataggttctttatttttggcatgtatgcctttttattttcattcaattttttttttttctcagacagacatagtagtatcaactagcattggaaaatacatatcactattcttggaatatttatggtcagtctactttttagtaaaatatttttggatagcgttgacacgatagatcttattccatacttctttattattgataattttattttcattttttgctttcattattatacatattttggtggagaagaggttgggcttttttgaaagagacaaaaatttattataacactaaacactccttttttgacatattaaagcctttattccatctctcaagatatattataaaatttatttttttaatttaagatttctgaattattttatcttaaattgtgattttaaacgagctattatggtacggaactttttttaatgaggaatttcatgatgatttaggaattttctctcttggaaaaggcttcccctgtgatgaaaatgatgtgccagctaaaattgtgtgccatttaaaaactgaaaatattttaaaattatttgtctatattctaaattgagctttggatcaaactttaggccaggaccagctcatgcgttctcattcttccttttctcactctttctctcatcactcacctctgtattcattctgttgtttgggatagaaaaatcataaagagccaacccatctcagaacgttgtggattgagagagacactacatgactccaagtatatgagaaaaggacagagctctaattgataactctgtagttcaaaaggaaaagagtatgcccaattctctctacatgacatattgagattttttttaatcaacttttaagatagtgatgttctgttctaaactgttctgttttagtgaaggtagatttttataaaacaagcatggggattcttttctaaggtaatattaatgagaagggaaaaaagtatctttaacagctctttgttgaagcctgtggtagcacattatgtttataattgcacatgtgcacataatctattatgatccaatgcaaatacagctccaaaaatattaaatgtatatatattttaaaatgcctgaggaaatacatttttcttaataaactgaagagtctcagtatggctattaaaataattattagcctcctgttgtgtggctgcaaaacatcacaaagtgaccggtcttgagacctgtgaactgctgccctgtttagtaaataaaattaatgcatttctagagggggaatatctgccatccagtggtggaaatgtggagtaaagaagctggtggtctgcttctgtgctgtatgccagccttttgccttaagttgagaggaggtcaactttagctactgtctttggtttgagagccatggcaaaaaaaaaaaaagaaaaaaagatcaagtcgtctttggtgagccagtaaggtgaaagcttgctgactgtccaaggcacaagagaaaattgaggaattgaaatgcaacctgagtatcaaactaaatattctaatcaaaggtaggtactgttaggtggaattctatcagcaggcaactgcaaatgagaagaagatagaaggacgcccgtcgggactttggagggcattgttattttcccaaagaaagacggccaagggcagaggcatggattctttgcagagcacttccttttggtttttcagtactgtttcatagacagtgggctcacatgttcctgatagtgctgcagttgcttagaaagcatcccagttaattgcagtaattagaacttctggaatatgctagggcagaagtatgtcaagtatgtcacatgaagaaaatgtgaaattcaagagtaatccacacgtgagaaactagacaatgtacattcatgtgttctcttgaaaggaaagggagagctgtaagcttcactctgtcctacaccggagaaaagcaggaataactttaccgtggaaataatgtttagcttttatcagagaaaattgtccttctagagcatagagtcccaaaactcaattctggttttcccctgttttttttttttttttttttcccaacatatgaactgcagcatatcactttttctttttgtgcctcaggttcctcacctgtaaaattgaaaaatatatgtattaataatattattaataataataatggtaatgtagtacttgtttgtaaagcactttgagatccttggttgaaaggcaccataggagtgccaagtattattatgtggccaagggggttatttaaactgtcagttcccaaaggccaggaaaggttggggtcatttttcttaaagacgagctgtaaatatcaactaggcagccaatagtgttgactatgaagatgcaaaactattactaggctgataaaatcatagtttcttaatggctaccaataaggcaaatatcacaataataaacgccaaattccttagggcggactatttgacaaccacatggaaaactttgggggaggcatgaggggggaacatctcaaaatgccaatgtaaaatttaacttacagcaatattcaccagcagaaaatgtctttcatatggaatgatttcatgttgctaagaaaaagaattcaatttgtagtcctgatttgaatactagaatgttggctataatagttctgttcttacaacacatgaaattttttcgttttattttattttgttttcatagtgcatgttcatttctactcacaaacatgttcttggtgtatttcttatgcaaacaatcttcaggcagcaaagatgtctgttacatctaaacttgaataataaagttttaccaccagttac

SEQ ID NO: 5457 - protein, 1281 aa, Homo sapiens; identical to SEQ ID NO: 5455

SEQ ID NO: 5458 - DNA, 1115 bp, Homo sapiens
accattctgcactacttctgctccaagaatccaccactatcttggttcctgagagattaaggatgatgttttctgttgtataatgaacagcagtattatttgaacaaagatgtacagatcagctctcaaaatgtcttctgtgtcttctgagcgtcttctaagacaattgcattagcctcctgctagttgactaatagaattaataattgtaaaaagcactctaaagccacatgccttatgaagtcaatgctgggtatgattttacaaatatggtccggaaaaagaacccccctctgagaaacgttgcaagtgaaggcgagggccagatcctggagcctataggtacagaaagcaaggtatctggaaagaacaaagaattttctgcagatcagatgtcagaaaatacggatcagagtgatgctgcagaactaaatcataaggaggaacatagcttgcatgttcaagatccatcttctagcagtaagaaggacttgaaaagcgcagttctgagtgagaaggctggcttcaattatgaaagccccagtaagggaggaaactttccctcctttccgcatgatgaggtgacagacagaaatatgttggctttctcatctccagctgctgggggagtctgtgagcccttgaagtctccgcaaagagcagaggcagatgaccctcaagatatggcctgcaccccctcaggggactcactggagacaaaggaagatcagaagatgtcaccaaaggctacagaggaaacagggcaagcacagagtggtcaagccaattgtcaaggtttgagcccagtttcagtggcctcaaaaaacccacaagtgccttcagatgggggtgtaagactgaataaatccaaaactgacttactggtgaatgacaacccagacccggcacctctgtctccagagcttcaggactttaaatgcaatatctgtggatatggttactacggcaacgaccccacagatctgattaagcacttccgaaagtatcacttaggactgcataaccgcaccaggcaagatgctgagctggacagcaaaatcttggcccttcataacatggtgcagttcagccattccaaagacttccagaaggtc

SEQ ID NO: 5459 - protein, 294 aa, Homo sapiens
MPYEVNAGYDFTNMVRKKNPPLRNVASEGEGQILEPIGTESKVSGKNKEFSADQMSENTDQSDAAELNHKEEHSLHVQDPSSSSKKDLKSAVLSEKAGFNYESPSKGGNFPSFPHDEVTDRNMLAFSSPAAGGVCEPLKSPQRAEADDPQDMACTPSGDSLETKEDQKMSPKATEETGQAQSGQANCQGLSPVSVASKNPQVPSDGGVRLNKSKTDLLVNDNPDPAPLSPELQDFKCNICGYGYYGNDPTDLIKHFRKYHLGLHNRTRQDAELDSKILALHNMVQFSHSKDFQK

SEQ ID NO: 5460 - DNA, 1141 bp, Homo sapiens
agggaaagtaacaacagaaaaggtaaaaggactttgagagttctttaaattgtttctgttagcatctctgagtgtctggggaacgtcggtttggcggccacgcactgccccccacctgccccccactaccccaagatgtacagatcagctctcaaaatgtcttctgtgtcttctgagcgtcttctaagacaattgcattagcctcctgctagttgactaatagaattaataattgtaaaaagcactctaaagccacatgccttatgaagtcaatgctgggtatgattttacaaatatggtccggaaaaagaacccccctctgagaaacgttgcaagtgaaggcgagggccagatcctggagcctataggtacagaaagcaaggtatctggaaagaacaaagaattttctgcagatcagatgtcagaaaatacggatcagagtgatgctgcagaactaaatcataaggaggaacatagcttgcatgttcaagatccatcttctagcagtaagaaggacttgaaaagcgcagttctgagtgagaaggctggcttcaattatgaaagccccagtaagggaggaaactttccctcctttccgcatgatgaggtgacagacagaaatatgttggctttctcatctccagctgctgggggagtctgtgagcccttgaagtctccgcaaagagcagaggcagatgaccctcaagatatggcctgcaccccctcaggggactcactggagacaaaggaagatcagaagatgtcaccaaaggctacagaggaaacagggcaagcacagagtggtcaagccaattgtcaaggtttgagcccagtttcagtggcctcaaaaaacccacaagtgccttcagatgggggtgtaagactgaataaatccaaaactgacttactggtgaatgacaacccagacccggcacctctgtctccagagcttcaggactttaaatgcaatatctgtggatatggttactacggcaacgaccccacagatctgattaagcacttccgaaagtatcacttaggactgcataaccgcaccaggcaagatgctgagctggacagcaaaatcttggcccttcataacatggtgcagttcagccattccaaagacttccagaaggtc

SEQ ID NO: 5461 - protein, 294 aa, Homo sapiens; identical to SEQ ID NO: 5459

SEQ ID NO: 5462 - DNA, 581 bp, Homo sapiens
agtaagagaaaaatacactggagttttcatggcgtttctaggaaacaagaacaaaacaaggttcttaggaaagattttgaaaccccattcaaagaggacttctaaagaaaatgtcactacaaagagtaatttctctagcacagaaatatcttcaacgttttgtgatttcctgacgatgaaacttcaagtggcttcctgctttctccaagtggtccagcctcatcaactgggattcaagattctgtcttattaaccttggcaaccacgtcttccatatgtacagatcagctctcaaaatgtcttctgtgtcttctgagcgtcttctaagacaattgcattagcctcctgctagttgactaatagaattaataattgtaaaaagcactctaaagccacatgccttatgaagtcaatgctgggtatgattttacaaatatggtccggaaaaagaacccccctctgagaaacgttgcaagtgaaggcgagggccagatcctggagcctataggtacagaaagcaaggtatctggaaagaacaaagaattttctgcagatcagatgtcagaaaatacggatcagag

SEQ ID NO: 5463 - protein, 74 aa, Homo sapiens
MAFLGNKNKTRFLGKILKPHSKRTSKENVTTKSNFSSTEISSTFCDFLTMKLQVASCFLQVVQPHQLGFKILSY

SEQ ID NO: 5464 - DNA, 569 bp, Homo sapiens
acatgcattttctttcttcctttttgagcgtgtgatttctttctttctttcttctcttctgctccctttttcccccttcctctcctccttttggtgggtctgaggcatctgagctttggaaaccagcgacttcaaactgcagtagcccctggagtcagcagggtcaagttcagccgccggggaggaggaaaaacaaatccccatttgccaaaaaaagaagtttcaggccggtgccccctccccctcgcagccccactccccctcgctgtctctttctggctgattttaattctctcctaccgggcgcagcggaggagctggaggtggttggacccgaggggccgccgccgccgccgccactgcaagttttctgggggctcgtgacaagcggggcgcagactaggcaccagcatgcagagtaatgtacagatcagctctcaaaatgtcttctgtgtcttctgagcgtcttctaagacaattgcattagcctcctgctagttgactaatagaattaataattgtaaaaagcactctaaagccacatgccttatgaagtcaatgctgggtat

SEQ ID NO: 5465 - protein, 128 aa, Homo sapiens
FLSFFLLFCSLFPPSSPPFGGSEASELWKPATSNCSSPWSQQGQVQPPGRRKNKSPFAKKRSFRPVPPPPRSPTPPRCLFLADFNSLLPGAAEELEVVGPEGPPPPPPLQVFWGLVTSGAQTRHQHAE

SEQ ID NO: 5466 - DNA, 1291 bp, Homo sapiens
ggaagaccgcttgcttccaggacggtgtggggaagggtaagagggctcagggaaagaccgtggaaagctcggcgcacaagcgagctggcatcaccggggattccctccggcccggtgggactccggcgcgcttgtagcgaggacccccagcccagggcagagcctaccctccgctcccccagtctgggcccttggcggccgcagtcgcccaagcccgccccgcctccgcgcgcggccctctccggctcagtgccctgcgctgccgggaagcaggctgaggggcgcaccgggcggcgggcggggacctggggaaggccgggagcgccgggaccgaggacgcacgcggcgggccgggccgcgcgcgcctcccccctcccccgaggcccgagcgcgagccgccgtgacgtcacgggcaacccgccagccccgcgctcctccgggcagagcgcgtgtggcggccgagcacatgggcccgcgggccgggcgggctcggggcggccgggacgaggaggggcgacgacgagctgcgagcaaagatgtgccccgggacccccggcaccttccagtggatttccttgcggaaaggatgttggcggtccctgtgacctgtggagacacggccagatctgccctccagcctgatcttttggccagaaggagattaaaaagatgcccctcaagatggctgtgcctgtcagctgcatggagcttcgttcaagtattttctgagcctgatggatttacagtgatcttcagtggtctggggaataacgctggtggaaccatgcactggaatgacacacgcccggcacatttcaggatactaaaagtggttttaagggaggctgtggctgaatgcctcatggattcttacagcttggatgtccatgggggacgaaggactgcagctggctgagagggttgagatctctgtttacttagatctctgccaacttcctttgggtctccctatggaatgtaagaccccgactcttcctggtgaagcatctgatgcacgttccatccggcgctcagctgggcttgaggacttcgcaggtgagcagtaacggaaatcagccccgtttattcctcccagcacctgccttatccaactccccacgctgtggctgagtcccagcctgctatggaagcatcactggactcccattgaactctgtgcagattcgctgttcgtagacatggtacctgatggacaccaagctacgtacagcttcaaggccccttctttctttgctaataaaaaataaaaaataaaaacataatacacgtt

SEQ ID NO: 5467 - protein, 149 aa, Homo sapiens
MGPRAGRARGGRDEEGRRRAASKDVPRDPRHLPVDFLAERMLAVPVTCGDTARSALQPDLLARRRLKRCPSRWLCLSAAWSFVQVFSEPDGFTVIFSGLGNNAGGTMHWNDTRPAHFRILKVVLREAVAECLMDSYSLDVHGGRRTAAG

SEQ ID NO: 5468 - DNA, 1437 bp, Homo sapiens
ggaagaccgcttgcttccaggacggtgtggggaagggtaagagggctcagggaaagaccgtggaaagctcggcgcacaagcgagctggcatcaccggggattccctccggcccggtgggactccggcgcgcttgtagcgaggacccccagcccagggcagagcctaccctccgctcccccagtctgggcccttggcggccgcagtcgcccaagcccgccccgcctccgcgcgcggccctctccggctcagtgccctgcgctgccgggaagcaggctgaggggcgcaccgggcggcgggcggggacctggggaaggccgggagcgccgggaccgaggacgcacgcggcgggccgggccgcgcgcgcctcccccctcccccgaggcccgagcgcgagccgccgtgacgtcacgggcaacccgccagccccgcgctcctccgggcagagcgcgtgtggcggccgagcacatgggcccgcgggccgggcgggctcggggcggccgggacgaggaggggcgacgacgagctgcgagcaaagatgtgccccgggacccccggcaccttccagtggatttccttgcggaaaggatgttggcggtccctgtgacctgtggagacacggccagatctgccctccagcctgatcttttggccagaaggagattaaaaagatgcccctcaagatggctgtgcctgtcagctgcatggagcttcgttcaagtattttctgagcctgatggatttacagtgatcttcagtggtctggggaataacgctggtggaaccatgcactggaatgacacacgcccggcacatttcaggatactaaaagtggttttaagggaggctgtggctgaatgcctcatggattcttacagcttggatgtccatgggggacgaaggactgcagctggctgagagggttgagatctctgtttacttagatctctgccaacttcctttgggtctccctatggaatgtaagaccccgactcttcctggtgaagcatctgatgcacgttccatccggcgctcagctgggcttgagattcctgggaacaccaccatggagggcctggcctttggcggtggacagtctgtggctgggtgggaacgtcaggagtggggcctgcctctttgctgggaatgccgtgcactcccagcccacttgccccatgccagcactcgaggcaggacttcgcaggtgagcagtaacggaaatcagccccgtttattcctcccagcacctgccttatccaactccccacgctgtggctgagtcccagcctgctatggaagcatcactggactcccattgaactctgtgcagattcgctgttcgtagacatggtacctgatggacaccaagctacgtacagcttcaaggccccttctttctttgctaataaaaaataaaaaataaaaacataatacacgtt

SEQ ID NO: 5469 - protein, 149 aa, Homo sapiens; identical to SEQ ID NO: 5467

SEQ ID NO: 5470 - DNA, 1995 bp, Homo sapiens
ggaagaccgcttgcttccaggacggtgtggggaagggtaagagggctcagggaaagaccgtggaaagctcggcgcacaagcgagctggcatcaccggggattccctccggcccggtgggactccggcgcgcttgtagcgaggacccccagcccagggcagagcctaccctccgctcccccagtctgggcccttggcggccgcagtcgcccaagcccgccccgcctccgcgcgcggccctctccggctcagtgccctgcgctgccgggaagcaggctgaggggcgcaccgggcggcgggcggggacctggggaaggccgggagcgccgggaccgaggacgcacgcggcgggccgggccgcgcgcgcctcccccctcccccgaggcccgagcgcgagccgccgtgacgtcacgggcaacccgccagccccgcgctcctccgggcagagcgcgtgtggcggccgagcacatgggcccgcgggccgggcgggctcggggcggccgggacgaggaggggcgacgacgagctgcgagcaaagatgtgccccgggacccccggcaccttccagtggatttccttgcggaaaggatgttggcggtccctgtgacctgtggagacacggccagatctgccctccagcctgatcttttggccagaaggagattaaaaagatgcccctcaagatggctgtgcctgtcagctgcatggagcttcgttcaagtattttctgagcctgatggatttacagtgatcttcagtggtctggggaataacgctggtggaaccatgcactggaatgacacacgcccggcacatttcaggatactaaaagtggttttaagggaggctgtggctgaatgcctcatggattcttacagcttggatgtccatgggggacgaaggactgcagctggctgagagggttgagatctctgtttacttagatctctgccaacttcctttgggtctccctatggaatgtaagaccccgactcttcctggtgaagcatctgatgcacgttccatccggcgctcagctgggcttgagctgaccatactccctggagccttctcccgaggtgcgcgggtgaccttggcacatacagccatcatgatggtactttaagtggaggctgaatcatctcccctttgagctgcttggcacgtggctcccttggtgttccccttttactgccaggacactgagatttggagaggtaagtggcttacctgaggccatgtgctaacagagaagatgaagagatgattgaaacaggcctaagaccagacctaagggtctgtacattttccacatactttccatatctttagaggcctgaccaaagcagatcttttcctttcttctaggtaagtccaaaggcacctgcctgctgggcccactgttttctaactttcctaactttctgatcccttggaggtgataatcaaatattctagtctgaggcattgggatacatggtgctaggttctgagactctgcgtcaggcctgaaccctgcattttgtggaggtgggtgggagaatgttcccctggggaacatgcctagacacgggggacaacagttgccctcatggggaggtacctgtttactcgctgttatgggaccgctttcacaaaaccactgcaggtgagtgagttcctgctgaatatcaggcctggtgtctctagactcattatttcccccacccaacccctatgttagttcatctcgagccacatttttattgccataatccaggcctggacaggccaagatcttttaacaattttaattactgaaaataataactgcattttttttaaagcccaacttttggtagagtcagcccaaaatacagtctttgtgttgccatctgggaactggatttggaattgttcttccatgagactgcagagcagaacggcagggccagaggtcccacgagctggtcagacccggttctgctccttgctggctgagtgaccttgggcattgt

SEQ ID NO: 5471 - protein, 149 aa, Homo sapiens; identical to SEQ ID NO: 5467

SEQ ID NO: 5472 - DNA, 1204 bp, Homo sapiens
ggaagaccgcttgcttccaggacggtgtggggaagggtaagagggctcagggaaagaccgtggaaagctcggcgcacaagcgagctggcatcaccggggattccctccggcccggtgggactccggcgcgcttgtagcgaggacccccagcccagggcagagcctaccctccgctcccccagtctgggcccttggcggccgcagtcgcccaagcccgccccgcctccgcgcgcggccctctccggctcagtgccctgcgctgccgggaagcaggctgaggggcgcaccgggcggcgggcggggacctggggaaggccgggagcgccgggaccgaggacgcacgcggcgggccgggccgcgcgcgcctcccccctcccccgaggcccgagcgcgagccgccgtgacgtcacgggcaacccgccagccccgcgctcctccgggcagagcgcgtgtggcggccgagcacatgggcccgcgggccgggcgggctcggggcggccgggacgaggaggggcgacgacgagctgcgagcaaagatgtgccccgggacccccggcaccttccagtggatttccttgcggaaaggatgttggcggtccctgtgacctgtggagacacggccagattttctccagattcctgggaacaccaccatggagggcctggcctttggcggtggacagtctgtggctgggtgggaacgtcaggagtggggcctgcctctttgctgggaatgccgtgcactcccagcccacttgccccatgccagcactcgaggcagcttctgcagctgaccatactccctggagccttctcccgaggtgcgcgggtgaccttggcacatacagccatcatgatggtactttaagtggaggctgaatcatctcccctttgagctgcttggcacgtggctcccaggcaactacacagccagtggtgggaaagcacctaatttacatcttcatgcattgaaactgatgtcactcacctctcccccttgacctggaagagcccctgaaggctgccataggggaaatgataacccattctacagctgctgaaactgaggcccagggagtgtccagagctttctgaggtccaccatgtactgttgaccaggatgagtgatagccacctggtgacaatgttgaaggttctcattcagtagagctgggttcaattctgacttgcctgaccagctggt

SEQ ID NO: 5473 - protein, 133 aa, Homo sapiens
MGPRAGRARGGRDEEGRRRAASKDVPRDPRHLPVDFLAERMLAVPVTCGDTARFSPDSWEHHHGGPGLWRWTVCGWVGTSGVGPASLLGMPCTPSPLAPCQHSRQLLQLTILPGAFSRGARVTLAHTAIMMVL

SEQ ID NO: 5474 - DNA, 1097 bp, Homo sapiens
ggaagaccgcttgcttccaggacggtgtggggaagggtaagagggctcagggaaagaccgtggaaagctcggcgcacaagcgagctggcatcaccggggattccctccggcccggtgggactccggcgcgcttgtagcgaggacccccagcccagggcagagcctaccctccgctcccccagtctgggcccttggcggccgcagtcgcccaagcccgccccgcctccgcgcgcggccctctccggctcagtgccctgcgctgccgggaagcaggctgaggggcgcaccgggcggcgggcggggacctggggaaggccgggagcgccgggaccgaggacgcacgcggcgggccgggccgcgcgcgcctcccccctcccccgaggcccgagcgcgagccgccgtgacgtcacgggcaacccgccagccccgcgctcctccgggcagagcgcgtgtggcggccgagcacatgggcccgcgggccgggcgggctcggggcggccgggacgaggaggggcgacgacgagctgcgagcaaagatgtgccccgggacccccggcaccttccagtggatttccttgcggaaaggatgttggcggtccctgtgacctgtggagacacggccagatctgccctccactgaccatactccctggagccttctcccgaggtgcgcgggtgaccttggcacatacagccatcatgatggtactttaagtggaggctgaatcatctcccctttgagctgcttggcacgtggctcccttggtgttccccttttactgccaggacactgagatttggagaggcaactacacagccagtggtgggaaagcacctaatttacatcttcatgcattgaaactgatgtcactcacctctcccccttgacctggaagagcccctgaaggctgccataggggaaatgataacccattctacagctgctgaaactgaggcccagggagtgtccagagctttctgaggtccaccatgtactgttgaccaggatgagtgatagccacctggtgacaatgttgaaggttctcattcagtagagctgggttcaattctgacttgcctgaccagctggtgcctca

SEQ ID NO: 5475 - protein, 57 aa, Homo sapiens
MGPRAGRARGGRDEEGRRRAASKDVPRDPRHLPVDFLAERMLAVPVTCGDTARSALH

SEQ ID NO: 5476 - DNA, 1507 bp, Homo sapiens
ggaagaccgcttgcttccaggacggtgtggggaagggtaagagggctcagggaaagaccgtggaaagctcggcgcacaagcgagctggcatcaccggggattccctccggcccggtgggactccggcgcgcttgtagcgaggacccccagcccagggcagagcctaccctccgctcccccagtctgggcccttggcggccgcagtcgcccaagcccgccccgcctccgcgcgcggccctctccggctcagtgccctgcgctgccgggaagcaggctgaggggcgcaccgggcggcgggcggggacctggggaaggccgggagcgccgggaccgaggacgcacgcggcgggccgggccgcgcgcgcctcccccctcccccgaggcccgagcgcgagccgccgtgacgtcacgggcaacccgccagccccgcgctcctccgggcagagcgcgtgtggcggccgagcacatgggcccgcgggccgggcgggctcggggcggccgggacgaggaggggcgacgacgagctgcgagcaaagatgtgccccgggacccccggcaccttccagtggatttccttgcggaaaggatgttggcggtccctgtgacctgtggagacacggccagatctgccctccagcctgatcttttggccagaaggagattaaaaagatgcccctcaagatggctgtgcctgtcagctgcatggagcttcgttcaagtattttctgagcctgatggatttacagtgatcttcagtggtctggggaataacgctggtggaaccatgcactggaatgacacacgcccggcacatttcaggatactaaaagtggttttaagggaggctgtggctgaatgcctcatggattcttacagcttggatgtccatgggggacgaaggactgcagctggctgagagggttgagatctctgtttacttagatctctgccaacttcctttgggtctccctatggaatgtaagaccccgactcttcctggtgaagcatctgatgcacgttccatccggcgctcagctgggcttgagctgaccatactccctggagccttctcccgaggtgcgcgggtgaccttggcacatacagccatcatgatggtactttaagtggaggctgaatcatctcccctttgagctgcttggcacgtggctcccttggtgttccccttttactgccaggacactgagatttggagaggcaactacacagccagtggtgggaaagcacctaatttacatcttcatgcattgaaactgatgtcactcacctctcccccttgacctggaagagcccctgaaggctgccataggggaaatgataacccattctacagctgctgaaactgaggcccagggagtgtccagagctttctgaggtccaccatgtactgttgaccaggatgagtgatagccacctggtgacaatgttgaaggttctcattcagtagagctgggttcaattctgacttgcctgaccagctggtgcctca

SEQ ID NO: 5477 - protein, 149 aa, Homo sapiens; identical to SEQ ID NO: 5467

SEQ ID NO: 5478 - DNA, 1438 bp, Homo sapiens
ggaagaccgcttgcttccaggacggtgtggggaagggtaagagggctcagggaaagaccgtggaaagctcggcgcacaagcgagctggcatcaccggggattccctccggcccggtgggactccggcgcgcttgtagcgaggacccccagcccagggcagagcctaccctccgctcccccagtctgggcccttggcggccgcagtcgcccaagcccgccccgcctccgcgcgcggccctctccggctcagtgccctgcgctgccgggaagcaggctgaggggcgcaccgggcggcgggcggggacctggggaaggccgggagcgccgggaccgaggacgcacgcggcgggccgggccgcgcgcgcctcccccctcccccgaggcccgagcgcgagccgccgtgacgtcacgggcaacccgccagccccgcgctcctccgggcagagcgcgtgtggcggccgagcacatgggcccgcgggccgggcgggctcggggcggccgggacgaggaggggcgacgacgagctgcgagcaaagatgtgccccgggacccccggcaccttccagtggatttccttgcggaaaggatgttggcggtccctgtgacctgtggagacacggccagatctgccctccagcctgatcttttggccagaaggagattaaaaagatgcccctcaagatggctgtgcctgtcagctgcatggagcttcgttcaagtattttctgagcctgatggatttacagtgatcttcagtggtctggggaataacgctggtggaaccatgcactggaatgacacacgcccggcacatttcaggatactaaaagtggttttaagggaggctgtggctgaatgcctcatggattcttacagcttggatgtccatgggggacgaaggactgcagctggctgagagggttgagatctctgtttacttagatctctgccaacttcctttgggtctccctatggaatgtaagaccccgactcttcctggtgaagcatctgatgcacgttccatccggcgctcagctgggcttgagctgaccatactccctggagccttctcccgaggtgcgcgggtgaccttggcacatacagccatcatgatggtactttaagtggaggctgaatcatctcccctttgagctgcttggcacgtggctcccttggtgttccccttttactgccaggacactgagatttggagagaatcctgttacacctgggatttaggcactttcaatctgaaaaaatacatatcctttcagcactctggacggacttgagaactgtccttacgtgacctaaagctggagtattttgagattggagaattaagagtgtgggcaccctggcttcaagctcacgagaaaccaggtcgggatttaaacaatgttgggttaaagcaaagtttcataaagacagaatcaag

SEQ ID NO: 5479 - protein, 149 aa, Homo sapiens; identical to SEQ ID NO: 5467

SEQ ID NO: 5480 - DNA, 2377 bp, Homo sapiens
ggaagaccgcttgcttccaggacggtgtggggaagggtaagagggctcagggaaagaccgtggaaagctcggcgcacaagcgagctggcatcaccggggattccctccggcccggtgggactccggcgcgcttgtagcgaggacccccagcccagggcagagcctaccctccgctcccccagtctgggcccttggcggccgcagtcgcccaagcccgccccgcctccgcgcgcggccctctccggctcagtgccctgcgctgccgggaagcaggctgaggggcgcaccgggcggcgggcggggacctggggaaggccgggagcgccgggaccgaggacgcacgcggcgggccgggccgcgcgcgcctcccccctcccccgaggcccgagcgcgagccgccgtgacgtcacgggcaacccgccagccccgcgctcctccgggcagagcgcgtgtggcggccgagcacatgggcccgcgggccgggcgggctcggggcggccgggacgaggaggggcgacgacgagctgcgagcaaagatgtgccccgggacccccggcaccttccagtggatttccttgcggaaaggatgttggcggtccctgtgacctgtggagacacggccagatctgccctccagcctgatcttttggccagaaggagattaaaaagatgcccctcaagatggctgtgcctgtcagctgcatggagcttcgttcaagtattttctgagcctgatggatttacagtgatcttcagtggtctggggaataacgctggtggaaccatgcactggaatgacacacgcccggcacatttcaggatactaaaagtggttttaagggaggctgtggctgaatgcctcatggattcttacagcttggatgtccatgggggacgaaggactgcagctggctgagagggttgagatctctgtttacttagatctctgccaacttcctttgggtctccctatggaatgtaagaccccgactcttcctggtgaagcatctgatgcacgttccatccggcgctcagctgggcttgagctgaccatactccctggagccttctcccgaggtgcgcgggtgaccttggcacatacagccatcatgatggtactttaagtggaggctgaatcatctcccctttgagctgcttggcacgtggctcccttggtgttccccttttactgccaggacactgagatttggagagagtctcactctgtggtccaggctgaagtacagtggcatgatcccaggtcactgcaacccccacctcccgggttcaagtgatcctcctgcctcagcctcccgagtagctggtattacaggcgtgtgccacaaagcctggctaagttttgtatttttagtagagacggggtttcaccatgttggccaggttggtctcgaactcctgacctcaagtgatccactcactttggcctttcaacgtgctgggattacaggcgagagtcaccgcacccggacgactctgacatttttgaagagtccagaatcctgttacacctgggatttaggcactttcaatctgaaaaaatacatatcctttcagcactctggacggacttgagaactgtccttacgtgacctaaagctggagtattttgagattggagaattaagagccagtcttggtgctctgtgttcacctggttcatctgaggagctgcatctaccctgcccatgccatagatcctgccctgtttgcttctcctgttgctgctagtggacatgagaaggacagaataacgggctcccagattcacaagccccaccaagaggatcaccccaggaacgcttggaggctgaggagttcactgaggctactgcatcttgagactcaggatgaagacccagcttggggctgtcaaagaggcctgaagaggcagaacaccccagaggagcctggggccaccacccagcatcactgtgggaaaacggcagcaggaaatgtcctctcgcctgcgtgctccacctcggtccacgccttccctccttctggaagccttgcctgaccactggcctgccccttctatgggaatcactactgaccttgcagcttattatagacttatatgttttttgcatgtctgacacccatgactccacctggaccttatggctccacccagaagcaattcagcccaacaggaggacagcttcaacccattacgatttcatctctgccccaaccactcagcagcaagcacctgttacctgtccacccccaccccttcccccaaactgcctttgaaaaatccctaacctatgagctttgaataagatgagtacgaacttcatcgcccacgtggcgtggccggcctcgtgtctattaaattctttttctactacaa

SEQ ID NO: 5481 - protein, 149 aa, Homo sapiens; identical to SEQ ID NO: 5467

SEQ ID NO: 5482 - DNA, 4540 bp, Homo sapiens
tggccggctctcttctccccagagtggttcttttcctgcccctggtgtccctctaagacccagatgtttccagcacccatttgagaggctgattcagcccaggcagtgtctggcctagggaaggtgactgcaggaaatgttaaaaaatgggggctgttatcatgcctgagcatcgcacagtccctccgttgtgactaattgtagtggttgttgttgaagggctgccccaggtccccctccctggaccggtacactcaccccagctgccgagacggcggctgctaatgtccactgctgctaatgtccacagcaccacttctctggagattagccttcctccaactggagctgcttcatccgggaagttgctcaccctgcaccagccctggctgactcaggggtgcaaagggctgctcctccttgtttccatgtggggtaaactccatggtgcggttcatgttccagggcatcctgtggatggcctgagttggtccccagccgagaccacctccttcccttgcctggctctgccaccttcccttcctttctcctgaggttgctccctgttaaatcacacagacagacattccctcctcaggatctgtccccgggtgcccaccctcagacactatccggcaacacgttccctttcctgagtcccctctgatgatgtatctgacttggagatccttggcctgctggctctcttttcagttctgttctggagaatagaagcttcctgggctggcctgttgagtgttttgtttggttggttttgatttccaagtcttttcaggctaatcggacacgaggaaaggtctgcattgaatcacagccttggcactgttccccccttccttccctcctccgttcattcccccgaacatccttttctgtgccgacaatgacctcagcagaaaggggaaaaggacgtgggaaggctgcatgggaaactcatggaacttggtagcaaacagctctgggttcaagtccgggccctgttgctcaggagccaggcactcagttgtggtggcttctctaaccgggaacttcttctatgaaaatgggactattcgtctctactccttgcattattgtggggatcggaaataatctgggtcaatgatgtggtgcagtgactagcatcgaggggacaccctctccacacaggctggaaagacatccagaaggagtcctgggctccctcaccacgcaggggctcagcctcgccagatagttgtcatcacccatccaggcccgtttctggtctcattgcttttgttcatgtactttcctcctgggttgctcttccttttctctctgacctgtcaaaaagccccattgtaagcaacatttaaatgctacctcttccatgaagcccttttggatgcctcttagggggatgagttctttccatcctagcactgcttgctgcatggtccaggatctgtggggcctgtcttctttaccactttgctcacttcatgaatgtgggggtgtatgaagagtatgatgaaattagaggctatgttctggagtcagactgatcagtactgggattctggccataccccctccttagctgggtgactttaggcaactgactgtaccatcctgaaagtcatctgtaagccgtgctgaccccccaaccacaggacacttgtgcccgctgcaggtgctctgtcagcagtgacttctcactacctggcatcctctgaattcacgagcagtttgaagaatgagcaaatactgagcaaagctcataggattaaatacacacagacctgtgtaagttaacaccaagctaagggttaaatactttacaaaaattctcagtgcggttggtgggtgagaagggctgtcgtcccctctggctgccttgccaagctggtagaggggccatctcccactacctactgacaaagattctttgcttgacccaattacccaatttaatcagacacttaagtcttttcctaggcccatctgtgtacttcctgtaaaatctagttttagcaaaaaactctgctgagtcagtttggtaaggaccaccggccgtcaatatcttccatatctgatagatagggttcctcatcttctaccaccctccagatgatgtctggtcaccctggcctgcctttagcaagaatcttgataggttgatttaaccagaatcccccttactcctgatgttgcctgttagtaattttctatcctctgacccccaccctgcttcttggctgtgaatttccacttgctcaggctgtattgagttgagccctatctttctcctacactgcaaattcccattgccgtggtccctatacctatcaggatggtcctgaattgtcttctttatcatctgctctgctctgccagagcttaagcccaggcagctgagttaaaagtgtgaccaaatggaccatcttgtccctgaaaattgggacctaagctcgattccgagatttaatcatggcagaggagtttactctgctaaccaccatcaccccaccctatcccccagaggggtgcggtgagtaagggggtggcaactggttgtttccaatctcccatctctctctggccctcctctgtctctggcctcccttctccctttgaaagggacacagtgctgctcacagcctgtcctgctgcggtggctgcagagaggggctgagaataagcctgtgtccgaggcagccctccaaatacagcagggctgggttgacctttaaatagatgggctctgggccactcagttcctggaagtttgaagaaagtcagcctttcaagtgatgcgacttccaacctcaggaaagatcgctgtgtttgtaaagggtataatttactgttgcttttgcacttcatgatatgcggctgcacagccagtgggagccagcatgccagaattaggaggggaaaatcctcaagtattttaatatacccctacttagaagcaagataaacatatgtattgtactttgggacagaagcaaggggggtttagcgggtgggaaagggagagtcctggcattgcatgaaaggtctttttaagctgaactctgagggttttcagtttttcatttttctgttttttttttttttttttatttgtaagcaaagctggcatgagcaaatgatgccaggatctacttggctgtgtaaaagctgtagtccctcctcagacaggcagactgctagaaccctccctaagccataaactagtacaccgttttgcctcgcccaattaaaaatgattgggtgtgggttgtcatcacagttgacttagatgatttactttcttccaggaaatctcggcctcccaaagtgctgagattagaggcgtgagtcatcatgcctggcagtaatcttttcagtggagaataaaataaacccgggtttgaattctgaccctttaaatttactcagggtttgacttcagccagggaacataacctttctgtgcctcagtttcctcatttttcaaaacaaagatggtgtgtgtgtgcatctccatctatgagttgttgtgaataggaatgtaggggccccagcagggtgtgtaaaggtaccagttcctggggcgtcaaaggtttttctttcccttcgtaccccctcactgacatgcccaggtctgtctgtgtagagcagtgggtggatttacagactccgctgagaacccccttatagcatattttcaggttcgtgatgatatcatgggctgtgaccctgggagtttaattggaatgaatttcaaggttttgttaaacttggctagaatcttcctatatctccagcaagatattgatggggtttttgttgttgctgttgtttttgagacagggtcttgctctgtcacccaggctggagttcagtggtgccgtcactgcagcctcaacctcccaggctcaagggatcctccccttcagcgtccctagtagctgggactacaggtgcgctccaccacacccagctagtttttgaatttttttgtagtgatggggtttcactatgttgcccacgctggtctcaaactcctgggctcaagccatctgcctaccttagcctcataaagtgctggaattgcaggtgtgagccactgcacctggccaagaacttggtgtttcttatttccaagcttatctcctctgttatttgctcccagggagaccccttttccatttatgtttccagggtgctggggggaagtgattgccctcatctcttttgcccagccaccaaacccagtgcagactctgctgaatgcaggccccatctctgtattttacttattccatttcctgtcttgaaggtgggggcactatgtttatctctaggaccctgactggctcatcattgaaagcttattttgtgcaaagcattgttctgagcactgtgtgtgtatgattctacttcatcctctgtaaccctagcagtccggtcaaatagtatcattttatagacaaggcaactgaggcacagagcagctcagcagcttgcccagatcacacagctggaaagtggtagagctggaatctgg

SEQ ID NO: 5483 - protein, 89 aa, Homo sapiens
MSTAANVHSTTSLEISLPPTGAASSGKLLTLHQPWLTQGCKGLLLLVSMWGKLHGAVHVPGHPVDGLSWSPAETTSFPCLALPPSLPFS

SEQ ID NO: 5484 - DNA, 647 bp, Homo sapiens
agtgtttacacaggctggaggtgctcatcagatgtttttgccaatccccaaatacggccagggccagaaagtgagaggggtgcctattatgtaaggccctgcggctggtccccagacaatgccacttcctcgcttggcgctgtgtgactgcataacaacgggttactcatttcctctggaaaacttcacagggcctctttgccccatttcctcctcccaccccatcctcaggcttcctctgttgaattttctccagattcctgggaacaccaccatggagggcctggcctttggcggtggacagtctgtggctgggtgggaacgtcaggagtggggcctgcctctttgctgggaatgccgtgcactcccagcccacttgccccatgccagcactcgaggcaggacttcgcaggtgagcagtaacggaaatcagccccgtttattcctcccagcacctgccttatccaactccccacgctgtggctgagtcccagcctgctatggaagcatcactggactcccattgaactctgtgcagattcgctgttcgtagacatggtacctgatggacaccaagctacgtacagcttcaaggccccttctttctttgctaataaaaaataaaaaataaaaacataatacacgtt

SEQ ID NO: 5485 - protein, 122 aa, Homo sapiens
MPLPRLALCDCITTGYSFPLENFTGPLCPISSSHPILRLPLLNFLQIPGNTTMEGLAFGGGQSVAGWERQEWGLPLCWECRALPAHLPHASTRGRTSQVSSNGNQPRLFLPAPALSNSPRCG

SEQ ID NO: 5486 - DNA, 2226 bp, Homo sapiens
agatggccacctcctccctgtgtctacacgtggtcttcactcctcctttgtcatcttaatctcttcttctgataaggacacccaccagtctgaccatattggagccccgccacgtgagctcagttaactgtacctctctagagaccctatttccgaacacagtcacgttctgaggtatgggtgagtaggacttcaacctatggttttaagggggacagaattcatccagtcatagtcaccaagcttccctgaagctctactagtctggcatagagaaatcagagtgaaccaagatcaaaatctgagggcaaccttggctttccccttctacacagaattggatgacagctaggagatggatctatgaattttctcccctgagaaaccagacgggaccacctagagtcggtctccttcccccaaacgccctggacctaccatgggcacaagctggggctcagggaatacctctgtgctccaccactcagcagctgcttttcaagagaaggaaaacactactacacgccatccacagccaccgcacaatactgtatccctttgtcagggataataaaacagacgggaagtcactctggaacttactatggccttgggtcaaaggcaggctgaccggggctggcagaagaaagctaaaacttacttctctgggattctaggaatttcaacaaatgagaccaacagcagatagtttcagattaaagaaaggcaatgtgttcccaaactttgacccctgtgcacaggctctgcagaaaagctgtcactttgcactcagtttccttataggtaaaatggggataataatattgtctgtctgcctaatttgtacaaggctcttacaagagggtatagcacaaagtaagtgcttaataaatgtgagcttttctttgtattcctgtttcatagtatttgtaactatttcacaagattcagaaaccttgtccctggactgtgatcatcgccttttcttcagtcttccattcacagacccagcctctggtgggcagtcacaacacagctggccatgtccagagaggtccaaaaacctgccccaggtgtcaaagcagctaagaaacagggccgggtgagactctgcctgactctttcattctgccaaatctaagctaagcagtgattcctatgcccacctgggaggggagaaacctgaggcccaccttgtaaatccctacaggctcagtgtgcctggcattgggatgggcagaggagacagagggaatgccaaaaaaagagcagttacaaaggacagaccacaggtccaggatgaggggactttcaacggcttgttcgtggttccgtttttgcccaaactctctcgatccacctttgagcaacagtaattatctctttgcctccatcaactccatttaccatccctgtccaattctttcccaataagccagagaataagagtgcagacattaaaggtcagattttcatggtgctgaacccatttaacccagctgtgtggctttgagtaagctacctaagctctctgagcctccatttcctcgtgtgcaaaccaaggaaaatactcacctacttattagaaggaaagaaaagactgagtacctgccatgtgacaggctttcaacaagggaccacctcttgtcataaacaagaggcacatgaacaagtgaccacgggtttaacttgtacacaggtattatgaaaacaacaagtctgcatttcaataaatatttgttatataaatgaacgggactgttcccagagcctgctgcttggaggaagctagggaataaggaactcaaaaacaaggtaagaatgtcagagcagggaagggaagggaggagggagggagtcgtgaccttgggtcaaaggtaggctgaccgatgctggcagaagaaaacttaaacttacttttctgggattctaggaattccaacaagtgacaccaacaacagatactttcaaattaaagaaaggcattgttcccaaactttggcccctgtgcacaagctctgcagaaaagctatcactttgtactcagtttccttgtagatcaaatggggataataatattgcctgtctgcctaatttgtatgaagctcttacaagagggtccagcacatatagtaggtgctcaataaatgtgagctcttctttgtattcctgtttaatagtcttgctatcattcatccgtggtctctttccttttcttggaaatca

SEQ ID NO: 5487 - protein, 138 aa, Homo sapiens
MRPTADSFRLKKGNVFPNFDPCAQALQKSCHFALSFLIGKMGIIILSVCLICTRLLQEGIAQSKCLINVSFSLYSCFIVFVTISQDSETLSLDCDHRLFFSLPFTDPASGGQSQHSWPCPERSKNLPQVSKQLRNRAG

SEQ ID NO: 5488 - DNA, 1720 bp, Homo sapiens
gcttggtgtctgggaggtcatgaggaaaggcttcactgttactctcagggtcaacctggtgtgatgcacacaccaattcagcagccaagtttatctaggatatgtcaatctcacaagttatagaaacttccaagaagtagcaacaggacccaggagctcacagctgggttttcacttaatccttgtacagtgttgcctcagcttctcaaagtttctggtgtttatgaagatccataacagctggctgcaaacccaactcctgagaatcatttctgggagaatgccgaagactgcatttcaacttcaagaatggccttttaaaggaccatgggctgtttgaggggccaacatcattaactggaaggcctgaggagagaagacacatagtcatgctgactaaaccagatcacctagaattaccaaatggaaagattgtgcctgcagcctggcctgttgcccacagcggtctacctgccacactgggaaagatcgagcagagacagagaagaaaaggaggctccatttttcaggctgctctcccgcaggctcatgttttgtgttcatgccaggcagagaacacaaaatgttccaataaataagtatcaaaggttagtggtgaaaatgaaggaggaggaggcattgcgtgaaaaactaaacatgcaaaatattacacacaaagagaaccaaaatgcaggttcactggaaatgatagacaatatgttaaaacaagaggagagaagagagctgaaataatcaaatggaaacacacaatttagggctaagatcttgttgtgttcagccacaaatgatggccagcagtgaggaatctgtgtgttctccacactcttcgctcctgggaagtcaactcacatggaccatgatatcaatatctgctccttcccctaatatctgtttgaccttgggtcagttacttaaacttcctaagccttagtttctttgtctggaaaatagggatagttatacctaccacacaaccactttgtaatgaatatgttggaaattatatgcaaattggcttccgttggtgtttggaacatagtaggtttttaactggaatataatagctaccattatcagtatcatcatattaatttatatttccatcttcagcccttaacccaggatcttcagtaaatgttgaattctcaaatttgttaaattcacttgtctatactaatattttactctaggtttcttagaatattctagataatattattatgtagaatatgttatgtaagcttcatcttatctgtaaatatagttttactttttcctttctaatttttatgtcgattacttctttttcttggcttattgaattggctaggattcccgtacagtgttgaatacgtgcagcaagactgcacatcttgccttgttcctggtcccacagagagaatatccagtacttcacaataagtatgtgttaattgtagattttattagattgaggaagttccctttcctttcaagtcagtctttttattttaaacatgtattgaagttttgtcaaatgtcttcatctattggaataattatacatatctcttttttattctgttaatattacatttcaatcttctgtctacctaaaatccctagaataatctccatttggctatgatgtgttgtgcttttatatattactgaattctatatgccaatattattaaaattttctgtctttatgagaaat

SEQ ID NO: 5489 - protein, 109 aa, Homo sapiens
MERLCLQPGLLPTAVYLPHWERSSRDREEKEAPFFRLLSRRLMFCVHARQRTQNVPINKYQRLVVKMKEEEALREKLNMQNITHKENQNAGSLEMIDNMLKQEERRELK

SEQ ID NO: 5490 - DNA, 1486 bp, Homo sapiens
gctacagtgctactggcccataatcaggcaactgcagagtcttagggggttatctaatgtagtcttggggtggctggatagacttcccaaagaaggtgatgccgaagctgaggtcggaaattacgaagatcagctatgaaggcctgaggagagaagacacatagtcatgctgactaaaccagatcacctagaattaccaaatggaaagattgtgcctgcagcctggcctgttgcccacagcggtctacctgccacactgggaaagatcgagcagagacagagaagaaaaggaggctccatttttcaggctgctctcccgcaggctcatgttttgtgttcatgccaggcagagaacacaaaatgttccaataaataagtatcaaaggttagtggtgaaaatgaaggaggaggaggcattgcgtgaaaaactaaacatgcaaaatattacacacaaagagaaccaaaatgcaggttcactggaaatgatagacaatatgttaaaacaagaggagagaagagagctgaaataatcaaatggaaacacacaatttagggctaagatcttgttgtgttcagccacaaatgatggccagcagtgaggaatctgtgtgttctccacactcttcgctcctgggaagtcaactcacatggaccatgatatcaatatctgctccttcccctaatatctgtttgaccttgggtcagttacttaaacttcctaagccttagtttctttgtctggaaaatagggatagttatacctaccacacaaccactttgtaatgaatatgttggaaattatatgcaaattggcttccgttggtgtttggaacatagtaggtttttaactggaatataatagctaccattatcagtatcatcatattaatttatatttccatcttcagcccttaacccaggatcttcagtaaatgttgaattctcaaatttgttaaattcacttgtctatactaatattttactctaggtttcttagaatattctagataatattattatgtagaatatgttatgtaagcttcatcttatctgtaaatatagttttactttttcctttctaatttttatgtcgattacttctttttcttggcttattgaattggctaggattcccgtacagtgttgaatacgtgcagcaagactgcacatcttgccttgttcctggtcccacagagagaatatccagtacttcacaataagtatgtgttaattgtagattttattagattgaggaagttccctttcctttcaagtcagtctttttattttaaacatgtattgaagttttgtcaaatgtcttcatctattggaataattatacatatctcttttttattctgttaatattacatttcaatcttctgtctacctaaaatccctagaataatctccatttggctatgatgtgttgtgcttttatatattactgaattctatatgccaatattattaaaattttctgtct

SEQ ID NO: 5491 - protein, 109 aa, Homo sapiens; identical to SEQ ID NO: 5489

SEQ ID NO: 5492 - DNA, 926 bp, Homo sapiens
agagcaagtaaaatattacgctacagtgctactggcccataatcaggcaactgcagagtcttagggggttatctaatgtagtcttggggtggctggatagacttcccaaagaaggtgatgccgaagctgaggtcggaaattacgaagatcagctatcaaacttggaaatcatgtcttagagatcaaggagccaagagatgagacaagcctgggttcctaggtgatagggtgtggctgtgtccccacccaaatctcgtcttgaattgtagctcccataatccccacatgttgtggagggaccctgtggaaggaaggcctgaggagagaagacacatagtcatgctgactaaaccagatcacctagaattaccaaatggaaagattgtgcctgcagcctggcctgttgcccacagcggtctacctgccacactgggaaagatcgagcagagacagagaagaaaaggaggctccatttttcaggctgctctcccgcaggctcatgttttgtgttcatgccaggcagagaacacaaaatgttccaataaataagtatcaaaggttagtggtgaaaatgaaggaggaggaggcattgcgtgaaaaactaaacatgcaaaatattacacacaaagagaaccaaaatgcaggttcactggaaatgatagacaatatgttaaaacaagaggagagaagagagctgaaataatcaaatggaaacacacaatttagggctaagatcttgttgtgttcagccacaaatgatggccagcagtgaggaatctgtgtgttctccacactcttcgctcctgggaagtcaactcacatggaccatgatatcaatatctgctccttcccctaatatctgtttgaccttgggtcagttacttaaacttcctaagccttagtttctttgtctggaaaatagggat

SEQ ID NO: 5493 - protein, 109 aa, Homo sapiens; identical to SEQ ID NO: 5489

SEQ ID NO: 5494 - DNA, 573 bp, Homo sapiens
agctggaggcctgcatagaacaaaaacacaggtcttcctgagcaagaggggcttctccagcatatggcctttggacttcatctataccatccgcacttctgggtctccagcctgctggcccacactacagattttggacttcccagcttccataatcatgtgcttcccatttctacagccggtttactgcggtctcctcatgaacatgttgtcatcacgcccagtgtaactgctccctccctgcaggagtttactctgctacatggataagctaacaaaggctcatctggaactacagggttacatctctagtgtcattgtatgacacagtgactcagagatgatttcctcttcagaaaacagaagaattttctgacacatttatccagattggatgatatggagatgaacaccaggactattttagaaactgcatgttgaagaccactgagatataaaacttagaaaaaaaaaggttctgaatcaatgccttgtgaagacagttgcacagggtaccaccaggctgaaatccaggtgttcaccaggacttttcttcacctggaggcccagctg

SEQ ID NO: 5495 - protein, 68 aa, Homo sapiens
MAFGLHLYHPHFWVSSLLAHTTDFGLPSFHNHVLPISTAGLLRSPHEHVVITPSVTAPSLQEFTLLHG

SEQ ID NO: 5496 - DNA, 6684 bp, Homo sapiens
aacaccagctcgcaggtgctgcggactccccagtccgcccgccgccgccgccgccgcaactgttggcggccagagacggcgaaagaggagagagagggacccaggagcgcggcccccgggggagagagaggggagccctgcagtggagacaggcagagagcagcagcctgcattcagcctgtgtccatgacagcaccgtgcacagccgggtctttcagatcttataccggaatgaagaggtacccataaatgatgctgtggtcttccgagttcatttactcttgggtggtgaaaggatggaagacgcactgagtgaagtagattttcaactcaaggtggatctgcactttacggacagtgaacagcagttgagggatgtggctggggcaccgatggtcagcagccgaacgcttggcctgcacttccacccccggaatggtctgcaccaccaggtcccggtcatgttcgactatttccacctgtctgtgatctcggtgaccgtccatgctgccctggtggctctgcagcagccattgatcagttttactcgtccaggaagaggctcctggcttggtaaaggtggcccagacaccggacaagaacagtctatcatttctctggaaaacttggtctttggagctgggtactgcaagccgacttcctcagagggaagcttctacatcacctctgagaactgcatgcagcacgcacacaagtggcaccgagacctgtgcctgttgctcctccacgcttaccggggtctccgtctccacttcctggtgatcatgcgggacatcccagagctgccacacacggagctggaggcccttgctgttgaagaaacactttctcagctgtgctcagagctacagatgttgaacaatccagagaagatcgctgagcagataagcaaggatctggcctggctcacgtcccacatgatgactctgtggacccagttcctggacacagtcactctgcactcccaagtgaccacttatctcacccaggaacaccacaccctgagggtccgaaggttttctgaggccttcttttacatggagcaccaaaaacttgcagtcctgacatttcaggagaatctgatacagacgcacagccagctgtccctggatatccggaactcggagtacctcactagcatgcccccgctgcctgcagagtgcctggacatcgacggcgattggaacaccctgccggtgatctttgaggacagatacgtggactgccctgcgacagggcataacttgagtgtttatcctaattttgatgttccagtgacaagtcctacaataatgaatctgaaagacaaggaagataactgtatggtaaatagcaatttatcttttagggaagaccttgtcttgtctaccataaaaccatcccaaatggattctgatgaagaagttataaggtgtccagagccaggtgagaatgtggccacacaaaatcatatggacatgtgctctgaatctcaggtgtatatatcaattggtgaatttcaaaacaaagcaggtgtgcctgaagatgaatgttggactggccaaacatctgatgctgggacatatccagtggcagatgtggatacttctagaaggagtccaggtccagaggatggacaggccccagtgctgacctacattgacgtaaaatctagcaataagaacccctccagagctgaacccctggtggccttcaatgctcagcatgagagtaggagctctagagataagtatggattagacaggactgggctaagcaaagtggtagtaggtggaagccaccaaaatgccatctcttcagacaaaacaactctccatgaattaagtactctaggaaagggaatagatcaagaggggaagatggtgctgctaagcttgaaactcaccccctctgagccctgtgatccactaagttctaccctgagggagcccttagatattaggtcttccctaaaggactctcacacagaagagcaggaggaactctcagtgctatccggggtcatcaagagatcttcatccatcatatctgattcaggcattgagagtgagccaagctccgtcgcctggtcagaggcccgaagcagggctctggagttgcccagtgatcgggaagtcttgcacccgtttgttcgaagacatgccctccaccggaactccctagagggtggacacacagaaagtaacacaagtttgccaagcggcatccaggcttctctcacctccattagctctttaccttttgaggaggatgagcgggaggtggcactcactaagttaaccaagtctgtatctgctccccacatcagtagcccagaggaggctgctgaagatgcggacaccaagcagcaagatggaggttttgctgaaccttcagatatgcacagcaagagccaaggttccccaggatcttgctctcaactttgtggtgactctggaacagatgctggagcagaccatcccctggtggagatagttttagatgctgacaaccagcagggccccggatacatagacatccccaaagggaaagggaagcagtttgatgctcaaggacactgtcttcctgatggcaggactgagaacactccaggtgttgaaaccaaaggtcttaatttaaaaataccacgcgtcatagcacttgaaaaccccaggaccagatctcttcatagagcacttgaggaaaccccaaagggcatgcctaaagacttgaatgtgggtcagcaagctctttccaacagtggcatctcagaggttgagggtctctctcaacatcaggtgcctgaattgagctgtacgtcagctgctgatgccatcaacaggaactcaacaggccagcaaagccaaagcggttcaccttgcattatggatgacacagcatttaatagaggagtgaatgccttcccggaggctaaacataaagcaggcactgtgtgccccactgtgacccattccgttcattcccaggttttgaaaaaccaagagctgaaggcaggcacttccatcatggggtcccatctgacttctgcagagacctttactctggacagcctgaaggctgtggaggttgtgaacttatctgtgtcttgcactgccacctgtctccctttctcatctgtgcccaaggagacccctgccagggctggattctcttccaaacagaccctgtttcccatcacccatcagcctttgggatcctttggagttgtttctacccattccagcacgttggatgaggaagtcagtgagaggatgtttagaggaagaggaagaaaatttggaagatggaattcacctggttgtctgtgtccatggcctggatgggaacagtgcagacctccggctggtaaagactttcatagaactggggctccctggaggaaaactggacttcctaatgtctgaaaagaatcagatggacacatttgcagattttgatactatgacggatcggttattggatgaaatcattcaacacattcagttgtacaacctctccatatcccgaattagcttcattggccattctcttggcaacatcatcatccgatcggtcctcacacggccccggttccggtattacctcaacaaactccacacgttcctgtcactctctgggcctcacctgggaaccctgtacaacaacagcaccctggttagtacaggcttatggctcatgcagaaactgaagaaatccgggtctctactgcagctgaccttcagggataatgctgatttgcgcaaatgtttcctctaccaactaagccaaaaaacagggctgcagtattttaaaaacgtcgtgctggttgcttctccccaagaccgttatgtgccatttcattcagccaggattgaaatgtgtaaaactgccctcaaagacagacacacagggccagtttatgcagaaatgatcaacaacctcctgggccctctggttgaagccaaggactgcactttaatccgacacaacgtgttccacgccctgcccaacactgccaacaccctgatcggccgagccgctcacatcgctgtgctggattcagaactcttcctggagaagtttttcttggtggcaggactcaactacttcaagtagtggctttgagggagcaggtctttggtaatgcttacgatcggtggagagctttagctgagacctgcttttacagacctcaccatttcagaatgaagcttcaacagcattgggggacggaggctcgggtggaacctgacatgagaggtgcttttgttttggagattcgagaaagctgagcaaatagactaaatgacaacaaactttgcttgaatttgtatagttacctggagtgtcattcaagatgttttctaggaaaaatatgagagaataaacagaatacttgggagttggtgagctccccttgctagccactactggcttactgagagattactccaatttaactagacttgccgaatatgttactagcttatagctttatcatttctgattaagtgcacacaagcatttcagaactcaggttaatctctgtgcagcagtggaacatatttgtgtaaatagaatcctcaatagattcaaatgtgtcagttgttcaagaaaatgtgatgcccatattcatattctctcctcatgttttctaaacaagggagcaaggaatgtgttacaaatcccagttctatttcataacagcagtgagcagggtgacttaaggtaaagagggataaaggtgacactattggtaaatacaagtttgttacaaagaaacatgactctagggacatactgaactatgaatagttgctccacctacttccccagaattcttctatgcagagccctgatccacaaattattttagtgattgcttacatctttgtctgtagtagggaacactgagtgagactaacctagcagaagggggcactgagatgaatgcacacacgtgtgaagctcctgctgatacacttccaaagacatgctatgttagcatttgatgcaattgcaaaaaattaaatccattaaagtggccagctgcttctcctctccatggaaggaggaaaacatctaaatggaggagtgctggattaaaacctcaggggagctctaagaagggtgctggctatctttcaatagaaatgtcttcttgccttaggaaaataaagggctaggaaaggtcactgcgttgataaaaaccaatagacgacagggacaaaagtgagatcagataggaggagaacaaccagactgaagactcaacataagctgttattggtaagtgactcaaaggggagttttgaaaattaccaggatgtttaatagtcaggtctcaaagactgagtatgttgtatgggctaaagtaagcctaaagaatcatttcgttgtatggaagagatgaatgaacctggacagtagggataagtaagacaggagcctaatcttttggagatgaaagctcctgcttctgcaaaaatcccttctgaagtgtggaaacgcatctaggaccagggttctcaatacctagaccatgactctaggtcactgatgccatggtaacaaaaccaagtaaatctaagctcatttgagaattttagatcctcttatgttaacaatgtgactttgaaaaataaaagcagaccatgggaatgagtccagatgggcagctttgcaggagtgtagacatgtggtattcttttgaagaaagagagggtcgttgagggagagttgaatgtcttgcaaaggcagagttccacacaatggatttagggtttctcagtgagtcctttctaaatgcttgttatatcctggtcataatgcatatgggttcactgagtcctctggtcactttccactggggatttttatctgagctcccgagtcagagctgggcatagactctggttcttcatgaggagtgctgtatttgctctgtaacctgggagacatttgttccctagtcgtgcagcacatggtattgtgtttcctgacctaggcaagtgcccatgctcagtacagaaccataagttggtagcagcttctcctttctggccaaatgatgggccctgtccctctgatgagtgcatttcatgttgtgtttccaattttcatcagcaatgttcgtcattccctggtcctttgaaagactgtgtagcccgcggttatggagccgggatgaatctgatgatcatcatcttctccaataaccagatgccatttttaacttcaatatgctgtctggacatagtgagaactaatggcaataaacgtccagctgcatggtgcacctcttttttataggggtgctctgctgtctttgtaaaccctctctggcctctgagcatctattataattgtgtagaaagtacatctctatattgtaaataagagtgtcgagtgttgcgtgtcatgcctcatttgaaaaggcttttttatgtctctttctattgaaatatagatatcgaatatataaatatatatacataaaatatatataaatatatattatgtaaaacagggacattctattattgattgtaaaaattataaacaaaatgcctgccaagataatggtcttgtatgtcttcattctctgcgtaatttttgtttttgtttttatgatttgttgtttcccaaaatgagttagaaataaaaatgcccaatattgagatt

SEQ ID NO: 5497 - protein, 1042 aa, Homo sapiens
MEDALSEVDFQLKVDLHFTDSEQQLRDVAGAPMVSSRTLGLHFHPRNGLHHQVPVMFDYFHLSVISVTVHAALVALQQPLISFTRPGRGSWLGKGGPDTGQEQSIISLENLVFGAGYCKPTSSEGSFYITSENCMQHAHKWHRDLCLLLLHAYRGLRLHFLVIMRDIPELPHTELEALAVEETLSQLCSELQMLNNPEKIAEQISKDLAWLTSHMMTLWTQFLDTVTLHSQVTTYLTQEHHTLRVRRFSEAFFYMEHQKLAVLTFQENLIQTHSQLSLDIRNSEYLTSMPPLPAECLDIDGDWNTLPVIFEDRYVDCPATGHNLSVYPNFDVPVTSPTIMNLKDKEDNCMVNSNLSFREDLVLSTIKPSQMDSDEEVIRCPEPGENVATQNHMDMCSESQVYISIGEFQNKAGVPEDECWTGQTSDAGTYPVADVDTSRRSPGPEDGQAPVLTYIDVKSSNKNPSRAEPLVAFNAQHESRSSRDKYGLDRTGLSKVVVGGSHQNAISSDKTTLHELSTLGKGIDQEGKMVLLSLKLTPSEPCDPLSSTLREPLDIRSSLKDSHTEEQEELSVLSGVIKRSSSIISDSGIESEPSSVAWSEARSRALELPSDREVLHPFVRRHALHRNSLEGGHTESNTSLPSGIQASLTSISSLPFEEDEREVALTKLTKSVSAPHISSPEEAAEDADTKQQDGGFAEPSDMHSKSQGSPGSCSQLCGDSGTDAGADHPLVEIVLDADNQQGPGYIDIPKGKGKQFDAQGHCLPDGRTENTPGVETKGLNLKIPRVIALENPRTRSLHRALEETPKGMPKDLNVGQQALSNSGISEVEGLSQHQVPELSCTSAADAINRNSTGQQSQSGSPCIMDDTAFNRGVNAFPEAKHKAGTVCPTVTHSVHSQVLKNQELKAGTSIMGSHLTSAETFTLDSLKAVEVVNLSVSCTATCLPFSSVPKETPARAGFSSKQTLFPITHQPLGSFGVVSTHSSTLDEEVSERMFRGRGRKFGRWNSPGCLCPWPGWEQCRPPAGKDFHRTGAPWRKTGLPNV

SEQ ID NO: 5498 - DNA, 6580 bp, Homo sapiens
aacaccagctcgcaggtgctgcggactccccagtccgcccgccgccgccgccgccgcaactgttggcggccagagacggcgaaagaggagagagagggacccaggagcgcggcccccgggggagagagaggggagccctgcagtggagacaggcagagagcagcagcctgcattcagcctgtgtccatgacagcaccgtgcacagccgggtctttcagatcttataccggaatgaagaggtacccataaatgatgctgtggtcttccgagttcatttactcttgggtggtgaaaggatggaagacgcactgagtgaagtagattttcaactcaaggtggatctgcactttacggacagtgaacagcagttgagggatgtggctggggcaccgatggtcagcagccgaacgcttggcctgcacttccacccccggaatggtctgcaccaccaggtcccggtcatgttcgactatttccacctgtctgtgatctcggtgaccgtccatgctgccctggtggctctgcagcagccattgatcagttttactcgtccaggaagaggctcctggcttggtaaaggtggcccagacaccggacaagaacagtctatcatttctctggaaaacttggtctttggagctgggtactgcaagccgacttcctcagagggaagcttctacatcacctctgagaactgcatgcagcacgcacacaagtggcaccgagacctgtgcctgttgctcctccacgcttaccggggtctccgtctccacttcctggtgatcatgcgggacatcccagagctgccacacacggagctggaggcccttgctgttgaagaaacactttctcagctgtgctcagagctacagatgttgaacaatccagagaagatcgctgagcagataagcaaggatctggcctggctcacgtcccacatgatgactctgtggacccagttcctggacacagtcactctgcactcccaagtgaccacttatctcacccaggaacaccacaccctgagggtccgaaggttttctgaggccttcttttacatggagcaccaaaaacttgcagtcctgacatttcaggagaatctgatacagacgcacagccagctgtccctggatatccggaactcggagtacctcactagcatgcccccgctgcctgcagagtgcctggacatcgacggcgattggaacaccctgccggtgatctttgaggacagatacgtggactgccctgcgacagggcataacttgagtgtttatcctaattttgatgttccagtgacaagtcctacaataatgaatctgaaagacaaggaagataactgtatggtaaatagcaatttatcttttagggaagaccttgtcttgtctaccataaaaccatcccaaatggattctgatgaagaagttataaggtgtccagagccaggtgagaatgtggccacacaaaatcatatggacatgtgctctgaatctcaggtgtatatatcaattggtgaatttcaaaacaaagcaggtgtgcctgaagatgaatgttggactggccaaacatctgatgctgggacatatccagtggcagatgtggatacttctagaaggagtccaggtccagaggatggacaggccccagtgctgacctacattgacgtaaaatctagcaataagaacccctccagagctgaacccctggtggccttcaatgctcagcatgagagtaggagctctagagataagtatggattagacaggactgggctaagcaaagtggtagtaggtggaagccaccaaaatgccatctcttcagacaaaacaactctccatgaattaagtactctaggaaagggaatagatcaagaggggaagatggtgctgctaagcttgaaactcaccccctctgagccctgtgatccactaagttctaccctgagggagcccttagatattaggtcttccctaaaggactctcacacagaagagcaggaggaactctcagtgctatccggggtcatcaagagatcttcatccatcatatctgattcaggcattgagagtgagccaagctccgtcgcctggtcagaggcccgaagcagggctctggagttgcccagtgatcgggaagtcttgcacccgtttgttcgaagacatgccctccaccggaactccctagagggtggacacacagaaagtaacacaagtttgccaagcggcatccaggcttctctcacctccattagctctttaccttttgaggaggatgagcgggaggtggcactcactaagttaaccaagtctgtatctgctccccacatcagtagcccagaggaggctgctgaagatgcggacaccaagcagcaagatggaggttttgctgaaccttcagatatgcacagcaagagccaaggttccccaggatcttgctctcaactttgtggtgactctggaacagatgctggagcagaccatcccctggtggagatagttttagatgctgacaaccagcagggccccggatacatagacatccccaaagggaaagggaagcagtttgatgctcaaggacactgtcttcctgatggcaggactgagaacactccaggtgttgaaaccaaaggtcttaatttaaaaataccacgcgtcatagcacttgaaaaccccaggaccagatctcttcatagagcacttgaggaaaccccaaagggcatgcctaaagacttgaatgtgggtcagcaagctctttccaacagtggcatctcagaggttgagggtctctctcaacatcaggtgcctgaattgagctgtacgtcagctgctgatgccatcaacaggaactcaacaggccagcaaagccaaagcggttcaccttgcattatggatgacacagcatttaatagaggagtgaatgccttcccggaggctaaacataaagcaggcactgtgtgccccactgtgacccattccgttcattcccaggttttgaaaaaccaagagctgaaggcaggcacttccatcatggggtcccatctgacttctgcagagacctttactctggacagcctgaaggctgtggaggttgtgaacttatctgtgtcttgcactgccacctgtctccctttctcatctgtgcccaaggagacccctgccagggctggattctcttccaaacagaccctgtttcccatcacccatcagcctttgggatcctttggagttgtttctacccattccagcacgttggatgaggaagtcagtgagaggatgtttagaggaagaggaagaaaatttggaagatggaattcacctggttgtctgtgtccatggcctggatgggaacagtgcagacctccggctggtaaagactttcatagaactggggctccctggaggaaaactggacttcctaatgtctgaaaagaatcagatggacacatttgcagattttgatactatgacggatcggttattggatgaaatcattcaacacattcagttgtacaacctctccatatcccgaattagcttcattggccattctcttggcaacatcatcatccgatcggtcctcacacggccccggttccggtattacctcaacaaactccacacgttcctgtcactctctgggcctcacctgggaaccctgtacaacaacagcaccctggttagtacaggcttatggctcatgcagaaactgaagaaatccgggtctctactgcagctgaccttcagggataatgctgatttgcgcaaatgtttcctctaccaactaagccaaaaaacagggctgcagtattttaaaaacgtcgtgctggttgcttctccccaagaccgttatgtgccatttcattcagccaggattgaaatgtgtaaaactgccctcaaagacagacacacagggccagtttatgcagaaatgatcaacaacctcctgggccctctggttgaagccaaggactgcactttaatccgacacaacgtgttccacgccctgcccaacactgccaacaccctgatcggccgagccgctcacatcgctgtgctggattcagaactcttcctggagaagtttttcttggtggcaggactcaactacttcaagtagtggctttgagggagcaggtctttggtaatgcttacgatcggtggagagctttagctgagacctgcttttacagacctcaccatttcagaatgaagcttcaacagcattgggggacggaggctcgggtggaacctgacatgagaggtgcttttgttttggagattcgagaaagctgagcaaatagactaaatgacaacaaactttgcttgaatttgtatagttacctggagtgtcattcaagatgttttctaggaaaaatatgagagaataaacagaatacttgggagttggtgagctccccttgctagccactactggcttactgagagattactccaatttaactagacttgccgaatatgttactagcttatagctttatcatttctgattaagtgcacacaagcatttcagaactcaggttaatctctgtgcagcagtggaacatatttgtgtaaatagaatcctcaatagattcaaatgtgtcagttgttcaagaaaatgtgatgcccatattcatattctctcctcatgttttctaaacaagggagcaaggaatgtgttacaaatcccagttctatttcataacagcagtgagcagggtgacttaaggtaaagagggataaaggtgacactattggtaaatacaagtttgttacaaagaaacatgactctagggacatactgaactatgaatagttgctccacctacttccccagaattcttctatgcagagccctgatccacaaattattttagtgattgcttacatctttgtctgtagtagggaacactgagtgagactaacctagcagaagggggcactgagatgaatgcacacacgtgtgaagctcctgctgatacacttccaaagacatgctatgttagcatttgatgcaattgcaaaaaattaaatccattaaagtggccagctgcttctcctctccatggaaggaggaaaacatctaaatggaggagtgctggattaaaacctcaggggagctctaagaagggtgctggctatctttcaatagaaatgtcttcttgccttaggaaaataaagggctaggaaaggtcactgcgttgataaaaaccaatagacgacagggacaaaagtgagatcagataggaggagaacaaccagactgaagactcaacataagctgttattggtaagtgactcaaaggggagttttgaaaattaccaggatgtttaatagtcaggtctcaaagactgagtatgttgtatgggctaaagtaagcctaaagaatcatttcgttgtatggaagagatgaatgaacctggacagtagggataagtaagacaggagcctaatcttttggagatgaaagctcctgcttctgcaaaaatcccttctgaagtgtggaaacgcatctaggaccagggttctcaatacctagaccatgactctaggtcactgatgccatggtaacaaaaccaagtaaatctaagctcatttgagaattttagatcctcttatgttaacaatgtgactttgaaaaataaaagcagaccatgggaatgagtccagatgggcagctttgcaggagtgtagacatgtggtattcttttgaagaaagagagggtcgttgagggagagttgaatgtcttgcaaaggcagagttccacacaatggatttagggtttctcagtgagtcctttctaaatgcttgttatatcctggtcataatgcatatgggttcactgagtcctctggtcactttccactggggatttttatctgagctcccgagtcagagctgggcatagactctggttcttcatgaggagtgctgtatttgctctgtaacctgggagacatttgttccctagtcgtgcagcacatggtattgtgtttcctgacctaggcaagtgcccatgctcagtacagaaccataagttggtagcagcttctcctttctggccaaatgatgggccctgtccctctgatgagtgcatttcatgttgtgtttccaattttcatcagcaatgttcgtcattccctggtcctttgaaagactgtgtagcccgcggttatggagccgggatgaatctgatgatcatcatcttctccaataaccagatgccatttttaacttcaatatgctgtctggacatagtgagaactaatggcaataaacgtccagctgcatggtgcacctcttttttataggggtgctctgctgtctttgtaaaccctctctggcctctgagcatctattataattgtgtagaaagtacatctctatattgtaaataagagtgtcgagtgttgcgtgtcatgcctcatttgaaaaggcttttttatgtctctttctattgaaatatagatatcgaatatataaatatatatacataaaatatatataaatatatattatgtaaaacagggacattctattattgattgtaaaaattataaacaaaatgcctgccaagat

SEQ ID NO: 5499 - protein, 1042 aa, Homo sapiens; identical to SEQ ID NO: 5497

SEQ ID NO: 5500 - DNA, 4733 bp, Homo sapiens
ggagctcttcacccagtgtagggtatggtttgtgaaggtatccctagagaaggtgactctgcggctgagcttgaaggaagagaattggtaggtgacaaagaagaggtaatgagccaaaaagatcatgtctgaaatacaaggaacggttgagttttcggtagagctacataaattttataatgtggatctctttcagagagggatgcagtctgaatttggcatttcacgtgcaggtgatatcagtaaatcctcatgatagacttacctccaaggctcattgtattaccagatccgagtgaccttgaaggtgtcttcaaggatcccccacagactgagtgcctccatcgctgggcagacagagagcagcagcctgcattcagcctgtgtccatgacagcaccgtgcacagccgggtctttcagatcttataccggaatgaagaggtacccataaatgatgctgtggtcttccgagttcatttactcttgggtggtgaaaggatggaagacgcactgagtgaagtagattttcaactcaaggtggatctgcactttacggacagtgaacagcagttgagggatgtggctggggcaccgatggtcagcagccgaacgcttggcctgcacttccacccccggaatggtctgcaccaccaggtcccggtcatgttcgactatttccacctgtctgtgatctcggtgaccgtccatgctgccctggtggctctgcagcagccattgatcagttttactcgtccaggaagaggctcctggcttggtaaaggtggcccagacaccggacaagaacagtctatcatttctctggaaaacttggtctttggagctgggtactgcaagccgacttcctcagagggaagcttctacatcacctctgagaactgcatgcagcacgcacacaagtggcaccgagacctgtgcctgttgctcctccacgcttaccggggtctccgtctccacttcctggtgatcatgcgggacatcccagagctgccacacacggagctggaggcccttgctgttgaagaaacactttctcagctgtgctcagagctacagatgttgaacaatccagagaagatcgctgagcagataagcaaggatctggcctggctcacgtcccacatgatgactctgtggacccagttcctggacacagtcactctgcactcccaagtgaccacttatctcacccaggaacaccacaccctgagggtccgaaggttttctgaggccttcttttacatggagcaccaaaaacttgcagtcctgacatttcaggagaatctgatacagacgcacagccagctgtccctggatatccggaactcggagtacctcactagcatgcccccgctgcctgcagagtgcctggacatcgacggcgattggaacaccctgccggtgatctttgaggacagatacgtggactgccctgcgacagggcataacttgagtgtttatcctaattttgatgttccagtgacaagtcctacaataatgaatctgaaagacaaggaagataactgtatggtaaatagcaatttatcttttagggaagaccttgtcttgtctaccataaaaccatcccaaatggattctgatgaagaagttataaggtgtccagagccaggtgagaatgtggccacacaaaatcatatggacatgtgctctgaatctcaggtgtatatatcaattggtgaatttcaaaacaaagcaggtgtgcctgaagatgaatgttggactggccaaacatctgatgctgggacatatccagtggcagatgtggatacttctagaaggagtccaggtccagaggatggacaggccccagtgctgacctacattgacgtaaaatctagcaataagaacccctccagagctgaacccctggtggccttcaatgctcagcatgagagtaggagctctagagataagtatggattagacaggactgggctaagcaaagtggtagtaggtggaagccaccaaaatgccatctcttcagacaaaacaactctccatgaattaagtactctaggaaagggaatagatcaagaggggaagatggtgctgctaagcttgaaactcaccccctctgagccctgtgatccactaagttctaccctgagggagcccttagatattaggtcttccctaaaggactctcacacagaagagcaggaggaactctcagtgctatccggggtcatcaagagatcttcatccatcatatctgattcaggcattgagagtgagccaagctccgtcgcctggtcagaggcccgaagcagggctctggagttgcccagtgatcgggaagtcttgcacccgtttgttcgaagacatgccctccaccggaactccctagagggtggacacacagaaagtaacacaagtttgccaagcggcatccaggcttctctcacctccattagctctttaccttttgaggaggatgagcgggaggtggcactcactaagttaaccaagtctgtatctgctccccacatcagtagcccagaggaggctgctgaagatgcggacaccaagcagcaagatggaggttttgctgaaccttcagatatgcacagcaagagccaaggttccccaggatcttgctctcaactttgtggtgactctggaacagatgctggagcagaccatcccctggtggagatagttttagatgctgacaaccagcagggccccggatacatagacatccccaaagggaaagggaagcagtttgatgctcaaggacactgtcttcctgatggcaggactgagaacactccaggtgttgaaaccaaaggtcttaatttaaaaataccacgcgtcatagcacttgaaaaccccaggaccagatctcttcatagagcacttgaggaaaccccaaagggcatgcctaaagacttgaatgtgggtcagcaagctctttccaacagtggcatctcagaggttgagggtctctctcaacatcaggtgcctgaattgagctgtacgtcagctgctgatgccatcaacaggaactcaacaggccagcaaagccaaagcggttcaccttgcattatggatgacacagcatttaatagaggagtgaatgccttcccggaggctaaacataaagcaggcactgtgtgccccactgtgacccattccgttcattcccaggttttgaaaaaccaagagctgaaggcaggcacttccatcatggggtcccatctgacttctgcagagacctttactctggacagcctgaaggctgtggaggttgtgaacttatctgtgtcttgcactgccacctgtctccctttctcatctgtgcccaaggagacccctgccagggctggattctcttccaaacagaccctgtttcccatcacccatcagcctttgggatcctttggagttgtttctacccattccagcacgttggatgaggaagtcagtgagaggatgtttagtttttatcaggccaaagaaaaatttaaaaaagaactgaagattgaaggatttctgtacagtgacttaactgtactagcttctgatataccatatttcccaccagaggaagaggaagaaaatttggaagatggaattcacctggttgtctgtgtccatggcctggatgggaacagtgcagacctccggctggtaaagactttcatagaactggggctccctggaggaaaactggacttcctaatgtctgaaaagaatcagatggacacatttgcagattttgatactatgacggatcggttattggatgaaatcattcaacacattcagttgtacaacctctccatatcccgaattagcttcattggccattctcttggcaacatcatcatccgatcggtcctcacacggccccggttccggtattacctcaacaaactccacacgttcctgtcactctctgggcctcacctgggaaccctgtacaacaacagcaccctggttagtacaggcttatggctcatgcagaaactgaagaaatccgggtctctactgcagctgaccttcagggataatgctgatttgcgcaaatgtttcctctaccaactaagccaaaaaacagggctgcagtattttaaaaacgtcgtgctggttgcttctccccaagaccgttatgtgccatttcattcagccaggattgaaatgtgtaaaactgccctcaaagacagacacacagggccagtttatgcagaaatgatcaacaacctcctgggccctctggttgaagccaaggactgcactttaatccgacacaacgtgttccacgccctgcccaacactgccaacaccctgatcggccgagccgctcacatcgctgtgctggattcagaactcttcctggagaagtttttcttggtggcaggactcaactacttcaagtagtggctttgagggagcaggtctttggtaatgcttacgatcggtggagagctttagctgagacctgcttttacagacctcaccatttcagaatgaagcttcaacagcattgggggacggaggctcgggtggaacctgacatgagaggtgcttttgttttggagattcgagaaagctgagcaaatagactaaatgacaacaaactttgcttgaatttgtatagttacctggagtgtcattcaagatgttttctaggaaaaatatgagagaataaacagaatacttgggagttggtgagctccccttgctagcc

SEQ ID NO: 5501 - protein, 1307 aa, Homo sapiens
MEDALSEVDFQLKVDLHFTDSEQQLRDVAGAPMVSSRTLGLHFHPRNGLHHQVPVMFDYFHLSVISVTVHAALVALQQPLISFTRPGRGSWLGKGGPDTGQEQSIISLENLVFGAGYCKPTSSEGSFYITSENCMQHAHKWHRDLCLLLLHAYRGLRLHFLVIMRDIPELPHTELEALAVEETLSQLCSELQMLNNPEKIAEQISKDLAWLTSHMMTLWTQFLDTVTLHSQVTTYLTQEHHTLRVRRFSEAFFYMEHQKLAVLTFQENLIQTHSQLSLDIRNSEYLTSMPPLPAECLDIDGDWNTLPVIFEDRYVDCPATGHNLSVYPNFDVPVTSPTIMNLKDKEDNCMVNSNLSFREDLVLSTIKPSQMDSDEEVIRCPEPGENVATQNHMDMCSESQVYISIGEFQNKAGVPEDECWTGQTSDAGTYPVADVDTSRRSPGPEDGQAPVLTYIDVKSSNKNPSRAEPLVAFNAQHESRSSRDKYGLDRTGLSKVVVGGSHQNAISSDKTTLHELSTLGKGIDQEGKMVLLSLKLTPSEPCDPLSSTLREPLDIRSSLKDSHTEEQEELSVLSGVIKRSSSIISDSGIESEPSSVAWSEARSRALELPSDREVLHPFVRRHALHRNSLEGGHTESNTSLPSGIQASLTSISSLPFEEDEREVALTKLTKSVSAPHISSPEEAAEDADTKQQDGGFAEPSDMHSKSQGSPGSCSQLCGDSGTDAGADHPLVEIVLDADNQQGPGYIDIPKGKGKQFDAQGHCLPDGRTENTPGVETKGLNLKIPRVIALENPRTRSLHRALEETPKGMPKDLNVGQQALSNSGISEVEGLSQHQVPELSCTSAADAINRNSTGQQSQSGSPCIMDDTAFNRGVNAFPEAKHKAGTVCPTVTHSVHSQVLKNQELKAGTSIMGSHLTSAETFTLDSLKAVEVVNLSVSCTATCLPFSSVPKETPARAGFSSKQTLFPITHQPLGSFGVVSTHSSTLDEEVSERMFSFYQAKEKFKKELKIEGFLYSDLTVLASDIPYFPPEEEEENLEDGIHLVVCVHGLDGNSADLRLVKTFIELGLPGGKLDFLMSEKNQMDTFADFDTMTDRLLDEIIQHIQLYNLSISRISFIGHSLGNIIIRSVLTRPRFRYYLNKLHTFLSLSGPHLGTLYNNSTLVSTGLWLMQKLKKSGSLLQLTFRDNADLRKCFLYQLSQKTGLQYFKNVVLVASPQDRYVPFHSARIEMCKTALKDRHTGPVYAEMINNLLGPLVEAKDCTLIRHNVFHALPNTANTLIGRAAHIAVLDSELFLEKFFLVAGLNYFK

SEQ ID NO: 5502 - DNA, 3855 bp, Homo sapiens
aacaccagctcgcaggtgctgcggactccccagtccgcccgccgccgccgccgccgcaactgttggcggccagagacggcgaaagaggagagagagggacccaggagcgcggcccccgggggagagagaggggagccctgcagtggagacaggtaatgagccaaaaagatcatgtctgaaatacaaggaacggttgagttttcggtagagctacataaattttataatgtggatctctttcagagagggtattaccagatccgagtgaccttgaaggtgtcttcaaggatcccccacagactgagtgcctccatcgctgggcagacagagagcagcagcctgcattcagcctgtgtccatgacagcaccgtgcacagccgggtctttcagatcttataccggaatgaagaggtacccataaatgatgctgtggtcttccgagttcatttactcttgggtggtgaaaggatggaagacgcactgagtgaagtagattttcaactcaaggtggatctgcactttacggacagtgaacagcagttgagggatgtggctggggcaccgatggtcagcagccgaacgcttggcctgcacttccacccccggaatggtctgcaccaccaggtcccggtcatgttcgactatttccacctgtctgtgatctcggtgaccgtccatgctgccctggtggctctgcagcagccattgatcagttttactcgtccaggaagaggctcctggcttggtaaaggtggcccagacaccggacaagaacagtctatcatttctctggaaaacttggtctttggagctgggtactgcaagccgacttcctcagagggaagcttctacatcacctctgagaactgcatgcagcacgcacacaagtggcaccgagacctgtgcctgttgctcctccacgcttaccggggtctccgtctccacttcctggtgatcatgcgggacatcccagagctgccacacacggagctggaggcccttgctgttgaagaaacactttctcagctgtgctcagagctacagatgttgaacaatccagagaagatcgctgagcagataagcaaggatctggcctggctcacgtcccacatgatgactctgtggacccagttcctggacacagtcactctgcactcccaagtgaccacttatctcacccaggaacaccacaccctgagggtccgaaggttttctgaggccttcttttacatggagcaccaaaaacttgcagtcctgacatttcaggagaatctgatacagacgcacagccagctgtccctggatatccggaactcggagtacctcactagcatgcccccgctgcctgcagagtgcctggacatcgacggcgattggaacaccctgccggtgatctttgaggacagatacgtggactgccctgcgacagggcataacttgagtgtttatcctaattttgatgttccagtgacaagtcctacaataatgaatctgaaagacaaggaagataactgtatggtaaatagcaatttatcttttagggaagaccttgtcttgtctaccataaaaccatcccaaatggattctgatgaagaagttataaggtgtccagagccaggtgagaatgtggccacacaaaatcatatggacatgtgctctgaatctcaggtgtatatatcaattggtgaatttcaaaacaaagcaggtgtgcctgaagatgaatgttggactggccaaacatctgatgctgggacatatccagtggcagatgtggatacttctagaaggagtccaggtccagaggatggacaggccccagtgctgacctacattgacgtaaaatctagcaataagaacccctccagagctgaacccctggtggccttcaatgctcagcatgagagtaggagctctagagataagtatggattagacaggactgggctaagcaaagtggtagtaggtggaagccaccaaaatgccatctcttcagacaaaacaactctccatgaattaagtactctaggaaagggaatagatcaagaggggaagatggtgctgctaagcttgaaactcaccccctctgagccctgtgatccactaagttctaccctgagggagcccttagatattaggtcttccctaaaggactctcacacagaagagcaggaggaactctcagtgctatccggggtcatcaagagatcttcatccatcatatctgattcaggcattgagagtgagccaagctccgtcgcctggtcagaggcccgaagcagggctctggagttgcccagtgatcgggaagtcttgcacccgtttgttcgaagacatgccctccaccggaactccctagagggtggacacacagaaagtaacacaagtttgccaagcggcatccaggcttctctcacctccattagctctttaccttttgaggaggatgagcgggaggtggcactcactaagttaaccaagtctgtatctgctccccacatcagtagcccagaggaggctgctgaagatgcggacaccaagcagcaagatggaggttttgctgaaccttcagatatgcacagcaagagccaaggttccccaggatcttgctctcaactttgtggtgactctggaacagatgctggagcagaccatcccctggtggagatagttttagatgctgacaaccagcagggccccggatacatagacatccccaaagggaaagggaagcagtttgatgctcaaggacactgtcttcctgatggcaggactgagaacactccaggtgttgaaaccaaaggtcttaatttaaaaataccacgcgtcatagcacttgaaaaccccaggaccagatctcttcatagagcacttgaggaaaccccaaagggcatgcctaaagacttgaatgtgggtcagcaagctctttccaacagtggcatctcagaggttgagggtctctctcaacatcaggtgcctgaattgagctgtacgtcagctgctgatgccatcaacaggaactcaacaggccagcaaagccaaagcggttcaccttgcattatggatgacacagcatttaatagaggagtgaatgccttcccggaggctaaacataaagcaggcactgtgtgccccactgtgacccattccgttcattcccaggttttgaaaaaccaagagctgaaggcaggcacttccatcatggggtcccatctgacttctgcagagacctttactctggacagcctgaaggctgtggaggttgtgaacttatctgtgtcttgcactgccacctgtctccctttctcatctgtgcccaaggagacccctgccagggctggattctcttccaaacagaccctgtttcccatcacccatcagcctttgggatcctttggagttgtttctacccattccagcacgttggatgaggaagtcagtgagaggatgtttagaggaagaggaagaaaatttggaagatggaattcacctggttgtctgtgtccatggcctggatgggaacagtgcagacctccggctggtaaagactttcatagaactggggctccctggaggaaaactggacttcctaatgtctgaaaagaatcagatggacacatttgcagattttgatactatgacggatcggttattggatgaaatcattcaacacattcagttgtacaacctctccatatcccgaattaggtaaaaggaaaccacaggtagttaatgctgggggaagaggggggacatttttgagtgtttgctgtataaaagcaataatatgatgccttctgtataccactgagctaagctaacttgtgacttttaataaattacttttaaagcagaagt

SEQ ID NO: 5503 - protein, 1141 aa, Homo sapiens
MSEIQGTVEFSVELHKFYNVDLFQRGYYQIRVTLKVSSRIPHRLSASIAGQTESSSLHSACVHDSTVHSRVFQILYRNEEVPINDAVVFRVHLLLGGERMEDALSEVDFQLKVDLHFTDSEQQLRDVAGAPMVSSRTLGLHFHPRNGLHHQVPVMFDYFHLSVISVTVHAALVALQQPLISFTRPGRGSWLGKGGPDTGQEQSIISLENLVFGAGYCKPTSSEGSFYITSENCMQHAHKWHRDLCLLLLHAYRGLRLHFLVIMRDIPELPHTELEALAVEETLSQLCSELQMLNNPEKIAEQISKDLAWLTSHMMTLWTQFLDTVTLHSQVTTYLTQEHHTLRVRRFSEAFFYMEHQKLAVLTFQENLIQTHSQLSLDIRNSEYLTSMPPLPAECLDIDGDWNTLPVIFEDRYVDCPATGHNLSVYPNFDVPVTSPTIMNLKDKEDNCMVNSNLSFREDLVLSTIKPSQMDSDEEVIRCPEPGENVATQNHMDMCSESQVYISIGEFQNKAGVPEDECWTGQTSDAGTYPVADVDTSRRSPGPEDGQAPVLTYIDVKSSNKNPSRAEPLVAFNAQHESRSSRDKYGLDRTGLSKVVVGGSHQNAISSDKTTLHELSTLGKGIDQEGKMVLLSLKLTPSEPCDPLSSTLREPLDIRSSLKDSHTEEQEELSVLSGVIKRSSSIISDSGIESEPSSVAWSEARSRALELPSDREVLHPFVRRHALHRNSLEGGHTESNTSLPSGIQASLTSISSLPFEEDEREVALTKLTKSVSAPHISSPEEAAEDADTKQQDGGFAEPSDMHSKSQGSPGSCSQLCGDSGTDAGADHPLVEIVLDADNQQGPGYIDIPKGKGKQFDAQGHCLPDGRTENTPGVETKGLNLKIPRVIALENPRTRSLHRALEETPKGMPKDLNVGQQALSNSGISEVEGLSQHQVPELSCTSAADAINRNSTGQQSQSGSPCIMDDTAFNRGVNAFPEAKHKAGTVCPTVTHSVHSQVLKNQELKAGTSIMGSHLTSAETFTLDSLKAVEVVNLSVSCTATCLPFSSVPKETPARAGFSSKQTLFPITHQPLGSFGVVSTHSSTLDEEVSERMFRGRGRKFGRWNSPGCLCPWPGWEQCRPPAGKDFHRTGAPWRKTGLPNV

SEQ ID NO: 5504 - DNA, 684 bp, Homo sapiens
attgaatcaatacagcctgtgtttctcatgatcgcctggtccttgagactgttgataaggcattagagagcttcatggttgttgataatctgaggaacgccctctctagtgacagactgtcacggacatggaggattttttgaagtgccttttcaattttatgagttgaggatcctgcagccctggagatttataattgtccctgccactgctgctttgtgccttcttctagtttctgccttgtttatctggttttcttcccccatagtattttggcaattgtgaaaagtggttctggagaagtaccaacaaatgctcttactgcccgagaactgacacttttggaggctactgatgtttacggcaaaatagcctgagtcctttaatgtccttctttgattgttctaccagctacgattcctgcaaatccctgtcattcttcatcacaaagttatagaggtaatgagccaaaaagatcatgtctgaaatacaaggaacggttgagttttcggtagagctacataaattttataatgtggatctctttcagagagggtattaccagatccgagtgaccttgaaggtgtcttcaaggatcccccacagactgagtgcctccatcgctgggcagacagaggttctaaatatacatatgtcagaacaagaaccagcacaaggtaagta

SEQ ID NO: 5505 - protein, 67 aa, Homo sapiens
MSEIQGTVEFSVELHKFYNVDLFQRGYYQIRVTLKVSSRIPHRLSASIAGQTEVLNIHMSEQEPAQG

SEQ ID NO: 5506 - DNA, 531 bp, Homo sapiens
gatttgggagccaaaggaaggagctcttcacccagtgtagggtatggtttgtgaaggtatccctagagaaggtgactctgcggctgagcttgaaggaagagaattggtaggtgacaaagaagaggtaatgagccaaaaagatcatgtctgaaatacaaggaacggttgagttttcggtagagctacataaattttataatgtggatctctttcagagaggaatctattaaatgtccatgaggtgatatttgtaaagcacctagtaaaatagaggcccaggttttacagtacaagccaagaggacccaagccctctatggactactccattgattgtaattgagactctgaaccaaacatcctcagctggtcagtgccagggctagaacagactgtcgatctggtcaagctctgaatgtatgttcctctctacattttatgcaggtattaccagatccgagtgaccttgaaggtgtcttcaaggatcccccacagactgagtgcctccatcgctgggcagacaggtgagcag

SEQ ID NO: 5507 - protein, 38 aa, Homo sapiens
MYVPLYILCRYYQIRVTLKVSSRIPHRLSASIAGQTGE

SEQ ID NO: 5508 - DNA, 641 bp, Homo sapiens
gtagggtatggtttgtgaaggtatccctagagaaggtgactctgcggctgagcttgaaggaagagaattggtaggtgacaaagaagaggaatataacacattcctgtcattaagagaagctgctgacttgaaatgggagttcagtaatggcagtgagaggagatgaagtaacaccgttggaggaggtcagagcacagggtgccttaaaaacaagccacagcatttggactttattctccttatttatgccatcctgtttatcagtattgatctgcagcactccaaggtccaagggacaaaggcaaggaaatctccaacctctcagaatatgagaagatactatagtaaatatgtcaataaattttattctacaacagctctatgtggcaggttctcatctccattgtacagaacaagaaattaagactcagaaatcttaaaggatttgctgaaggttgcatggcccttataaaatgttaccagctcatttaacttcaagacctcttcctgctatgctcacactgtttggaaagtcacattctaatcagacttgatggctaaatcagtcagaatcaaatatgcccacctatgttgacatgctgtgtaaagattttctgttcaacgtgaacacatggttgcaa

SEQ ID NO: 5509 - protein, 52 aa, Homo sapiens
MVCEGIPREGDSAAELEGRELVGDKEEEYNTFLSLREAADLKWEFSNGSERR

SEQ ID NO: 5510 - DNA, 5066 bp, Homo sapiens
aagagggatctgtggtgatttgggagccaaaggaaggagctcttcacccagtgtagggtatggtttgtgaaggtatccctagagaaggtgactctgcggctgagcttgaaggaagagaattggtaggtgacaaagaagaggtccactcatatgatcgaatttgaatcaaggtctcaagctaatctaaggaaaaaaaaaaagcagagaagctatatggcagaaagcagagaattggaagggaagtcacaaaagaagagaacatacttgcaggcattgtttcaggtagtgagtgaaatctgcaaacaaacagaaattctttctctcgtggaatgtatgtactaactggagaaagcattgtttaaaaaataagcaaataggatgtcaggctgtgttcaagagagtgtatttagttcttcacacaatagtgatgctgatggataaagatttccagtttggtctcaatccaataaaacacccccattcaaagtgtcattgtcccactctttccaactgatgccctaaagctcacagaagagacttgttgggtgtgcaaatttggctttcctcataattctgcaacctgcataagaaagttttagttctgattttcagccttatcttccctgtgactacatgaaataagagattattttagggctaccccagaaacaaacttgttctctcatcagagctgagttgatagacagtctgaaggctagatcttgttattttcctctgtttactctccagtgctgtaaaaaatatccatcccagcatgcttgtattcatcattaacattgtagccacgtggagcagccactcggtcatccaaggcacttgctagagtgagcacttcctccactgaggctggagggtctacgatgacttcactcacatgtgtgggggtcttggtgcaggcgctaactgttcctctctttctttaaggtctgtgtttagtattctagtgtaggctttgttacatagtggcaggaacactccaaaatagcaaagtagaaggctcaggaactcacacagtttcacttctgcatattcagttaccacccagaccaaggggcatggaaattggctctacctcttgagttgcatgtcatgaaatatcatagccactttttcaatcaattagaggaagcctacagtatgagtatatctcagaaatgtgatagattttaaattgatcttgcctttctaaagatgtttcccatctatactctgtgagagacacctctaaaatatctcatgtcaaaaaagtattgggtaaggtgtccagtaacctaggtttgtggtctggctctggaactgatttatgttatcttgtaatgatagcaatgatgatgattttggtgatgacggtgatggtgattttattagatatgatttagacaatgcagttagtactttcatgtgcattattataaatatttaaattctaattttaccttttttggacttttgtatgtattatctgttaaatataaagcccatattttacttttgtcctagatatttgtcactatcttgcacccatttctccctcctaatagcacccagacattcctctagatgaattgtctcttgaatgtatgctcttggttgaaagtaaccccagaaatatgccttcttctggggtggcttaagggttcctgagacatttatttgcaagagcatagccaaaagctggggcgatgaccttaatatggccaggaagctacctctcacctggaactttaagtcttaactgagatgagtcaacacaaaagaaaacattatagttcctgcagcccagtggtgggaacctggtgagcttgtcaagttctcactgatgagactggcaagaacaccctgatagctcttagttcttagccttgttcatcacactatcttccctatgatcctcgcacctgcactccagttctccagtgggtccattcttgcacaggtaagccaggattagtgttggcatcccaggaaccatgactgcttcagttatctattgaattactttagaagtacctggagtgatggaaagtgcttggccaaagtttacaaagccctgtagccaataactggttccaaatttcaggtctgccttttctgctcacatttcaacattggacagtcaaactttctaagcacgaatttcttcagttgtaacatgggacacaataatacatccctagcagaggggttaggattaaattagagagcagctgtgaagcacctgggagagcttctggcacacagtaacagtggaaagttctggcactacagtagaaagttctttccctttctgttaatgttaatgcttcatccccattcacagagactggagtatcccttgactactccagtcaaagggaaacccaacatgacatgttccctccccctaggaaatgtcctcctctgatgttatgaggtcggcctatgaagctttaccttggagtttgaagatgagactggtgtttgtaacccatgaggactactgaggtcacatggtgtagtggaatgagaatgggatttgggatcaggcaggtctgaattcatacctaatgatgacatatgtgattagctgcttaatcttgaacgtcatttattgtcctatgtgctatgattctctcatattgaccacacagggccattatgaaatgataattggtaatttacatgcaggttctttgtaacctagaagaatattatctttgtactggagcctcctcaaagattttcaggtatatacacaccagaaactttgccttgtacagctcctggtggataaatgaaggccttcaaatgggcaggaaataatccaatttccatgaaagttaattgagctctgtgttttctaaaggctaatagcctggtgagagatgtcctgagtcaagctaatgtgatgacccacttgtttttttaggtaccagttatggaacagaagccacatctgtcactgataacctgtttgtatagtgacctcttccaccccacccacaaggttgccatggcaattttaggtcaagaagatcatcccattgaaagacaggaaatgctaaggagtaaaatgcagtccccaggaaacctggttttagtccttgctacatattattaaatggctggtccagtatctggttgggactactgtgccaggcatcatcctcaggtgatgtctgatcatcctggcctgtctttggcaagaatccagttcagtgggttttgccagaatccttttacttctgaggttttctcttagttgttttccatcctctgatccctctcttgttccttggttatatatttccccttgcttgtgctgtattcaaaattgaacccagttttatattgaagcatcttttctcctgtttcaataatccagaatagagtctgtttctaccactttaactactgcctagctctgtttttttctttgatagagctcagaagtgcaattcaaatttgatttgtagatgtagcagcaatcaagatttagctggtatttgaagacactcatattatcactctttctactaccctttattatattttttgattctgccccacattatttttgctaaggaaggagagttccaggaactctcatggagtacttgagacatggctcttcaatagccacccggcaccttctcttagataagaggtgtgaaattataggagctccttctcgcttgagagccccttgagtaataattatttaaaaaaagctgttataataaaactttgcatttaaattgcctcttattcttaggatgtcaaagtgctttacaaacatgaattgctagaaaccttttaggttaattaaaatgagcaggtttcccagacaaagaaggtgactgtttttgtactctcgggtgtttttacaggtgagcgaattgaagcacaaataagttctttgactaatcaaatagagatgttctgagaacaggtgatttcagcattagcacatcaaccatgctaccaaatttcattgcccttcggaattataatgacaataatgtagtgattcctgaattctggtattcttaataagaatatttgtgctactatttactgaatggctgcagtaagccatgcattatgcctggcactgggtttgtggtagtgtgttgtgttctcacaatgccactgtgaaataagtcttatcttcactttatgctgctgtaagataggatttatcctcactttacagccctggacactcagtttgaaagcagctgagccacttgtcacgggtcctgcagctaggaaatggcagagtgtattagtccatattcacactgctatgaagaactgcctgagacggggtaatttataaagaaaataagtttaattgattcacagttcagcatggctggggaggcctcaggaagcttacaatcatgacataaggggaaggagaaacaaggcaccttcttcacaaggcggcaggaaggagaggtatcgagtgaagggggaagagccccttataaaaccatcagatcccatgagaactcactcattaccacaagaacagcatgagagtaactgcccccatgatccaattacctcccaccaggttccttccatgacaggtggggattatggggattataattcaagatgagttttgggtagggacacaaagcctaactatatcacagagctagggttttaacccatgtttgtttgattgctgtgtctatattcttcttctctaccaatatcattaccaaacgttattactttattcttctctatttctaaacccctgaggaatataacacattcctgtcattaagagaagctgctgacttgaaatgggagttcagtaatggcagtgagaggagatgaagtaacaccgttggaggaggtcagagcacagggtgccttaaaaacaagccacagcatttggactttattctccttatttatgccatcctgtttatcagtattgatctgcagcactccaaggtccaagggacaaaggcaaggaaatctccaacctctcagaatatgagaagatactatagtaaatatgtcaataaattttattctacaac

SEQ ID NO: 5511 - protein, 34 aa, Homo sapiens
MVCEGIPREGDSAAELEGRELVGDKEEVHSYDRI

SEQ ID NO: 5512 - DNA, 864 bp, Homo sapiens
agcccttctgtgccacactctgattctttgtgtgtaaagtgattgcattcgcaaaccaaccctaagagggtcccaggtgtgcttagaacagtgcctggctgtgggagatactggaagatgctgtcatcttatcattgttgctgttgacttgaatccaaggttattgtggacagtagatggctcagagacaggcatttccaaaagcatggaaattcacaggcacgcacaggtgggcatgaaaacacagaaattcacagacacacgcaggtgggcatgaaaacacggaaattcacagacacacaggtgggcatgaaaacacggaaattcacagacacgcaggtgggcatgaaaacacggaaattcacagacccgcaggtgggcatgaaaacacggaaattcatagacttgcaggtgggcgtgaaaacacggaaattcacagacactcgcaggtgggcgtgaaaacacggaaattcacagacactcgcaggtgggcgtgaaaacacggaaattcacagacacaggtgggtgtgaaaacacggaaattcacagacgcacaggtgggtgtgaaaacacggaaattcgcggacacgcacaggtgggcgtgaaaacacggaaattcacagacacgcaggtgggcatgaaaacacgaaaattcacagacacacaggtggatatgaaaacagaaattcacagacacgggcaggtgggcatgaaaacacggaaattcacagacacgcaggtgggcgtgaaaacacggaaattcacagacgcacaggtgggcgtgaaaacggaaattcacagacgcaggtgggcatgaaaacacggaaattcacagacacgcaggtgggcgtgaaaacacggaaa

SEQ ID NO: 5513 - protein, 61 aa, Homo sapiens [sequence omitted]

SEQ ID NO: 5514 - DNA, 247 bp, Homo sapiens
gtgtctgtgaatttccgtgttttcatgcccacctgtgtgtctgtgaattttcgtgttttcatgcccacctgcgtgtctgtgaatttccgtgttttcacgcccacctgtgcgtgtccgcgaatttccgtgttttcacacccacctgtgcgtctgtgaatttccgtgttttcacacccacctgtgtctgtgaatttccgtgttttcacgcccacctgcgagtgtctgtgaatttccgtgttttcacgcc

SEQ ID NO: 5515 - protein, 43 aa, Homo sapiens
MPTCVSVNFRVFMPTCVSVNFRVFTPTCACPRISVFSHPPVRL

SEQ ID NO: 5516 - DNA, 661 bp, Homo sapiens
ggccgcagcctcgcagcgctctctccgcgcccgcgtcgctgactgaccgcccggccggccggccgagggagcagcccccgcccggacccgcagccgcctcccgaccccggtgcgcccggggctccgcgcccccgtagcccctgcccggcccggcccggccgccccgccgcccccgcggccccggccggaggagacagatcatccagtcactcgatggggattaccagcggaccacctgtttgtatcaccttcccacctctctgtagcaagaaaaatcacttcagcacctcttcagtaataatgatgaaactggtattaactgaatggcaattatggatttttaactctaattcacagtaaaccagcaagccatatgtttaaaatccaaccaaaaatcgttctgtgttgctgcatgtctcataccgttgtgagaagttgtgagatagccacttgtgcaaagaggaatgtaagtgttacctgcccgaggaacacagcagaagcagaaagagaagacgtcttaatttatcattacagatatatgaaagcattatttatatagatagaatatatagataaatacatatatttttggtggtaatgaaaatggctccgcagaatgccgacccggaatctatgcaagttcaagagttatccgtgcccc

SEQ ID NO: 5517 - protein, 61 aa, Homo sapiens
MFKIQPKIVLCCCMSHTVVRSCEIATCAKRNVSVTCPRNTAEAEREDVLIYHYRYMKALFI

SEQ ID NO: 5518 - DNA, 584 bp, Homo sapiens
agagaggtgggaaggtgatacaaacaggtggtccgctggtaatccccatcgagtgactggatgatctgcaaaagaggaaaacaacccggccagagagtcaggggacggccaccagatggccctgtggaccgccgcccgacccccgagcaagccgtgtgccccgagggcccgacccaagatcacacagctctctgccactcactctggaggagaccagaaacctcgaggtgctgtcttcactcggctcctctctcacacagccctgatggagaaggtgggtccctggcacgtgggccccaggagggagaagactccgctgtacaggaggttctggaaggaagccgtgcgcctggctcttacgtcccagctcttccctacatcttctttcacgctgcagcggaaaccagaatgcctactaattccttaagaaccaaaggttcaagtggtgctacctatgtatttgcttcttacgtcccctgaacgtcgctacgattccacacgacagccctcgagaattctttcaagttttccaaatgtcctctaccgtagaaacatctcaattaaaacaagagtttccaaactgt

SEQ ID NO: 5519 - protein, 139 aa, Homo sapiens
MICKRGKQPGQRVRGRPPDGPVDRRPTPEQAVCPEGPTQDHTALCHSLWRRPETSRCCLHSAPLSHSPDGEGGSLARGPQEGEDSAVQEVLEGSRAPGSYVPALPYIFFHAAAETRMPTNSLRTKGSSGATYVFASYVP

SEQ ID NO: 5520 - DNA, 1802 bp, Homo sapiens
gctggcctcctggtcagaccccactgaggagacgggccccgtggctggcatcctggacacggagacgctggagaaggtgtccatcaccgaggccatgcaccggaacctggtggataacatcacggggcagcggctgctggaggcgcaggcctgcaccgggggcatcatcgaccccagcaccggtgagcgcttccctgtcaccgacgccgtcaacaagggcctggtggacaagatcatggtggaccgcatcaacctggcccagaaggccttctgcggcttcgaggacccacgcaccaagaccaagatgtcggccgcccaggccctgaagaagggctggctctactacgaggccggccagcgcttcctggaggtgcagtacctgaccggcggcttgatcgagcccgacacgccgggccgcgtgcccctggacgaggccctgcagcgcggcacggtggacgcccgcaccgcacagaagctgcgtgacgtgggcgcctactccaagtacctcacctgccctaagaccaagctcaagatctcctataaggacgcgctggaccgcagcatggtggaggagggcacggggctgcggctgctggaggctgccgcgcagtccaccaagggctactacagcccctacagcgtcagcggctccggctctaccgctggctcccgcaccggctcgcgcaccggctcccgggccggctcccgccgcggcagctttgacgccaccggctccggcttctccatgaccttctcttcatcctcctactcctcctcgggctacggccgccgctacgcctcggggtcctcggcctccctggggggccctgagtctgccgtggcctgaggctgcctgcgcccaccccgctctgcatgcggcccagcccggctcccaccgaggcgcgggggccgttttcaacgcttaaaggtgtcttcctcccaagtggtgcctaaagtttaaccaaaaagaccagactaatatattaatatatatctgctgtccagacagcctgtatcttgggggacagggctggcccagccctgctggccgcctcaccccctcgggtctcctcactcccttctacctgccactcacacagccaggtgccttggagggtcccaagctgggccccagcccaccctcctgtcttcccagggtagcccgcctgccagtcctagctgcacagggcagctgggcccaaccctcctctctcccagtctacccagagaagccccttccccatgggaagacgaggccctcgggcccagcccccacagtgctgtctgatctgtgctttccagctcaccccccacactcactcctgagacccctggcctccggcgtcagcctccagcctctgttcccctagtaagtgccttccatgtcggcctctaaccccaggccccgaggacccagacccagtggggaggcggacgttccagccggcatggctgggaactgcagacctgtcctcctggtgggtccaggggcccctccagcttgtggagccccacactggggtgccgcctgcccgtctctctcccatggagccccagccccctttgggcccagggacaccagccaggctctgtgctgaccctcctgttgcacccagccctggtctcagcagcgaccacccctgcctccaccctctgagctttgcatgttccactaaccccgggcgggtggcaggtggaggtgtcaggctgctggcgcctctgcaagggcagaacactaacctgaccgtgggcggggccttgcggtatccgcccccaataaaagcaattccaaccttcccgtg

SEQ ID NO: 5521 - protein, 250 aa, Homo sapiens
MHRNLVDNITGQRLLEAQACTGGIIDPSTGERFPVTDAVNKGLVDKIMVDRINLAQKAFCGFEDPRTKTKMSAAQALKKGWLYYEAGQRFLEVQYLTGGLIEPDTPGRVPLDEALQRGTVDARTAQKLRDVGAYSKYLTCPKTKLKISYKDALDRSMVEEGTGLRLLEAAAQSTKGYYSPYSVSGSGSTAGSRTGSRTGSRAGSRRGSFDATGSGFSMTFSSSSYSSSGYGRRYASGSSASLGGPESAVA

SEQ ID NO: 5522 - DNA, 3056 bp, Homo sapiens
cttcccctggaggtggcttaccagcgtggctacctcaacaaggacacgcacgaccagctgtcagagcccagcgaggtgcgcagctacgtggacccgtccaccgacgagcgcctcagctacacgcagctgctcaggcggtgccgtcgtgacgacggcaccggccagctgctcctgccactgtcggacgcccgcaagctgaccttccgtggcctgcggaagcagatcaccatggaggagctggtgcgctcgcaggtcatggacgaggccacggcgctgcagctgcgggagggcctgacctccatcgaggaggtcaccaagaacttgcagaagttcctggaaggcaccagctgcatcgctggtgtcttcgtggacgccaccaaggaacggctctcggtgtaccaggccatgaagaagggcatcatccgccccggcacagcctttgagctcctggaggcgcaggcggccaccggttacgtcatcgaccccatcaagggactgaagctgacggtggaggaggctgtgcgtatgggcattgtgggccccgagttcaaggacaagctgctgtcggccgagcgcgccgtcactgggtacaaggacccctactctgggaagctcatctccctcttccaggccatgaagaagggcctgatcctgaaggaccatggcatccgcctgctggaggcccagatcgccacgggcggcatcatcgaccctgaggagagccaccggctgcccgtggaggtggcctacaagcgcggcctcttcgatgaggagatgaacgagatcctgaccgacccctcggacgacaccaagggcttctttgaccctaacacggaggagaacctcacctacctgcagctgatggagcgttgtatcactgacccccagacgggcctgtgtctcttgccgctgaaggagaagaagcgggagcggaagacgtcctccaagtcctccgtgcgcaagcgccgagtggtcatcgtggaccccgagacgggcaaggagatgtcagtgtacgaggcctaccgcaagggcctgattgaccaccagacgtacctggaggctctccatcaccgagttcgccgacatgctctcgggcaacgccggtggtttccgctcccgttcctcctcggtgggatcctcctcctcctaccccatcagccccgccgtctccaggacccagctggcctcctggtcagaccccactgaggagacgggccccgtggctggcatcctggacacggagacgctggagaaggtgtccatcaccgaggccatgcaccggaacctggtggataacatcacggggcagcggctgctggaggcgcaggcctgcaccgggggcatcatcgaccccagcaccggtgagcgcttccctgtcaccgacgccgtcaacaagggcctggtggacaagatcatggtggaccgcatcaacctggcccagaaggccttctgcggcttcgaggacccacgcaccaagaccaagatgtcggccgcccaggccctgaagaagggctggctctactacgaggccggccagcgcttcctggaggtgcagtacctgaccggcggcttgatcgagcccgacacgccgggccgcgtgcccctggacgaggccctgcagcgcggcacggtggacgcccgcaccgcacagaagctgcgtgacgtgggcgcctactccaagtacctcacctgccctaagaccaagctcaagatctcctataaggacgcgctggaccgcagcatggtggaggagggcacggggctgcggctgctggaggctgccgcgcagtccaccaagggctactacagcccctacagcgtcagcggctccggctctaccgctggctcccgcaccggctcgcgcaccggctcccgggccggctcccgccgcggcagctttgacgccaccggctccggcttctccatgaccttctcttcatcctcctactcctcctcgggctacggccgccgctacgcctcggggtcctcggcctccctggggggccctgagtctgccgtggcctgaggctgcctgcgcccaccccgctctgcatgcggcccagcccggctcccaccgaggcgcgggggccgttttcaacgcttaaaggtgtcttcctcccaagtggtgcctaaagtttaaccaaaaagaccagactaatatattaatatatatctgctgtccagacagcctgtatcttgggggacagggctggcccagccctgctggccgcctcaccccctcgggtctcctcactcccttctacctgccactcacacagccaggtgccttggagggtcccaagctgggccccagcccaccctcctgtcttcccagggtagcccgcctgccagtcctagctgcacagggcagctgggcccaaccctgtctgtagagggccctggtgtttctagcactggcctgcacggtgggccttgctggggacggggggccccagtcagcctctctcccagtctacccagagaagccccttccccatgggaagacgaggccctcgggcccagcccccacagtgctgtctgatctgtgctttccagctcaccccccacactcactcctgagacccctggcctccggcgtcagcctccagcctctgttcccctagtaagtgccttccatgtcggcctctaaccccaggccccgaggacccagacccagtggggaggcggacgttccagccggcatggctgggaactgcagacctgtcctcctggtgggtccaggggcccctccagcttgtggagccccacactggggtgccgcctgcccgtctctctcccatggagccccagccccctttgggcccagggacaccagccaggctctgtgctgaccctcctgttgcacccagccctggtctcagcagcgaccacccctgcctccaccctctgagctttgcatgttccactaaccccgggcgggtggcaggtggaggtgtcaggctgctggcgcctctgcaagggcagaacactaacctgaccgtgggcggggccttgcggtatccgcccccaataaaagcaattccaaccttcccgtg

SEQ ID NO: 5523 - protein, 325 aa, Homo sapiens
MEELVRSQVMDEATALQLREGLTSIEEVTKNLQKFLEGTSCIAGVFVDATKERLSVYQAMKKGIIRPGTAFELLEAQAATGYVIDPIKGLKLTVEEAVRMGIVGPEFKDKLLSAERAVTGYKDPYSGKLISLFQAMKKGLILKDHGIRLLEAQIATGGIIDPEESHRLPVEVAYKRGLFDEEMNEILTDPSDDTKGFFDPNTEENLTYLQLMERCITDPQTGLCLLPLKEKKRERKTSSKSSVRKRRVVIVDPETGKEMSVYEAYRKGLIDHQTYLEALHHRVRRHALGQRRWFPLPFLLGGILLLLPHQPRRLQDPAGLLVRPH

SEQ ID NO: 5524 - DNA, 7438 bp, Homo sapiens
ctggtgacgtacaaggcgcagcttgagccggtggcctccccggccaagaagcccaaggtccagtcgggatcagagagtgtcatccaggagtacgtggacctgcgtacgcactacagcgagctgaccacactgacgagccagtacatcaagttcatcagcgagactctgcggcgcatggaggaggaggagatgcagacggtgcagcaggagcagctgctgcaggagacgcaggccctgcagcaaagcttcctctctgaaaaggacagcctgctacagcgggagcgcttcatcgagcaggagaaggccaagctggagcagctcttccaggacgaggtggccaaggcacagcagctgcgtgaggagcagcagcggcagcagcagcagatggagcaggaacggcagcggctggtggccagcatggaggaggcgcggcggcggcagcatgaggccgaggagggcgtgcggcgcaagcaggaggagctgcagcagctggagcagcagcggcggcagcaggaggagctgctggctgaggagaaccagaggctgcgtgagcagctgcagctcctggaggagcagcaccgggccgcgctggcgcactcagaggaggtcactgcctcgcaggtggctgccacaaagaccctgcccaatggccgggatgcacttgatggccccgcggcagaggcagagccggagcacagcttcgatggcctgcggcggaaggtgtcagctcagaggctgcaggaggccggcatcctgagtgcggaggagctgcagcggttggcgcagggccacaccacggtggacgagctcgcacggcgggaagacgtgcgccactacctgcagggccgcagcagtatcgcagggctgttgctgaaggccaccaatgagaagctgagtgtttacgccgccctgcagaggcagctgctgagtcccggcacggccctcatcctgctggaggcgcaggcggcctcaggcttcctgctggaccctgtgcggaaccggcggctgaccgtcaacgaggctgtgaaggagggtgtggtgggccccgagctgcaccacaagctgctgtcggccgagcgcgccgtcactggctacaaggacccctacactggccagcagatctctctcttccaagccatgcagaagggcctcatcgtccgggagcacggcatccgcctgctggaggcccagatcgccacgggcggcgttatcgaccccgtgcacagccaccgcgtgcccgtggacgtggcctaccggcgcggctacttcgacgaggagatgaaccgcgtcctggcggaccccagcgacgacaccaagggcttctttgaccccaacacgcacgagaacctcacgtacctgcagctactggagcgctgcgtggaggaccccgagacgggcctgtgccttctgccactcacggataaggctgccaagggcggggagctggtctacactgactccgaggcccgggacgtctttgagaaggccaccgtgtctgcgccgttcggcaagttccagggcaagacggtgaccatttgggagatcatcaactcggaatacttcacggcagagcagcggcgggacctgctgcggcagttccgcacgggccggatcacagtggagaagatcatcaagatcatcatcacggtggtggaggagcaggagcagaagggccggctttgctttgagggcctgcgcagcctggtgccagccgccgagctgctggagagcagggtcatcgaccgcgagctctaccagcagctgcagcgaggtgagcgctctgtgcgagacgtagccgaggtggacactgtgcggcgggctctccggggtgccaacgtcatcgcgggtgtatggctggaggaggcggggcagaagctgagtatctacaatgccctgaagaaagacctgctgccatccgacatggccgtggccctgttggaagcccaggccggcaccgggcacatcatcgaccccgccaccagcgcccggctgaccgtggacgaggcagtgcgtgctggcctggtgggccccgagtttcatgagaagctgctatcagccgagaaggctgtgacagggtacagggacccctacacagggcagagcgtctccctgttccaggccctgaagaagggcctcattccccgggagcagggcctgcgcctgttggacgcccagctgtccacgggcggcatcgtggaccccagcaagagccaccgcgtgcccctggatgtcgcctgcgcccgaggctgcctggatgaggagaccagcagggccctgtcggcaccaagggccgacgccaaggcctacagtgaccccagcacaggggagccggccacctacggcgagctccagcagcggtgccggcccgaccagctgaccgggctgagcctgctgccgctctcagaaaaggctgctcgggcccggcaggaggagctctactcagagctgcaggcccgtgagacctttgaaaagaccccggttgaggtccccgtgggtggcttcaagggcaggacggtgacggtgtgggagctcatcagctctgagtacttcactgcggagcagcggcaggagctgttgcgtcagttccgcacgggcaaggtcaccgtggagaaggtcatcaagattctcattaccatcgtggaggaggtggagaccctgcggcaggagaggctgtccttcagcggcctccgtgcccctgtgccagccagcgagctcctggcttccggggtcctcagcagagcccagtttgagcagctcaaggacggcaagacgacggtcaaggacctttcggagctgggctccgtgcggacgctgctgcagggcagtggctgcctcgccggcatctacctggaggacaccaaggagaaggtgtccatctacgaggccatgcgccggggcctgctgagagccacaacggctgcgctcctgctggaggcgcaggcggccactggcttcctggtggaccccgtgcggaaccagcgcctgtatgtccacgaggccgtgaaggcgggcgtggtgggccccgagcttcacgagcagctgctgtctgccgagaaggccgtcaccggctacagagacccctactcgggcagcaccatctccctcttccaggccatgcagaagggcctggttctccggcagcacggcatccgcctgctggaggcccagatcgccacgggcggcatcatcgaccccgtgcacagccaccgcgtgcctgtggacgtggcctaccagcgcggctacttcagtgaggagatgaaccgcgtcctggcggaccccagcgacgacaccaagggcttctttgaccccaacacgcatgagaacctcacgtacaggcagctgctggagcggtgcgtggaggaccccgagacgggcttgcgccttctgccactgaaaggggcggagaaggctgaggtggtggagaccacgcaggtgtacactgaggaggagacaagaagggcatttgaagagacacagatcgacattcccggcggcggcagccacggcggctccaccatgtccctgtgggaggtgatgcagtcggacctgatccccgaggagcagcgggcccagctgatggctgacttccaggccggccgggtgaccaaggaacgcatgatcatcatcatcatcgagatcattgagaagacagagatcatccgccagcagggtctggcctcctacgactacgtgcgccgccgcctcacggctgaggacctgttcgaggctcggatcatctctctcgagacctacaacctgctccgggagggcaccaggagcctccgtgaggctctcgaggcggagtccgcctggtgctacctctatggcacgggctccgtggctggtgtctacctgcccggttccaggcagacactgagcatctaccaggctctcaagaaagggctgctgagtgccgaggtggcccgcctgctgctggaggcacaggcagccacaggcttcctgctggacccggtgaagggggagcggctgactgtggatgaggctgtgcggaagggcctcgtggggcccgagctgcacgaccgcctgctctcggctgagcgggcggtcaccggctaccgtgacccctacaccgagcagaccatctcgctcttccaggccatgaagaaggagctgatccctactgaggaggccctgcggctgctggatgcccagctggccaccggcggcatcgtggacccccgcctgggcttccaccttcccctggaggtggcttaccagcgtggctacctcaacaaggacacgcacgaccagctgtcagagcccagcgaggtgcgcagctacgtggacccgtccaccgacgagcgcctcagctacacgcagctgctcaggcggtgccgtcgtgacgacggcaccggccagctgctcctgccactgtcggacgcccgcaagctgaccttccgtggcctgcggaagcagatcaccatggaggagctggtgcgctcgcaggtcatggacgaggccacggcgctgcagctgcgggagggcctgacctccatcgaggaggtcaccaagaacttgcagaagttcctggaaggcaccagctgcatcgctggtgtcttcgtggacgccaccaaggaacggctctcggtgtaccaggccatgaagaagggcatcatccgccccggcacagcctttgagctcctggaggcgcaggcggccaccggttacgtcatcgaccccatcaagggactgaagctgacggtggaggaggctgtgcgtatgggcattgtgggccccgagttcaaggacaagctgctgtcggccgagcgcgccgtcactgggtacaaggacccctactctgggaagctcatctccctcttccaggccatgaagaagggcctgatcctgaaggaccatggcatccgcctgctggaggcccagatcgccacgggcggcatcatcgaccctgaggagagccaccggctgcccgtggaggtggcctacaagcgcggcctcttcgatgaggagatgaacgagatcctgaccgacccctcggacgacaccaagggcttctttgaccctaacacggaggagaacctcacctacctgcagctgatggagcgttgtatcactgacccccagacgggcctgtgtctcttgccgctgaaggagaagaagcgggagcggaagacgtcctccaagtcctccgtgcgcaagcgccgagtggtcatcgtggaccccgagacgggcaaggagatgtcagtgtacgaggcctaccgcaagggcctgattgaccaccagacgtacctggagctgtccgagcaggagtgcgagtgggaggagatcaccatctcctcctcggacggcgtggtcaagtccatgatcatcgaccgccgctccgggcgccagtacgacatcgatgatgccatcgccaagaacctcatcgaccgctcggcactggaccagtaccgcgccggcacgctctccatcaccgagttcgccgacatgctctcgggcaacgccggtggtttccgctcccgttcctcctcggtgggatcctcctcctcctaccccatcagccccgccgtctccaggacccagctggcctcctggtcagaccccactgaggagacgggccccgtggctggcatcctggacacggagacgctggagaaggtgtccatcaccgaggccatgcaccggaacctggtggataacatcacggggcagcggctgctggaggcgcaggcctgcaccgggggcatcatcgaccccagcaccggtgagcgcttccctgtcaccgacgccgtcaacaagggcctggtggacaagatcatggtggaccgcatcaacctggcccagaaggccttctgcggcttcgaggacccacgcaccaagaccaagatgtcggccgcccaggccctgaagaagggctggctctactacgaggccggccagcgcttcctggaggtgcagtacctgaccggcggcttgatcgagcccgacacgccgggccgcgtgcccctggacgaggccctgcagcgcggcacggtggacgcccgcaccgcacagaagctgcgtgacgtgggcgcctactccaagtacctcacctgccctaagaccaagctcaagatctcctataaggacgcgctggaccgcagcatggtggaggagggcacggggctgcggctgctggaggctgccgcgcagtccaccaagggctactacagcccctacagcgtcagcggctccggctctaccgctggctcccgcaccggctcgcgcaccggctcccgggccggctcccgccgcggcagctttgacgccaccggctccggcttctccatgaccttctcttcatcctcctactcctcctcgggctacggccgccgctacgcctcggggtcctcggcctccctggggggccctgagtctgccgtggcctgaggctgcctgcgcccaccccgctctgcatgcggcccagcccggctcccaccgaggcgcgggggccgttttcaacgcttaaaggtgtcttcctcccaagtggtgcctaaagtttaaccaaaaagaccagactaatatattaatatatatctgctgtccagacagcctgtatcttgggggacagggctggcccagccctgctggccgcctcaccccctcgggtctcctcactcccttctacctgccactcacacagccaggtgccttggagggtcccaagctgggccccagcccaccctcctgtcttcccagggtagcccgcctgccagtcctagctgcacagggcagctgggcccaaccctgtctgtagagggccctggtgtttctagcactggcctgcacggtgggccttgctggggacggggggccccagtcagcctctctcccagtctacccagagaagccccttccccatgggaagacgaggccctcgggcccagcccccacagtgctgtctgatctgtgctttccagctcaccccccacactcactcctgagacccctggcctccggcgtcagcctccagcctctgttcccctagtaagtgccttccatgtcggcctctaaccccaggccccgaggacccagacccagtggggaggcggacgttccagccggcatggctgggaactgcagacctgtcctcctggtgggtccaggggcccctccagcttgtggagccccacactggggtgccgcctgcccgtctctctcccatggagccccagccccctttgggcccagggacaccagccaggctctgtgctgaccctcctgttgcacccagccctggtctcagcagcgaccacccctgcctccaccctctgagctttgcatgttccactaaccccgggcgggtggcaggtggaggtgtcaggctgctggcgcctctgcaagggcagaacactaacctgaccgtgggcggggccttgcggtatccgcccccaataaaagcaattccaaccttcccgtg

SEQ ID NO: 5525 - protein, 2077 aa, Homo sapiens
MEEEEMQTVQQEQLLQETQALQQSFLSEKDSLLQRERFIEQEKAKLEQLFQDEVAKAQQLREEQQRQQQQMEQERQRLVASMEEARRRQHEAEEGVRRKQEELQQLEQQRRQQEELLAEENQRLREQLQLLEEQHRAALAHSEEVTASQVAATKTLPNGRDALDGPAAEAEPEHSFDGLRRKVSAQRLQEAGILSAEELQRLAQGHTTVDELARREDVRHYLQGRSSIAGLLLKATNEKLSVYAALQRQLLSPGTALILLEAQAASGFLLDPVRNRRLTVNEAVKEGVVGPELHHKLLSAERAVTGYKDPYTGQQISLFQAMQKGLIVREHGIRLLEAQIATGGVIDPVHSHRVPVDVAYRRGYFDEEMNRVLADPSDDTKGFFDPNTHENLTYLQLLERCVEDPETGLCLLPLTDKAAKGGELVYTDSEARDVFEKATVSAPFGKFQGKTVTIWEIINSEYFTAEQRRDLLRQFRTGRITVEKIIKIIITVVEEQEQKGRLCFEGLRSLVPAAELLESRVIDRELYQQLQRGERSVRDVAEVDTVRRALRGANVIAGVWLEEAGQKLSIYNALKKDLLPSDMAVALLEAQAGTGHIIDPATSARLTVDEAVRAGLVGPEFHEKLLSAEKAVTGYRDPYTGQSVSLFQALKKGLIPREQGLRLLDAQLSTGGIVDPSKSHRVPLDVACARGCLDEETSRALSAPRADAKAYSDPSTGEPATYGELQQRCRPDQLTGLSLLPLSEKAARARQEELYSELQARETFEKTPVEVPVGGFKGRTVTVWELISSEYFTAEQRQELLRQFRTGKVTVEKVIKILITIVEEVETLRQERLSFSGLRAPVPASELLASGVLSRAQFEQLKDGKTTVKDLSELGSVRTLLQGSGCLAGIYLEDTKEKVSIYEAMRRGLLRATTAALLLEAQAATGFLVDPVRNQRLYVHEAVKAGVVGPELHEQLLSAEKAVTGYRDPYSGSTISLFQAMQKGLVLRQHGIRLLEAQIATGGIIDPVHSHRVPVDVAYQRGYFSEEMNRVLADPSDDTKGFFDPNTHENLTYRQLLERCVEDPETGLRLLPLKGAEKAEVVETTQVYTEEETRRAFEETQIDIPGGGSHGGSTMSLWEVMQSDLIPEEQRAQLMADFQAGRVTKERMIIIIIEIIEKTEIIRQQGLASYDYVRRRLTAEDLFEARIISLETYNLLREGTRSLREALEAESAWCYLYGTGSVAGVYLPGSRQTLSIYQALKKGLLSAEVARLLLEAQAATGFLLDPVKGERLTVDEAVRKGLVGPELHDRLLSAERAVTGYRDPYTEQTISLFQAMKKELIPTEEALRLLDAQLATGGIVDPRLGFHLPLEVAYQRGYLNKDTHDQLSEPSEVRSYVDPSTDERLSYTQLLRRCRRDDGTGQLLLPLSDARKLTFRGLRKQITMEELVRSQVMDEATALQLREGLTSIEEVTKNLQKFLEGTSCIAGVFVDATKERLSVYQAMKKGIIRPGTAFELLEAQAATGYVIDPIKGLKLTVEEAVRMGIVGPEFKDKLLSAERAVTGYKDPYSGKLISLFQAMKKGLILKDHGIRLLEAQIATGGIIDPEESHRLPVEVAYKRGLFDEEMNEILTDPSDDTKGFFDPNTEENLTYLQLMERCITDPQTGLCLLPLKEKKRERKTSSKSSVRKRRVVIVDPETGKEMSVYEAYRKGLIDHQTYLELSEQECEWEEITISSSDGVVKSMIIDRRSGRQYDIDDAIAKNLIDRSALDQYRAGTLSITEFADMLSGNAGGFRSRSSSVGSSSSYPISPAVSRTQLASWSDPTEETGPVAGILDTETLEKVSITEAMHRNLVDNITGQRLLEAQACTGGIIDPSTGERFPVTDAVNKGLVDKIMVDRINLAQKAFCGFEDPRTKTKMSAAQALKKGWLYYEAGQRFLEVQYLTGGLIEPDTPGRVPLDEALQRGTVDARTAQKLRDVGAYSKYLTCPKTKLKISYKDALDRSMVEEGTGLRLLEAAAQSTKGYYSPYSVSGSGSTAGSRTGSRTGSRAGSRRGSFDATGSGFSMTFSSSSYSSSGYGRRYASGSSASLGGPESAVA

SEQ ID NO: 5526 - DNA, 14803 bp, Homo sapiens
tgagctgagcctgtgccgagtgagcgtctcgtggggccgccagccttcagctgcctgtgtgccacacggggctgcccagagcaccgtgcctgaggccgagggtccgggcgacgaaggtgtgggggcagcatgtctcagcaccagctccgcgtgccgcagcccgagggcctgggccgaaagagaaccagctcggaggacaacctgtacctggctgtgctcagggcctctgagggcaagaaagatgagcgggatcgtgtgcagaagaaaaccttcaccaagtgggtcaacaagcacctcatcaaggcccagaggcacatcagtgacctgtatgaagacctccgcgatggccacaacctcatctccctgctggaggtcctctcgggggacagcctgccccgggagaaggggaggatgcgtttccacaagctgcagaatgtccagattgccctggactacctccggcaccgccaggtgaagctggtgaacatcaggaatgatgacatcgctgacggcaaccccaagctgacccttggcctcatctggacaatcattctgcacttccagatctcagatatccaggtgagtgggcagtcggaggacatgacggccaaggagaagctgctgctgtggtcgcagcgaatggtggaggggtaccagggcctgcgatgcgacaacttcacctccagctggagagacggccgcctcttcaatgccatcatccaccggcacaagcccctgctcatcgacatgaacaaggtgtaccggcagaccaacctggagaacctggaccaggccttctctgtggcggagcgggacctgggagtgacgcggctcctggaccctgaggacgtggatgtccctcagcccgacgagaagtccatcatcacctacgtctcgtcgctgtatgacgccatgccccgcgtgccggacgtgcaggatggggtgagggccaacgagctgcagctgcgctggcaggagtaccgggagctggtgctgctgctgcttcagtggatgcgacaccacacggccgcctttgaggaacgcaggttcccctccagcttcgaggagattgagatcctgtggtctcagttcctgaagtttaaggagatggagctaccagccaaggaggccgacaagaacaggtccaagggcatctaccaatccctggagggagcggtgcaagcaggccagctcaaggtgccccctggctaccacccgctggatgtggagaaggagtggggcaagctgcacgtggccatcctggagcgggagaagcagctccgcagcgagtttgagaggctggagtgtcttcagcgcatcgtgaccaagctgcagatggaggcggggctgtgtgaggagcagctgaaccaggccgacgccctgctgcagtcggatgtccggctgctggctgcaggcaaagtgccacagcgggcgggggaggtggaacgggacttggacaaggcggatagcatgatccggctgctcttcaacgacgtgcagaccctcaaggatggacggcacccgcagggcgagcagatgtaccgcagggtgtaccgtctgcacgagcgcctggtagccatccgcaccgagtacaacctacggctgaaggcaggcgtggcggcccctgcaacccaggtggcccaggtgactctgcagagtgtgcagaggcgccccgagctggaggactccactctgcgctacctgcaggacctgctggcctgggtggaggagaaccagcaccgtgtggatggcgctgagtggggtgtggacctgcccagcgtggaggcgcagctgggcagccaccgaggcctgcaccagtccatcgaagaattccgggccaagatcgagcgggcacggagtgacgagggccagctctcccccgccacccggggtgcctaccgtgactgcctgggtcggctggacctgcagtacgccaagctgctgaactcctccaaggcccgcctcaggtccctggagagcttgcacagctttgtggcagccgccactaaggagctaatgtggctgaatgagaaggaggaggaggaggtgggcttcgactggagcgaccgcaacaccaacatgaccgccaagaaggagagctactcggcgctgatgcgggagctggagctgaaggagaagaagatcaaggagctccaaaatgctggggaccggctgctgcgggaggaccacccggcccggcccacggtggagtccttccaggcggccctgcagacgcagtggagctggatgctacagctgtgctgctgtatcgaggcacacctgaaggagaacgctgcctactttcagttcttctcagatgtgcgggaggccgaggggcagttgcagaagctgcaggaggcactgcgtaggaaatacagttgtgatcgctccgccaccgtcacccggctggaggacctgctgcaggatgcccaggacgagaaggaacagctgaacgagtacaagggccacctctcaggcctggccaagcgggccaaggccgtcgtgcagctgaagccccgccacccagcccaccccatgcggggccgcctgcccctgctggccgtgtgcgactataagcaggtggaggtgactgtgcacaagggtgacgagtgccagctggtgggccctgcacagccgtcccactggaaggtgctcagcagctccggcagcgaggccgccgtgccctccgtgtgcttcctggtgcccccgcccaaccaggaggcccaggaggccgtcaccaggctggaggcccagcaccaggccctggtcacgctgtggcaccagttgcacgtggacatgaagagccttctggcctggcagagccttcgccgcgacgtgcagctcatccgctcctggtccctggccacgttccgcaccctgaagccagaggagcagcgccaagccctgcacagcctggagctgcactaccaggccttcctgcgggacagccaggacgcgggcggcttcggacccgaggaccggctgatggctgagcgcgagtacggctcctgcagccaccactaccagcagctgctgcagagcctggaacagggtgcacaggaagagtctcgctgccagcgctgcatctccgagctcaaagacatccggctgcagctggaggcctgtgagacgcgcaccgtgcaccgcctgcggctgccgctggacaaagagccggcacgggagtgtgcccagcgcatcgccgagcagcagaaggcacaggcagaggtggaggggctgggcaagggggtcgcccggctctctgccgaggccgagaaggtcttggccctaccagagccatcgcctgcggcccccacgctgcgctcggagctggagctgacgctgggcaagctggagcaggtccgcagcctgtctgccatctacctggagaagctcaagaccatcagcctggtgatccgcggcacgcagggggccgaggaggtgctcagggcccacgaggagcagctcaaggaggcccaggccgtgccggccaccctcccggagctcgaggccaccaaggcctctctgaagaagctgcgggcccaggccgaggcacagcagcccacgttcgacgccctgcgggatgagctgcggggggcacaggaggtgggggagcgactgcagcagcggcacggggagcgggacgtggaggtggagcgctggcgggagcgggtcgcccagttgcttgagcgctggcaggctgtgctggcccagaccgacgtgcggcagcgcgagctcgagcaactgggccgccagctgcgttactaccgcgagagtgcagaccccttgggcgcctggctgcaggacgccaggcggcggcaggagcagatccaggccatgccgctggccgacagccaggctgtgcgggagcagctgcggcaggagcaggccctgctggaggagatcgagcgccacggcgagaaggtcgaggagtgccagaggtttgcgaaacagtacatcaacgccatcaaggactatgaactccagctggtgacgtacaaggcgcagcttgagccggtggcctccccggccaagaagcccaaggtccagtcgggatcagagagtgtcatccaggagtacgtggacctgcgtacgcactacagcgagctgaccacactgacgagccagtacatcaagttcatcagcgagactctgcggcgcatggaggaggaggagaggctggctgagcagcagcgggcagaggagcgcgagcggctggccgaggtggaggccgcgctggagaagcagcggcagctggccgaggcgcacgcccaggcaaaggcacaggcggagcgggaggcgaaggagctgcagcagcgcatgcaggaggaggtggtgcggcgggaggaggcggcggtggacgcgcagcagcagaagcgcagcattcaggaggagctgcagcagctgcggcagagctcggaggcggagatccaggccaaggcccggcaggcagaggcggctgagcgcagccggctgcgcatcgaggaggagatccgcgtggtgcgcctgcagttggaggccaccgagcgccagcgtggcggggctgagggggagctgcaggcactgcgtgcacgggcggaggaggctgaggcacaaaagcgacaggcgcaggaggaggccgagcgcttgcggaggcaggtgcaggacgagagccagcgtaagcggcaggcggaggtggagctggcctcgcgcgtgaaggccgaggccgaggcggcgcgcgagaagcagcgggccctgcaggccctggaggagctgcggctgcaggcggaggaggcggagcggcgcctgcggcaggccgaggtggagcgagcgcggcaggtacaggtggccctggagacggcgcagcgcagtgcagaggcggagctgcagagcaaacgcgcctccttcgccgagaagacggcacagctggagcgctccctgcaggaggaacacgtggctgtggcacagctgcgggaggaggctgagcggcgggcacagcagcaggccgaggccgagcgggcgcgcgaggaggcagagcgggagctggagcgctggcagctcaaggccaacgaggcgctacggctgcggctgcaggcggaggaggtggcgcagcagaagagcctggcgcaggccgaggctgagaagcagaaggaggaggcggagcgcgaggcgcggcggcgcggcaaggcggaggagcaggccgtccggcagcgggagctggctgaacaagagctggagaagcagcggcagctggcggaaggcaccgcgcagcagcgcctggccgcggagcaggagttgatccggctgcgggccgagacggagcagggggagcagcagcggcagctgctggaggaggagctggcccggctgcagcgtgaggcggctgcagccacgcagaaacggcaggagctggaagccgagctggccaaggtgcgggccgagatggaggtgctgctggccagcaaggcgagggctgaggaggagtcgcgctccaccagcgagaagtccaagcagaggctggaggccgaggccggccggttccgcgagctggccgaggaggccgcccgcctgcgtgccctggcggaagaggccaagcggcagcggcagctggccgaggaagacgcggcgcggcagcgggccgaggcggagcgggtgcttgcggagaagctggccgccatcggcgaggccacgcggctcaagacggaggcggagatcgcgctcaaggagaaggaggcggagaacgagcgcctgcggcggctggcggaggacgaggccttccagcggcggcggctggaggagcaggccgcgcaacacaaggctgacatcgaggagcgcctggcccagctgcgcaaggcatcggacagcgagctggagcggcagaaggggctggtggaggacacgctgaggcagcggcggcaggtggaggaggagatcctggcgctgaaggcgagcttcgagaaggcggccgctggcaaggcggagctggagctggagctgggacgcatccgcagcaacgcggaggacacgctgcgcagcaaggagcaggccgagctggaggctgcgaggcagcggcagctggcggcggaggaggagcggcggcgccgtgaggctgaggagcgcgtgcagaagagcctggcggccgaggaggaggccgcacggcagcggaaggcggcgctggaggaagtcgagcggctgaaagccaaggtggaggaggcgcggcgcctgcgggagcgagcggagcaggagtcggcgcggcagctgcagctggcccaggaggccgcccagaagcggctgcaggcggaagagaaggcacacgccttcgcggtgcagcagaaggagcaggagctacagcagacgctgcagcaggagcagagcgtgctggaccagctgcgcggcgaggcggaggcggcccggcgggcggctgaggaggcggaggaggcccgggtgcaggcggagcgtgaggcggcgcagtcccggcggcaggtggaagaggccgagcggctgaagcagtcggcagaggagcaggcacaggcccgggctcaggcacaggcggctgcagagaagctgcgcaaggaggccgagcaagaggcggcgcggcgggcacaggcggagcaggcggccctgcggcagaagcaggcagctgacgcggagatggagaagcataagaaattcgccgagcagacgctgcggcagaaggcgcaggtggagcaggagctgacaacactgcggctgcagctggaggagaccgaccaccagaagaacctgctggacgaggagctgcagcggctgaaggcggaggccacggaggccgcacgccagcgcagccaggtggaggaggagctcttctcggtgcgcgtgcagatggaggagctgagcaagctcaaggcacgcatcgaggctgagaaccgcgcactcatcttgcgtgacaaggacaatacgcagcgcttcctgcaggaggaggctgagaagatgaagcaggtggcggaggaggccgcgcggctgagtgtggcggcccaagaggctgcgcgactgcggcagctggcagaggaggacctggcacagcagcgggccttggcagagaagatgctcaaggagaagatgcaggcggtgcaggaggccacgcgactcaaggctgaggcggaactgctgcagcagcagaaggagcttgcgcaggagcaggcgcggcggctgcaggaggacaaggagcagatggcgcagcagctggcggaggagacgcagggcttccagcggacgctggaggccgagcggcagcggcagctggagatgagcgctgaggctgagcgcctcaagctgcgtgtggccgagatgagccgagcccaggcccgcgctgaggaggacgcccagcgcttccggaagcaggcggaggagatcggtgagaagctgcaccgcacggagctcgccacccaggagaaggtgaccctggtgcagacactggagatccagcgacagcagagtgaccatgatgccgagcgcctgcgggaggccatcgctgagctggagcgtgagaaggagaagctccaacaggaggccaaactgctgcagctcaagtctgaggagatgcagacggtgcagcaggagcagctgctgcaggagacgcaggccctgcagcaaagcttcctctctgaaaaggacagcctgctacagcgggagcgcttcatcgagcaggagaaggccaagctggagcagctcttccaggacgaggtggccaaggcacagcagctgcgtgaggagcagcagcggcagcagcagcagatggagcaggaacggcagcggctggtggccagcatggaggaggcgcggcggcggcagcatgaggccgaggagggcgtgcggcgcaagcaggaggagctgcagcagctggagcagcagcggcggcagcaggaggagctgctggctgaggagaaccagaggctgcgtgagcagctgcagctcctggaggagcagcaccgggccgcgctggcgcactcagaggaggtcactgcctcgcaggtggctgccacaaagaccctgcccaatggccgggatgcacttgatggccccgcggcagaggcagagccggagcacagcttcgatggcctgcggcggaaggtgtcagctcagaggctgcaggaggccggcatcctgagtgcggaggagctgcagcggttggcgcagggccacaccacggtggacgagctcgcacggcgggaagacgtgcgccactacctgcagggccgcagcagtatcgcagggctgttgctgaaggccaccaatgagaagctgagtgtttacgccgccctgcagaggcagctgctgagtcccggcacggccctcatcctgctggaggcgcaggcggcctcaggcttcctgctggaccctgtgcggaaccggcggctgaccgtcaacgaggctgtgaaggagggtgtggtgggccccgagctgcaccacaagctgctgtcggccgagcgcgccgtcactggctacaaggacccctacactggccagcagatctctctcttccaagccatgcagaagggcctcatcgtccgggagcacggcatccgcctgctggaggcccagatcgccacgggcggcgttatcgaccccgtgcacagccaccgcgtgcccgtggacgtggcctaccggcgcggctacttcgacgaggagatgaaccgcgtcctggcggaccccagcgacgacaccaagggcttctttgaccccaacacgcacgagaacctcacgtacctgcagctactggagcgctgcgtggaggaccccgagacgggcctgtgccttctgccactcacggataaggctgccaagggcggggagctggtctacactgactccgaggcccgggacgtctttgagaaggccaccgtgtctgcgccgttcggcaagttccagggcaagacggtgaccatttgggagatcatcaactcggaatacttcacggcagagcagcggcgggacctgctgcggcagttccgcacgggccggatcacagtggagaagatcatcaagatcatcatcacggtggtggaggagcaggagcagaagggccggctttgctttgagggcctgcgcagcctggtgccagccgccgagctgctggagagcagggtcatcgaccgcgagctctaccagcagctgcagcgaggtgagcgctctgtgcgagacgtagccgaggtggacactgtgcggcgggctctccggggtgccaacgtcatcgcgggtgtatggctggaggaggcggggcagaagctgagtatctacaatgccctgaagaaagacctgctgccatccgacatggccgtggccctgttggaagcccaggccggcaccgggcacatcatcgaccccgccaccagcgcccggctgaccgtggacgaggcagtgcgtgctggcctggtgggccccgagtttcatgagaagctgctatcagccgagaaggctgtgacagggtacagggacccctacacagggcagagcgtctccctgttccaggccctgaagaagggcctcattccccgggagcagggcctgcgcctgttggacgcccagctgtccacgggcggcatcgtggaccccagcaagagccaccgcgtgcccctggatgtcgcctgcgcccgaggctgcctggatgaggagaccagcagggccctgtcggcaccaagggccgacgccaaggcctacagtgaccccagcacaggggagccggccacctacggcgagctccagcagcggtgccggcccgaccagctgaccgggctgagcctgctgccgctctcagaaaaggctgctcgggcccggcaggaggagctctactcagagctgcaggcccgtgagacctttgaaaagaccccggttgaggtccccgtgggtggcttcaagggcaggacggtgacggtgtgggagctcatcagctctgagtacttcactgcggagcagcggcaggagctgttgcgtcagttccgcacgggcaaggtcaccgtggagaaggtcatcaagattctcattaccatcgtggaggaggtggagaccctgcggcaggagaggctgtccttcagcggcctccgtgcccctgtgccagccagcgagctcctggcttccggggtcctcagcagagcccagtttgagcagctcaaggacggcaagacgacggtcaaggacctttcggagctgggctccgtgcggacgctgctgcagggcagtggctgcctcgccggcatctacctggaggacaccaaggagaaggtgtccatctacgaggccatgcgccggggcctgctgagagccacaacggctgcgctcctgctggaggcgcaggcggccactggcttcctggtggaccccgtgcggaaccagcgcctgtatgtccacgaggccgtgaaggcgggcgtggtgggccccgagcttcacgagcagctgctgtctgccgagaaggccgtcaccggctacagagacccctactcgggcagcaccatctccctcttccaggccatgcagaagggcctggttctccggcagcacggcatccgcctgctggaggcccagatcgccacgggcggcatcatcgaccccgtgcacagccaccgcgtgcctgtggacgtggcctaccagcgcggctacttcagtgaggagatgaaccgcgtcctggcggaccccagcgacgacaccaagggcttctttgaccccaacacgcatgagaacctcacgtacaggcagctgctggagcggtgcgtggaggaccccgagacgggcttgcgccttctgccactgaaaggggcggagaaggctgaggtggtggagaccacgcaggtgtacactgaggaggagacaagaagggcatttgaagagacacagatcgacattcccggcggcggcagccacggcggctccaccatgtccctgtgggaggtgatgcagtcggacctgatccccgaggagcagcgggcccagctgatggctgacttccaggccggccgggtgaccaaggaacgcatgatcatcatcatcatcgagatcattgagaagacagagatcatccgccagcagggtctggcctcctacgactacgtgcgccgccgcctcacggctgaggacctgttcgaggctcggatcatctctctcgagacctacaacctgctccgggagggcaccaggagcctccgtgaggctctcgaggcggagtccgcctggtgctacctctatggcacgggctccgtggctggtgtctacctgcccggttccaggcagacactgagcatctaccaggctctcaagaaagggctgctgagtgccgaggtggcccgcctgctgctggaggcacaggcagccacaggcttcctgctggacccggtgaagggggagcggctgactgtggatgaggctgtgcggaagggcctcgtggggcccgagctgcacgaccgcctgctctcggctgagcgggcggtcaccggctaccgtgacccctacaccgagcagaccatctcgctcttccaggccatgaagaaggagctgatccctactgaggaggccctgcggctgctggatgcccagctggccaccggcggcatcgtggacccccgcctgggcttccaccttcccctggaggtggcttaccagcgtggctacctcaacaaggacacgcacgaccagctgtcagagcccagcgaggtgcgcagctacgtggacccgtccaccgacgagcgcctcagctacacgcagctgctcaggcggtgccgtcgtgacgacggcaccggccagctgctcctgccactgtcggacgcccgcaagctgaccttccgtggcctgcggaagcagatcaccatggaggagctggtgcgctcgcaggtcatggacgaggccacggcgctgcagctgcgggagggcctgacctccatcgaggaggtcaccaagaacttgcagaagttcctggaaggcaccagctgcatcgctggtgtcttcgtggacgccaccaaggaacggctctcggtgtaccaggccatgaagaagggcatcatccgccccggcacagcctttgagctcctggaggcgcaggcggccaccggttacgtcatcgaccccatcaagggactgaagctgacggtggaggaggctgtgcgtatgggcattgtgggccccgagttcaaggacaagctgctgtcggccgagcgcgccgtcactgggtacaaggacccctactctgggaagctcatctccctcttccaggccatgaagaagggcctgatcctgaaggaccatggcatccgcctgctggaggcccagatcgccacgggcggcatcatcgaccctgaggagagccaccggctgcccgtggaggtggcctacaagcgcggcctcttcgatgaggagatgaacgagatcctgaccgacccctcggacgacaccaagggcttctttgaccctaacacggaggagaacctcacctacctgcagctgatggagcgttgtatcactgacccccagacgggcctgtgtctcttgccgctgaaggagaagaagcgggagcggaagacgtcctccaagtcctccgtgcgcaagcgccgagtggtcatcgtggaccccgagacgggcaaggagatgtcagtgtacgaggcctaccgcaagggcctgattgaccaccagacgtacctggagctgtccgagcaggagtgcgagtgggaggagatcaccatctcctcctcggacggcgtggtcaagtccatgatcatcgaccgccgctccgggcgccagtacgacatcgatgatgccatcgccaagaacctcatcgaccgctcggcactggaccagtaccgcgccggcacgctctccatcaccgagttcgccgacatgctctcgggcaacgccggtggtttccgctcccgttcctcctcggtgggatcctcctcctcctaccccatcagccccgccgtctccaggacccagctggcctcctggtcagaccccactgaggagacgggccccgtggctggcatcctggacacggagacgctggagaaggtgtccatcaccgaggccatgcaccggaacctggtggataacatcacggggcagcggctgctggaggcgcaggcctgcaccgggggcatcatcgaccccagcaccggtgagcgcttccctgtcaccgacgccgtcaacaagggcctggtggacaagatcatggtggaccgcatcaacctggcccagaaggccttctgcggcttcgaggacccacgcaccaagaccaagatgtcggccgcccaggccctgaagaagggctggctctactacgaggccggccagcgcttcctggaggtgcagtacctgaccggcggcttgatcgagcccgacacgccgggccgcgtgcccctggacgaggccctgcagcgcggcacggtggacgcccgcaccgcacagaagctgcgtgacgtgggcgcctactccaagtacctcacctgccctaagaccaagctcaagatctcctataaggacgcgctggaccgcagcatggtggaggagggcacggggctgcggctgctggaggctgccgcgcagtccaccaagggctactacagcccctacagcgtcagcggctccggctctaccgctggctcccgcaccggctcgcgcaccggctcccgggccggctcccgccgcggcagctttgacgccaccggctccggcttctccatgaccttctcttcatcctcctactcctcctcgggctacggccgccgctacgcctcggggtcctcggcctccctggggggccctgagtctgccgtggcctgaggctgcctgcgcccaccccgctctgcatgcggcccagcccggctcccaccgaggcgcgggggccgttttcaacgcttaaaggtgtcttcctcccaagtggtgcctaaagtttaaccaaaaagaccagactaatatattaatatatatctgctgtccagacagcctgtatcttgggggacagggctggcccagccctgctggccgcctcaccccctcgggtctcctcactcccttctacctgccactcacacagccaggtgccttggagggtcccaagctgggccccagcccaccctcctgtcttcccagggtagcccgcctgccagtcctagctgcacagggcagctgggcccaaccctgtctgtagagggccctggtgtttctagcactggcctgcacggtgggccttgctggggacggggggccccagtcagcctctctcccagtctacccagagaagccccttccccatgggaagacgaggccctcgggcccagcccccacagtgctgtctgatctgtgctttccagctcaccccccacactcactcctgagacccctggcctccggcgtcagcctccagcctctgttcccctagtaagtgccttccatgtcggcctctaaccccaggccccgaggacccagacccagtggggaggcggacgttccagccggcatggctgggaactgcagacctgtcctcctggtgggtccaggggcccctccagcttgtggagccccacactggggtgccgcctgcccgtctctctcccatggagccccagccccctttgggcccagggacaccagccaggctctgtgctgaccctcctgttgcacccagccctggtctcagcagcgaccacccctgcctccaccctctgagctttgcatgttccactaaccccgggcgggtggcaggtggaggtgtcaggctgctggcgcctctgcaagggcagaacactaacctgaccgtgggcggggccttgcggtatccgcccccaataaaagcaattccaaccttcccgtg

SEQ ID NO: 5527 - protein, 4547 aa, Homo sapiens; identical to SEQ ID NO: 759

SEQ ID NO: 5528 - DNA, 14695 bp, Homo sapiens
gtggccggcatgtcgggggcggggggcgcctttgcctcgccgagggaggtcttgctggagcggccgtgctggctggacgggggctgcgagccggcccgcaggggctacctctaccagcagctgtgctgcgtagatgagcgggatcgtgtgcagaagaaaaccttcaccaagtgggtcaacaagcacctcatcaaggcccagaggcacatcagtgacctgtatgaagacctccgcgatggccacaacctcatctccctgctggaggtcctctcgggggacagcctgccccgggagaaggggaggatgcgtttccacaagctgcagaatgtccagattgccctggactacctccggcaccgccaggtgaagctggtgaacatcaggaatgatgacatcgctgacggcaaccccaagctgacccttggcctcatctggacaatcattctgcacttccagatctcagatatccaggtgagtgggcagtcggaggacatgacggccaaggagaagctgctgctgtggtcgcagcgaatggtggaggggtaccagggcctgcgatgcgacaacttcacctccagctggagagacggccgcctcttcaatgccatcatccaccggcacaagcccctgctcatcgacatgaacaaggtgtaccggcagaccaacctggagaacctggaccaggccttctctgtggcggagcgggacctgggagtgacgcggctcctggaccctgaggacgtggatgtccctcagcccgacgagaagtccatcatcacctacgtctcgtcgctgtatgacgccatgccccgcgtgccggacgtgcaggatggggtgagggccaacgagctgcagctgcgctggcaggagtaccgggagctggtgctgctgctgcttcagtggatgcgacaccacacggccgcctttgaggaacgcaggttcccctccagcttcgaggagattgagatcctgtggtctcagttcctgaagtttaaggagatggagctaccagccaaggaggccgacaagaacaggtccaagggcatctaccaatccctggagggagcggtgcaagcaggccagctcaaggtgccccctggctaccacccgctggatgtggagaaggagtggggcaagctgcacgtggccatcctggagcgggagaagcagctccgcagcgagtttgagaggctggagtgtcttcagcgcatcgtgaccaagctgcagatggaggcggggctgtgtgaggagcagctgaaccaggccgacgccctgctgcagtcggatgtccggctgctggctgcaggcaaagtgccacagcgggcgggggaggtggaacgggacttggacaaggcggatagcatgatccggctgctcttcaacgacgtgcagaccctcaaggatggacggcacccgcagggcgagcagatgtaccgcagggtgtaccgtctgcacgagcgcctggtagccatccgcaccgagtacaacctacggctgaaggcaggcgtggcggcccctgcaacccaggtggcccaggtgactctgcagagtgtgcagaggcgccccgagctggaggactccactctgcgctacctgcaggacctgctggcctgggtggaggagaaccagcaccgtgtggatggcgctgagtggggtgtggacctgcccagcgtggaggcgcagctgggcagccaccgaggcctgcaccagtccatcgaagaattccgggccaagatcgagcgggcacggagtgacgagggccagctctcccccgccacccggggtgcctaccgtgactgcctgggtcggctggacctgcagtacgccaagctgctgaactcctccaaggcccgcctcaggtccctggagagcttgcacagctttgtggcagccgccactaaggagctaatgtggctgaatgagaaggaggaggaggaggtgggcttcgactggagcgaccgcaacaccaacatgaccgccaagaaggagagctactcggcgctgatgcgggagctggagctgaaggagaagaagatcaaggagctccaaaatgctggggaccggctgctgcgggaggaccacccggcccggcccacggtggagtccttccaggcggccctgcagacgcagtggagctggatgctacagctgtgctgctgtatcgaggcacacctgaaggagaacgctgcctactttcagttcttctcagatgtgcgggaggccgaggggcagttgcagaagctgcaggaggcactgcgtaggaaatacagttgtgatcgctccgccaccgtcacccggctggaggacctgctgcaggatgcccaggacgagaaggaacagctgaacgagtacaagggccacctctcaggcctggccaagcgggccaaggccgtcgtgcagctgaagccccgccacccagcccaccccatgcggggccgcctgcccctgctggccgtgtgcgactataagcaggtggaggtgactgtgcacaagggtgacgagtgccagctggtgggccctgcacagccgtcccactggaaggtgctcagcagctccggcagcgaggccgccgtgccctccgtgtgcttcctggtgcccccgcccaaccaggaggcccaggaggccgtcaccaggctggaggcccagcaccaggccctggtcacgctgtggcaccagttgcacgtggacatgaagagccttctggcctggcagagccttcgccgcgacgtgcagctcatccgctcctggtccctggccacgttccgcaccctgaagccagaggagcagcgccaagccctgcacagcctggagctgcactaccaggccttcctgcgggacagccaggacgcgggcggcttcggacccgaggaccggctgatggctgagcgcgagtacggctcctgcagccaccactaccagcagctgctgcagagcctggaacagggtgcacaggaagagtctcgctgccagcgctgcatctccgagctcaaagacatccggctgcagctggaggcctgtgagacgcgcaccgtgcaccgcctgcggctgccgctggacaaagagccggcacgggagtgtgcccagcgcatcgccgagcagcagaaggcacaggcagaggtggaggggctgggcaagggggtcgcccggctctctgccgaggccgagaaggtcttggccctaccagagccatcgcctgcggcccccacgctgcgctcggagctggagctgacgctgggcaagctggagcaggtccgcagcctgtctgccatctacctggagaagctcaagaccatcagcctggtgatccgcggcacgcagggggccgaggaggtgctcagggcccacgaggagcagctcaaggaggcccaggccgtgccggccaccctcccggagctcgaggccaccaaggcctctctgaagaagctgcgggcccaggccgaggcacagcagcccacgttcgacgccctgcgggatgagctgcggggggcacaggaggtgggggagcgactgcagcagcggcacggggagcgggacgtggaggtggagcgctggcgggagcgggtcgcccagttgcttgagcgctggcaggctgtgctggcccagaccgacgtgcggcagcgcgagctcgagcaactgggccgccagctgcgttactaccgcgagagtgcagaccccttgggcgcctggctgcaggacgccaggcggcggcaggagcagatccaggccatgccgctggccgacagccaggctgtgcgggagcagctgcggcaggagcaggccctgctggaggagatcgagcgccacggcgagaaggtcgaggagtgccagaggtttgcgaaacagtacatcaacgccatcaaggactatgaactccagctggtgacgtacaaggcgcagcttgagccggtggcctccccggccaagaagcccaaggtccagtcgggatcagagagtgtcatccaggagtacgtggacctgcgtacgcactacagcgagctgaccacactgacgagccagtacatcaagttcatcagcgagactctgcggcgcatggaggaggaggagaggctggctgagcagcagcgggcagaggagcgcgagcggctggccgaggtggaggccgcgctggagaagcagcggcagctggccgaggcgcacgcccaggcaaaggcacaggcggagcgggaggcgaaggagctgcagcagcgcatgcaggaggaggtggtgcggcgggaggaggcggcggtggacgcgcagcagcagaagcgcagcattcaggaggagctgcagcagctgcggcagagctcggaggcggagatccaggccaaggcccggcaggcagaggcggctgagcgcagccggctgcgcatcgaggaggagatccgcgtggtgcgcctgcagttggaggccaccgagcgccagcgtggcggggctgagggggagctgcaggcactgcgtgcacgggcggaggaggctgaggcacaaaagcgacaggcgcaggaggaggccgagcgcttgcggaggcaggtgcaggacgagagccagcgtaagcggcaggcggaggtggagctggcctcgcgcgtgaaggccgaggccgaggcggcgcgcgagaagcagcgggccctgcaggccctggaggagctgcggctgcaggcggaggaggcggagcggcgcctgcggcaggccgaggtggagcgagcgcggcaggtacaggtggccctggagacggcgcagcgcagtgcagaggcggagctgcagagcaaacgcgcctccttcgccgagaagacggcacagctggagcgctccctgcaggaggaacacgtggctgtggcacagctgcgggaggaggctgagcggcgggcacagcagcaggccgaggccgagcgggcgcgcgaggaggcagagcgggagctggagcgctggcagctcaaggccaacgaggcgctacggctgcggctgcaggcggaggaggtggcgcagcagaagagcctggcgcaggccgaggctgagaagcagaaggaggaggcggagcgcgaggcgcggcggcgcggcaaggcggaggagcaggccgtccggcagcgggagctggctgaacaagagctggagaagcagcggcagctggcggaaggcaccgcgcagcagcgcctggccgcggagcaggagttgatccggctgcgggccgagacggagcagggggagcagcagcggcagctgctggaggaggagctggcccggctgcagcgtgaggcggctgcagccacgcagaaacggcaggagctggaagccgagctggccaaggtgcgggccgagatggaggtgctgctggccagcaaggcgagggctgaggaggagtcgcgctccaccagcgagaagtccaagcagaggctggaggccgaggccggccggttccgcgagctggccgaggaggccgcccgcctgcgtgccctggcggaagaggccaagcggcagcggcagctggccgaggaagacgcggcgcggcagcgggccgaggcggagcgggtgcttgcggagaagctggccgccatcggcgaggccacgcggctcaagacggaggcggagatcgcgctcaaggagaaggaggcggagaacgagcgcctgcggcggctggcggaggacgaggccttccagcggcggcggctggaggagcaggccgcgcaacacaaggctgacatcgaggagcgcctggcccagctgcgcaaggcatcggacagcgagctggagcggcagaaggggctggtggaggacacgctgaggcagcggcggcaggtggaggaggagatcctggcgctgaaggcgagcttcgagaaggcggccgctggcaaggcggagctggagctggagctgggacgcatccgcagcaacgcggaggacacgctgcgcagcaaggagcaggccgagctggaggctgcgaggcagcggcagctggcggcggaggaggagcggcggcgccgtgaggctgaggagcgcgtgcagaagagcctggcggccgaggaggaggccgcacggcagcggaaggcggcgctggaggaagtcgagcggctgaaagccaaggtggaggaggcgcggcgcctgcgggagcgagcggagcaggagtcggcgcggcagctgcagctggcccaggaggccgcccagaagcggctgcaggcggaagagaaggcacacgccttcgcggtgcagcagaaggagcaggagctacagcagacgctgcagcaggagcagagcgtgctggaccagctgcgcggcgaggcggaggcggcccggcgggcggctgaggaggcggaggaggcccgggtgcaggcggagcgtgaggcggcgcagtcccggcggcaggtggaagaggccgagcggctgaagcagtcggcagaggagcaggcacaggcccgggctcaggcacaggcggctgcagagaagctgcgcaaggaggccgagcaagaggcggcgcggcgggcacaggcggagcaggcggccctgcggcagaagcaggcagctgacgcggagatggagaagcataagaaattcgccgagcagacgctgcggcagaaggcgcaggtggagcaggagctgacaacactgcggctgcagctggaggagaccgaccaccagaagaacctgctggacgaggagctgcagcggctgaaggcggaggccacggaggccgcacgccagcgcagccaggtggaggaggagctcttctcggtgcgcgtgcagatggaggagctgagcaagctcaaggcacgcatcgaggctgagaaccgcgcactcatcttgcgtgacaaggacaatacgcagcgcttcctgcaggaggaggctgagaagatgaagcaggtggcggaggaggccgcgcggctgagtgtggcggcccaagaggctgcgcgactgcggcagctggcagaggaggacctggcacagcagcgggccttggcagagaagatgctcaaggagaagatgcaggcggtgcaggaggccacgcgactcaaggctgaggcggaactgctgcagcagcagaaggagcttgcgcaggagcaggcgcggcggctgcaggaggacaaggagcagatggcgcagcagctggcggaggagacgcagggcttccagcggacgctggaggccgagcggcagcggcagctggagatgagcgctgaggctgagcgcctcaagctgcgtgtggccgagatgagccgagcccaggcccgcgctgaggaggacgcccagcgcttccggaagcaggcggaggagatcggtgagaagctgcaccgcacggagctcgccacccaggagaaggtgaccctggtgcagacactggagatccagcgacagcagagtgaccatgatgccgagcgcctgcgggaggccatcgctgagctggagcgtgagaaggagaagctccaacaggaggccaaactgctgcagctcaagtctgaggagatgcagacggtgcagcaggagcagctgctgcaggagacgcaggccctgcagcaaagcttcctctctgaaaaggacagcctgctacagcgggagcgcttcatcgagcaggagaaggccaagctggagcagctcttccaggacgaggtggccaaggcacagcagctgcgtgaggagcagcagcggcagcagcagcagatggagcaggaacggcagcggctggtggccagcatggaggaggcgcggcggcggcagcatgaggccgaggagggcgtgcggcgcaagcaggaggagctgcagcagctggagcagcagcggcggcagcaggaggagctgctggctgaggagaaccagaggctgcgtgagcagctgcagctcctggaggagcagcaccgggccgcgctggcgcactcagaggaggtcactgcctcgcaggtggctgccacaaagaccctgcccaatggccgggatgcacttgatggccccgcggcagaggcagagccggagcacagcttcgatggcctgcggcggaaggtgtcagctcagaggctgcaggaggccggcatcctgagtgcggaggagctgcagcggttggcgcagggccacaccacggtggacgagctcgcacggcgggaagacgtgcgccactacctgcagggccgcagcagtatcgcagggctgttgctgaaggccaccaatgagaagctgagtgtttacgccgccctgcagaggcagctgctgagtcccggcacggccctcatcctgctggaggcgcaggcggcctcaggcttcctgctggaccctgtgcggaaccggcggctgaccgtcaacgaggctgtgaaggagggtgtggtgggccccgagctgcaccacaagctgctgtcggccgagcgcgccgtcactggctacaaggacccctacactggccagcagatctctctcttccaagccatgcagaagggcctcatcgtccgggagcacggcatccgcctgctggaggcccagatcgccacgggcggcgttatcgaccccgtgcacagccaccgcgtgcccgtggacgtggcctaccggcgcggctacttcgacgaggagatgaaccgcgtcctggcggaccccagcgacgacaccaagggcttctttgaccccaacacgcacgagaacctcacgtacctgcagctactggagcgctgcgtggaggaccccgagacgggcctgtgccttctgccactcacggataaggctgccaagggcggggagctggtctacactgactccgaggcccgggacgtctttgagaaggccaccgtgtctgcgccgttcggcaagttccagggcaagacggtgaccatttgggagatcatcaactcggaatacttcacggcagagcagcggcgggacctgctgcggcagttccgcacgggccggatcacagtggagaagatcatcaagatcatcatcacggtggtggaggagcaggagcagaagggccggctttgctttgagggcctgcgcagcctggtgccagccgccgagctgctggagagcagggtcatcgaccgcgagctctaccagcagctgcagcgaggtgagcgctctgtgcgagacgtagccgaggtggacactgtgcggcgggctctccggggtgccaacgtcatcgcgggtgtatggctggaggaggcggggcagaagctgagtatctacaatgccctgaagaaagacctgctgccatccgacatggccgtggccctgttggaagcccaggccggcaccgggcacatcatcgaccccgccaccagcgcccggctgaccgtggacgaggcagtgcgtgctggcctggtgggccccgagtttcatgagaagctgctatcagccgagaaggctgtgacagggtacagggacccctacacagggcagagcgtctccctgttccaggccctgaagaagggcctcattccccgggagcagggcctgcgcctgttggacgcccagctgtccacgggcggcatcgtggaccccagcaagagccaccgcgtgcccctggatgtcgcctgcgcccgaggctgcctggatgaggagaccagcagggccctgtcggcaccaagggccgacgccaaggcctacagtgaccccagcacaggggagccggccacctacggcgagctccagcagcggtgccggcccgaccagctgaccgggctgagcctgctgccgctctcagaaaaggctgctcgggcccggcaggaggagctctactcagagctgcaggcccgtgagacctttgaaaagaccccggttgaggtccccgtgggtggcttcaagggcaggacggtgacggtgtgggagctcatcagctctgagtacttcactgcggagcagcggcaggagctgttgcgtcagttccgcacgggcaaggtcaccgtggagaaggtcatcaagattctcattaccatcgtggaggaggtggagaccctgcggcaggagaggctgtccttcagcggcctccgtgcccctgtgccagccagcgagctcctggcttccggggtcctcagcagagcccagtttgagcagctcaaggacggcaagacgacggtcaaggacctttcggagctgggctccgtgcggacgctgctgcagggcagtggctgcctcgccggcatctacctggaggacaccaaggagaaggtgtccatctacgaggccatgcgccggggcctgctgagagccacaacggctgcgctcctgctggaggcgcaggcggccactggcttcctggtggaccccgtgcggaaccagcgcctgtatgtccacgaggccgtgaaggcgggcgtggtgggccccgagcttcacgagcagctgctgtctgccgagaaggccgtcaccggctacagagacccctactcgggcagcaccatctccctcttccaggccatgcagaagggcctggttctccggcagcacggcatccgcctgctggaggcccagatcgccacgggcggcatcatcgaccccgtgcacagccaccgcgtgcctgtggacgtggcctaccagcgcggctacttcagtgaggagatgaaccgcgtcctggcggaccccagcgacgacaccaagggcttctttgaccccaacacgcatgagaacctcacgtacaggcagctgctggagcggtgcgtggaggaccccgagacgggcttgcgccttctgccactgaaaggggcggagaaggctgaggtggtggagaccacgcaggtgtacactgaggaggagacaagaagggcatttgaagagacacagatcgacattcccggcggcggcagccacggcggctccaccatgtccctgtgggaggtgatgcagtcggacctgatccccgaggagcagcgggcccagctgatggctgacttccaggccggccgggtgaccaaggaacgcatgatcatcatcatcatcgagatcattgagaagacagagatcatccgccagcagggtctggcctcctacgactacgtgcgccgccgcctcacggctgaggacctgttcgaggctcggatcatctctctcgagacctacaacctgctccgggagggcaccaggagcctccgtgaggctctcgaggcggagtccgcctggtgctacctctatggcacgggctccgtggctggtgtctacctgcccggttccaggcagacactgagcatctaccaggctctcaagaaagggctgctgagtgccgaggtggcccgcctgctgctggaggcacaggcagccacaggcttcctgctggacccggtgaagggggagcggctgactgtggatgaggctgtgcggaagggcctcgtggggcccgagctgcacgaccgcctgctctcggctgagcgggcggtcaccggctaccgtgacccctacaccgagcagaccatctcgctcttccaggccatgaagaaggagctgatccctactgaggaggccctgcggctgctggatgcccagctggccaccggcggcatcgtggacccccgcctgggcttccaccttcccctggaggtggcttaccagcgtggctacctcaacaaggacacgcacgaccagctgtcagagcccagcgaggtgcgcagctacgtggacccgtccaccgacgagcgcctcagctacacgcagctgctcaggcggtgccgtcgtgacgacggcaccggccagctgctcctgccactgtcggacgcccgcaagctgaccttccgtggcctgcggaagcagatcaccatggaggagctggtgcgctcgcaggtcatggacgaggccacggcgctgcagctgcgggagggcctgacctccatcgaggaggtcaccaagaacttgcagaagttcctggaaggcaccagctgcatcgctggtgtcttcgtggacgccaccaaggaacggctctcggtgtaccaggccatgaagaagggcatcatccgccccggcacagcctttgagctcctggaggcgcaggcggccaccggttacgtcatcgaccccatcaagggactgaagctgacggtggaggaggctgtgcgtatgggcattgtgggccccgagttcaaggacaagctgctgtcggccgagcgcgccgtcactgggtacaaggacccctactctgggaagctcatctccctcttccaggccatgaagaagggcctgatcctgaaggaccatggcatccgcctgctggaggcccagatcgccacgggcggcatcatcgaccctgaggagagccaccggctgcccgtggaggtggcctacaagcgcggcctcttcgatgaggagatgaacgagatcctgaccgacccctcggacgacaccaagggcttctttgaccctaacacggaggagaacctcacctacctgcagctgatggagcgttgtatcactgacccccagacgggcctgtgtctcttgccgctgaaggagaagaagcgggagcggaagacgtcctccaagtcctccgtgcgcaagcgccgagtggtcatcgtggaccccgagacgggcaaggagatgtcagtgtacgaggcctaccgcaagggcctgattgaccaccagacgtacctggagctgtccgagcaggagtgcgagtgggaggagatcaccatctcctcctcggacggcgtggtcaagtccatgatcatcgaccgccgctccgggcgccagtacgacatcgatgatgccatcgccaagaacctcatcgaccgctcggcactggaccagtaccgcgccggcacgctctccatcaccgagttcgccgacatgctctcgggcaacgccggtggtttccgctcccgttcctcctcggtgggatcctcctcctcctaccccatcagccccgccgtctccaggacccagctggcctcctggtcagaccccactgaggagacgggccccgtggctggcatcctggacacggagacgctggagaaggtgtccatcaccgaggccatgcaccggaacctggtggataacatcacggggcagcggctgctggaggcgcaggcctgcaccgggggcatcatcgaccccagcaccggtgagcgcttccctgtcaccgacgccgtcaacaagggcctggtggacaagatcatggtggaccgcatcaacctggcccagaaggccttctgcggcttcgaggacccacgcaccaagaccaagatgtcggccgcccaggccctgaagaagggctggctctactacgaggccggccagcgcttcctggaggtgcagtacctgaccggcggcttgatcgagcccgacacgccgggccgcgtgcccctggacgaggccctgcagcgcggcacggtggacgcccgcaccgcacagaagctgcgtgacgtgggcgcctactccaagtacctcacctgccctaagaccaagctcaagatctcctataaggacgcgctggaccgcagcatggtggaggagggcacggggctgcggctgctggaggctgccgcgcagtccaccaagggctactacagcccctacagcgtcagcggctccggctctaccgctggctcccgcaccggctcgcgcaccggctcccgggccggctcccgccgcggcagctttgacgccaccggctccggcttctccatgaccttctcttcatcctcctactcctcctcgggctacggccgccgctacgcctcggggtcctcggcctccctggggggccctgagtctgccgtggcctgaggctgcctgcgcccaccccgctctgcatgcggcccagcccggctcccaccgaggcgcgggggccgttttcaacgcttaaaggtgtcttcctcccaagtggtgcctaaagtttaaccaaaaagaccagactaatatattaatatatatctgctgtccagacagcctgtatcttgggggacagggctggcccagccctgctggccgcctcaccccctcgggtctcctcactcccttctacctgccactcacacagccaggtgccttggagggtcccaagctgggccccagcccaccctcctgtcttcccagggtagcccgcctgccagtcctagctgcacagggcagctgggcccaaccctgtctgtagagggccctggtgtttctagcactggcctgcacggtgggccttgctggggacggggggccccagtcagcctctctcccagtctacccagagaagccccttccccatgggaagacgaggccctcgggcccagcccccacagtgctgtctgatctgtgctttccagctcaccccccacactcactcctgagacccctggcctccggcgtcagcctccagcctctgttcccctagtaagtgccttccatgtcggcctctaaccccaggccccgaggacccagacccagtggggaggcggacgttccagccggcatggctgggaactgcagacctgtcctcctggtgggtccaggggcccctccagcttgtggagccccacactggggtgccgcctgcccgtctctctcccatggagccccagccccctttgggcccagggacaccagccaggctctgtgctgaccctcctgttgcacccagccctggtctcagcagcgaccacccctgcctccaccctctgagctttgcatgttccactaaccccgggcgggtggcaggtggaggtgtcaggctgctggcgcctctgcaagggcagaacactaacctgaccgtgggcggggccttgcggtatccgcccccaataaaagcaattccaaccttcccgtg

SEQ ID NO: 5529 - protein, 4551 aa, Homo sapiens; identical to SEQ ID NO: 757

SEQ ID NO: 5530 - DNA, 14742 bp, Homo sapiens
gctgtctagcctggagcagccggttcccagcgcaggaagggcagccctggcggctccgcgtggcggctatggagccctcgggcagcctgtttccctccctggtggttgtgggtcacgttgtcaccctggccgctgtgtggcactggcgcaggggacgtcggtgggcgcaggacgagcaagatgagcgggatcgtgtgcagaagaaaaccttcaccaagtgggtcaacaagcacctcatcaaggcccagaggcacatcagtgacctgtatgaagacctccgcgatggccacaacctcatctccctgctggaggtcctctcgggggacagcctgccccgggagaaggggaggatgcgtttccacaagctgcagaatgtccagattgccctggactacctccggcaccgccaggtgaagctggtgaacatcaggaatgatgacatcgctgacggcaaccccaagctgacccttggcctcatctggacaatcattctgcacttccagatctcagatatccaggtgagtgggcagtcggaggacatgacggccaaggagaagctgctgctgtggtcgcagcgaatggtggaggggtaccagggcctgcgatgcgacaacttcacctccagctggagagacggccgcctcttcaatgccatcatccaccggcacaagcccctgctcatcgacatgaacaaggtgtaccggcagaccaacctggagaacctggaccaggccttctctgtggcggagcgggacctgggagtgacgcggctcctggaccctgaggacgtggatgtccctcagcccgacgagaagtccatcatcacctacgtctcgtcgctgtatgacgccatgccccgcgtgccggacgtgcaggatggggtgagggccaacgagctgcagctgcgctggcaggagtaccgggagctggtgctgctgctgcttcagtggatgcgacaccacacggccgcctttgaggaacgcaggttcccctccagcttcgaggagattgagatcctgtggtctcagttcctgaagtttaaggagatggagctaccagccaaggaggccgacaagaacaggtccaagggcatctaccaatccctggagggagcggtgcaagcaggccagctcaaggtgccccctggctaccacccgctggatgtggagaaggagtggggcaagctgcacgtggccatcctggagcgggagaagcagctccgcagcgagtttgagaggctggagtgtcttcagcgcatcgtgaccaagctgcagatggaggcggggctgtgtgaggagcagctgaaccaggccgacgccctgctgcagtcggatgtccggctgctggctgcaggcaaagtgccacagcgggcgggggaggtggaacgggacttggacaaggcggatagcatgatccggctgctcttcaacgacgtgcagaccctcaaggatggacggcacccgcagggcgagcagatgtaccgcagggtgtaccgtctgcacgagcgcctggtagccatccgcaccgagtacaacctacggctgaaggcaggcgtggcggcccctgcaacccaggtggcccaggtgactctgcagagtgtgcagaggcgccccgagctggaggactccactctgcgctacctgcaggacctgctggcctgggtggaggagaaccagcaccgtgtggatggcgctgagtggggtgtggacctgcccagcgtggaggcgcagctgggcagccaccgaggcctgcaccagtccatcgaagaattccgggccaagatcgagcgggcacggagtgacgagggccagctctcccccgccacccggggtgcctaccgtgactgcctgggtcggctggacctgcagtacgccaagctgctgaactcctccaaggcccgcctcaggtccctggagagcttgcacagctttgtggcagccgccactaaggagctaatgtggctgaatgagaaggaggaggaggaggtgggcttcgactggagcgaccgcaacaccaacatgaccgccaagaaggagagctactcggcgctgatgcgggagctggagctgaaggagaagaagatcaaggagctccaaaatgctggggaccggctgctgcgggaggaccacccggcccggcccacggtggagtccttccaggcggccctgcagacgcagtggagctggatgctacagctgtgctgctgtatcgaggcacacctgaaggagaacgctgcctactttcagttcttctcagatgtgcgggaggccgaggggcagttgcagaagctgcaggaggcactgcgtaggaaatacagttgtgatcgctccgccaccgtcacccggctggaggacctgctgcaggatgcccaggacgagaaggaacagctgaacgagtacaagggccacctctcaggcctggccaagcgggccaaggccgtcgtgcagctgaagccccgccacccagcccaccccatgcggggccgcctgcccctgctggccgtgtgcgactataagcaggtggaggtgactgtgcacaagggtgacgagtgccagctggtgggccctgcacagccgtcccactggaaggtgctcagcagctccggcagcgaggccgccgtgccctccgtgtgcttcctggtgcccccgcccaaccaggaggcccaggaggccgtcaccaggctggaggcccagcaccaggccctggtcacgctgtggcaccagttgcacgtggacatgaagagccttctggcctggcagagccttcgccgcgacgtgcagctcatccgctcctggtccctggccacgttccgcaccctgaagccagaggagcagcgccaagccctgcacagcctggagctgcactaccaggccttcctgcgggacagccaggacgcgggcggcttcggacccgaggaccggctgatggctgagcgcgagtacggctcctgcagccaccactaccagcagctgctgcagagcctggaacagggtgcacaggaagagtctcgctgccagcgctgcatctccgagctcaaagacatccggctgcagctggaggcctgtgagacgcgcaccgtgcaccgcctgcggctgccgctggacaaagagccggcacgggagtgtgcccagcgcatcgccgagcagcagaaggcacaggcagaggtggaggggctgggcaagggggtcgcccggctctctgccgaggccgagaaggtcttggccctaccagagccatcgcctgcggcccccacgctgcgctcggagctggagctgacgctgggcaagctggagcaggtccgcagcctgtctgccatctacctggagaagctcaagaccatcagcctggtgatccgcggcacgcagggggccgaggaggtgctcagggcccacgaggagcagctcaaggaggcccaggccgtgccggccaccctcccggagctcgaggccaccaaggcctctctgaagaagctgcgggcccaggccgaggcacagcagcccacgttcgacgccctgcgggatgagctgcggggggcacaggaggtgggggagcgactgcagcagcggcacggggagcgggacgtggaggtggagcgctggcgggagcgggtcgcccagttgcttgagcgctggcaggctgtgctggcccagaccgacgtgcggcagcgcgagctcgagcaactgggccgccagctgcgttactaccgcgagagtgcagaccccttgggcgcctggctgcaggacgccaggcggcggcaggagcagatccaggccatgccgctggccgacagccaggctgtgcgggagcagctgcggcaggagcaggccctgctggaggagatcgagcgccacggcgagaaggtcgaggagtgccagaggtttgcgaaacagtacatcaacgccatcaaggactatgaactccagctggtgacgtacaaggcgcagcttgagccggtggcctccccggccaagaagcccaaggtccagtcgggatcagagagtgtcatccaggagtacgtggacctgcgtacgcactacagcgagctgaccacactgacgagccagtacatcaagttcatcagcgagactctgcggcgcatggaggaggaggagaggctggctgagcagcagcgggcagaggagcgcgagcggctggccgaggtggaggccgcgctggagaagcagcggcagctggccgaggcgcacgcccaggcaaaggcacaggcggagcgggaggcgaaggagctgcagcagcgcatgcaggaggaggtggtgcggcgggaggaggcggcggtggacgcgcagcagcagaagcgcagcattcaggaggagctgcagcagctgcggcagagctcggaggcggagatccaggccaaggcccggcaggcagaggcggctgagcgcagccggctgcgcatcgaggaggagatccgcgtggtgcgcctgcagttggaggccaccgagcgccagcgtggcggggctgagggggagctgcaggcactgcgtgcacgggcggaggaggctgaggcacaaaagcgacaggcgcaggaggaggccgagcgcttgcggaggcaggtgcaggacgagagccagcgtaagcggcaggcggaggtggagctggcctcgcgcgtgaaggccgaggccgaggcggcgcgcgagaagcagcgggccctgcaggccctggaggagctgcggctgcaggcggaggaggcggagcggcgcctgcggcaggccgaggtggagcgagcgcggcaggtacaggtggccctggagacggcgcagcgcagtgcagaggcggagctgcagagcaaacgcgcctccttcgccgagaagacggcacagctggagcgctccctgcaggaggaacacgtggctgtggcacagctgcgggaggaggctgagcggcgggcacagcagcaggccgaggccgagcgggcgcgcgaggaggcagagcgggagctggagcgctggcagctcaaggccaacgaggcgctacggctgcggctgcaggcggaggaggtggcgcagcagaagagcctggcgcaggccgaggctgagaagcagaaggaggaggcggagcgcgaggcgcggcggcgcggcaaggcggaggagcaggccgtccggcagcgggagctggctgaacaagagctggagaagcagcggcagctggcggaaggcaccgcgcagcagcgcctggccgcggagcaggagttgatccggctgcgggccgagacggagcagggggagcagcagcggcagctgctggaggaggagctggcccggctgcagcgtgaggcggctgcagccacgcagaaacggcaggagctggaagccgagctggccaaggtgcgggccgagatggaggtgctgctggccagcaaggcgagggctgaggaggagtcgcgctccaccagcgagaagtccaagcagaggctggaggccgaggccggccggttccgcgagctggccgaggaggccgcccgcctgcgtgccctggcggaagaggccaagcggcagcggcagctggccgaggaagacgcggcgcggcagcgggccgaggcggagcgggtgcttgcggagaagctggccgccatcggcgaggccacgcggctcaagacggaggcggagatcgcgctcaaggagaaggaggcggagaacgagcgcctgcggcggctggcggaggacgaggccttccagcggcggcggctggaggagcaggccgcgcaacacaaggctgacatcgaggagcgcctggcccagctgcgcaaggcatcggacagcgagctggagcggcagaaggggctggtggaggacacgctgaggcagcggcggcaggtggaggaggagatcctggcgctgaaggcgagcttcgagaaggcggccgctggcaaggcggagctggagctggagctgggacgcatccgcagcaacgcggaggacacgctgcgcagcaaggagcaggccgagctggaggctgcgaggcagcggcagctggcggcggaggaggagcggcggcgccgtgaggctgaggagcgcgtgcagaagagcctggcggccgaggaggaggccgcacggcagcggaaggcggcgctggaggaagtcgagcggctgaaagccaaggtggaggaggcgcggcgcctgcgggagcgagcggagcaggagtcggcgcggcagctgcagctggcccaggaggccgcccagaagcggctgcaggcggaagagaaggcacacgccttcgcggtgcagcagaaggagcaggagctacagcagacgctgcagcaggagcagagcgtgctggaccagctgcgcggcgaggcggaggcggcccggcgggcggctgaggaggcggaggaggcccgggtgcaggcggagcgtgaggcggcgcagtcccggcggcaggtggaagaggccgagcggctgaagcagtcggcagaggagcaggcacaggcccgggctcaggcacaggcggctgcagagaagctgcgcaaggaggccgagcaagaggcggcgcggcgggcacaggcggagcaggcggccctgcggcagaagcaggcagctgacgcggagatggagaagcataagaaattcgccgagcagacgctgcggcagaaggcgcaggtggagcaggagctgacaacactgcggctgcagctggaggagaccgaccaccagaagaacctgctggacgaggagctgcagcggctgaaggcggaggccacggaggccgcacgccagcgcagccaggtggaggaggagctcttctcggtgcgcgtgcagatggaggagctgagcaagctcaaggcacgcatcgaggctgagaaccgcgcactcatcttgcgtgacaaggacaatacgcagcgcttcctgcaggaggaggctgagaagatgaagcaggtggcggaggaggccgcgcggctgagtgtggcggcccaagaggctgcgcgactgcggcagctggcagaggaggacctggcacagcagcgggccttggcagagaagatgctcaaggagaagatgcaggcggtgcaggaggccacgcgactcaaggctgaggcggaactgctgcagcagcagaaggagcttgcgcaggagcaggcgcggcggctgcaggaggacaaggagcagatggcgcagcagctggcggaggagacgcagggcttccagcggacgctggaggccgagcggcagcggcagctggagatgagcgctgaggctgagcgcctcaagctgcgtgtggccgagatgagccgagcccaggcccgcgctgaggaggacgcccagcgcttccggaagcaggcggaggagatcggtgagaagctgcaccgcacggagctcgccacccaggagaaggtgaccctggtgcagacactggagatccagcgacagcagagtgaccatgatgccgagcgcctgcgggaggccatcgctgagctggagcgtgagaaggagaagctccaacaggaggccaaactgctgcagctcaagtctgaggagatgcagacggtgcagcaggagcagctgctgcaggagacgcaggccctgcagcaaagcttcctctctgaaaaggacagcctgctacagcgggagcgcttcatcgagcaggagaaggccaagctggagcagctcttccaggacgaggtggccaaggcacagcagctgcgtgaggagcagcagcggcagcagcagcagatggagcaggaacggcagcggctggtggccagcatggaggaggcgcggcggcggcagcatgaggccgaggagggcgtgcggcgcaagcaggaggagctgcagcagctggagcagcagcggcggcagcaggaggagctgctggctgaggagaaccagaggctgcgtgagcagctgcagctcctggaggagcagcaccgggccgcgctggcgcactcagaggaggtcactgcctcgcaggtggctgccacaaagaccctgcccaatggccgggatgcacttgatggccccgcggcagaggcagagccggagcacagcttcgatggcctgcggcggaaggtgtcagctcagaggctgcaggaggccggcatcctgagtgcggaggagctgcagcggttggcgcagggccacaccacggtggacgagctcgcacggcgggaagacgtgcgccactacctgcagggccgcagcagtatcgcagggctgttgctgaaggccaccaatgagaagctgagtgtttacgccgccctgcagaggcagctgctgagtcccggcacggccctcatcctgctggaggcgcaggcggcctcaggcttcctgctggaccctgtgcggaaccggcggctgaccgtcaacgaggctgtgaaggagggtgtggtgggccccgagctgcaccacaagctgctgtcggccgagcgcgccgtcactggctacaaggacccctacactggccagcagatctctctcttccaagccatgcagaagggcctcatcgtccgggagcacggcatccgcctgctggaggcccagatcgccacgggcggcgttatcgaccccgtgcacagccaccgcgtgcccgtggacgtggcctaccggcgcggctacttcgacgaggagatgaaccgcgtcctggcggaccccagcgacgacaccaagggcttctttgaccccaacacgcacgagaacctcacgtacctgcagctactggagcgctgcgtggaggaccccgagacgggcctgtgccttctgccactcacggataaggctgccaagggcggggagctggtctacactgactccgaggcccgggacgtctttgagaaggccaccgtgtctgcgccgttcggcaagttccagggcaagacggtgaccatttgggagatcatcaactcggaatacttcacggcagagcagcggcgggacctgctgcggcagttccgcacgggccggatcacagtggagaagatcatcaagatcatcatcacggtggtggaggagcaggagcagaagggccggctttgctttgagggcctgcgcagcctggtgccagccgccgagctgctggagagcagggtcatcgaccgcgagctctaccagcagctgcagcgaggtgagcgctctgtgcgagacgtagccgaggtggacactgtgcggcgggctctccggggtgccaacgtcatcgcgggtgtatggctggaggaggcggggcagaagctgagtatctacaatgccctgaagaaagacctgctgccatccgacatggccgtggccctgttggaagcccaggccggcaccgggcacatcatcgaccccgccaccagcgcccggctgaccgtggacgaggcagtgcgtgctggcctggtgggccccgagtttcatgagaagctgctatcagccgagaaggctgtgacagggtacagggacccctacacagggcagagcgtctccctgttccaggccctgaagaagggcctcattccccgggagcagggcctgcgcctgttggacgcccagctgtccacgggcggcatcgtggaccccagcaagagccaccgcgtgcccctggatgtcgcctgcgcccgaggctgcctggatgaggagaccagcagggccctgtcggcaccaagggccgacgccaaggcctacagtgaccccagcacaggggagccggccacctacggcgagctccagcagcggtgccggcccgaccagctgaccgggctgagcctgctgccgctctcagaaaaggctgctcgggcccggcaggaggagctctactcagagctgcaggcccgtgagacctttgaaaagaccccggttgaggtccccgtgggtggcttcaagggcaggacggtgacggtgtgggagctcatcagctctgagtacttcactgcggagcagcggcaggagctgttgcgtcagttccgcacgggcaaggtcaccgtggagaaggtcatcaagattctcattaccatcgtggaggaggtggagaccctgcggcaggagaggctgtccttcagcggcctccgtgcccctgtgccagccagcgagctcctggcttccggggtcctcagcagagcccagtttgagcagctcaaggacggcaagacgacggtcaaggacctttcggagctgggctccgtgcggacgctgctgcagggcagtggctgcctcgccggcatctacctggaggacaccaaggagaaggtgtccatctacgaggccatgcgccggggcctgctgagagccacaacggctgcgctcctgctggaggcgcaggcggccactggcttcctggtggaccccgtgcggaaccagcgcctgtatgtccacgaggccgtgaaggcgggcgtggtgggccccgagcttcacgagcagctgctgtctgccgagaaggccgtcaccggctacagagacccctactcgggcagcaccatctccctcttccaggccatgcagaagggcctggttctccggcagcacggcatccgcctgctggaggcccagatcgccacgggcggcatcatcgaccccgtgcacagccaccgcgtgcctgtggacgtggcctaccagcgcggctacttcagtgaggagatgaaccgcgtcctggcggaccccagcgacgacaccaagggcttctttgaccccaacacgcatgagaacctcacgtacaggcagctgctggagcggtgcgtggaggaccccgagacgggcttgcgccttctgccactgaaaggggcggagaaggctgaggtggtggagaccacgcaggtgtacactgaggaggagacaagaagggcatttgaagagacacagatcgacattcccggcggcggcagccacggcggctccaccatgtccctgtgggaggtgatgcagtcggacctgatccccgaggagcagcgggcccagctgatggctgacttccaggccggccgggtgaccaaggaacgcatgatcatcatcatcatcgagatcattgagaagacagagatcatccgccagcagggtctggcctcctacgactacgtgcgccgccgcctcacggctgaggacctgttcgaggctcggatcatctctctcgagacctacaacctgctccgggagggcaccaggagcctccgtgaggctctcgaggcggagtccgcctggtgctacctctatggcacgggctccgtggctggtgtctacctgcccggttccaggcagacactgagcatctaccaggctctcaagaaagggctgctgagtgccgaggtggcccgcctgctgctggaggcacaggcagccacaggcttcctgctggacccggtgaagggggagcggctgactgtggatgaggctgtgcggaagggcctcgtggggcccgagctgcacgaccgcctgctctcggctgagcgggcggtcaccggctaccgtgacccctacaccgagcagaccatctcgctcttccaggccatgaagaaggagctgatccctactgaggaggccctgcggctgctggatgcccagctggccaccggcggcatcgtggacccccgcctgggcttccaccttcccctggaggtggcttaccagcgtggctacctcaacaaggacacgcacgaccagctgtcagagcccagcgaggtgcgcagctacgtggacccgtccaccgacgagcgcctcagctacacgcagctgctcaggcggtgccgtcgtgacgacggcaccggccagctgctcctgccactgtcggacgcccgcaagctgaccttccgtggcctgcggaagcagatcaccatggaggagctggtgcgctcgcaggtcatggacgaggccacggcgctgcagctgcgggagggcctgacctccatcgaggaggtcaccaagaacttgcagaagttcctggaaggcaccagctgcatcgctggtgtcttcgtggacgccaccaaggaacggctctcggtgtaccaggccatgaagaagggcatcatccgccccggcacagcctttgagctcctggaggcgcaggcggccaccggttacgtcatcgaccccatcaagggactgaagctgacggtggaggaggctgtgcgtatgggcattgtgggccccgagttcaaggacaagctgctgtcggccgagcgcgccgtcactgggtacaaggacccctactctgggaagctcatctccctcttccaggccatgaagaagggcctgatcctgaaggaccatggcatccgcctgctggaggcccagatcgccacgggcggcatcatcgaccctgaggagagccaccggctgcccgtggaggtggcctacaagcgcggcctcttcgatgaggagatgaacgagatcctgaccgacccctcggacgacaccaagggcttctttgaccctaacacggaggagaacctcacctacctgcagctgatggagcgttgtatcactgacccccagacgggcctgtgtctcttgccgctgaaggagaagaagcgggagcggaagacgtcctccaagtcctccgtgcgcaagcgccgagtggtcatcgtggaccccgagacgggcaaggagatgtcagtgtacgaggcctaccgcaagggcctgattgaccaccagacgtacctggagctgtccgagcaggagtgcgagtgggaggagatcaccatctcctcctcggacggcgtggtcaagtccatgatcatcgaccgccgctccgggcgccagtacgacatcgatgatgccatcgccaagaacctcatcgaccgctcggcactggaccagtaccgcgccggcacgctctccatcaccgagttcgccgacatgctctcgggcaacgccggtggtttccgctcccgttcctcctcggtgggatcctcctcctcctaccccatcagccccgccgtctccaggacccagctggcctcctggtcagaccccactgaggagacgggccccgtggctggcatcctggacacggagacgctggagaaggtgtccatcaccgaggccatgcaccggaacctggtggataacatcacggggcagcggctgctggaggcgcaggcctgcaccgggggcatcatcgaccccagcaccggtgagcgcttccctgtcaccgacgccgtcaacaagggcctggtggacaagatcatggtggaccgcatcaacctggcccagaaggccttctgcggcttcgaggacccacgcaccaagaccaagatgtcggccgcccaggccctgaagaagggctggctctactacgaggccggccagcgcttcctggaggtgcagtacctgaccggcggcttgatcgagcccgacacgccgggccgcgtgcccctggacgaggccctgcagcgcggcacggtggacgcccgcaccgcacagaagctgcgtgacgtgggcgcctactccaagtacctcacctgccctaagaccaagctcaagatctcctataaggacgcgctggaccgcagcatggtggaggagggcacggggctgcggctgctggaggctgccgcgcagtccaccaagggctactacagcccctacagcgtcagcggctccggctctaccgctggctcccgcaccggctcgcgcaccggctcccgggccggctcccgccgcggcagctttgacgccaccggctccggcttctccatgaccttctcttcatcctcctactcctcctcgggctacggccgccgctacgcctcggggtcctcggcctccctggggggccctgagtctgccgtggcctgaggctgcctgcgcccaccccgctctgcatgcggcccagcccggctcccaccgaggcgcgggggccgttttcaacgcttaaaggtgtcttcctcccaagtggtgcctaaagtttaaccaaaaagaccagactaatatattaatatatatctgctgtccagacagcctgtatcttgggggacagggctggcccagccctgctggccgcctcaccccctcgggtctcctcactcccttctacctgccactcacacagccaggtgccttggagggtcccaagctgggccccagcccaccctcctgtcttcccagggtagcccgcctgccagtcctagctgcacagggcagctgggcccaaccctgtctgtagagggccctggtgtttctagcactggcctgcacggtgggccttgctggggacggggggccccagtcagcctctctcccagtctacccagagaagccccttccccatgggaagacgaggccctcgggcccagcccccacagtgctgtctgatctgtgctttccagctcaccccccacactcactcctgagacccctggcctccggcgtcagcctccagcctctgttcccctagtaagtgccttccatgtcggcctctaaccccaggccccgaggacccagacccagtggggaggcggacgttccagccggcatggctgggaactgcagacctgtcctcctggtgggtccaggggcccctccagcttgtggagccccacactggggtgccgcctgcccgtctctctcccatggagccccagccccctttgggcccagggacaccagccaggctctgtgctgaccctcctgttgcacccagccctggtctcagcagcgaccacccctgcctccaccctctgagctttgcatgttccactaaccccgggcgggtggcaggtggaggtgtcaggctgctggcgcctctgcaagggcagaacactaacctgaccgtgggcggggccttgcggtatccgcccccaataaaagcaattccaaccttcccgtg

SEQ ID NO: 5531 - protein, 4547 aa, Homo sapiens; identical to SEQ ID NO: 755

SEQ ID NO: 5532 - DNA, 14652 bp, Homo sapiens
cctccgaggggcctgtgacctcccacacccctggcccgctccgtctgccccgtgggctcctgccaccgtccccgatgaagatcgtgcccgatgagcgggatcgtgtgcagaagaaaaccttcaccaagtgggtcaacaagcacctcatcaaggcccagaggcacatcagtgacctgtatgaagacctccgcgatggccacaacctcatctccctgctggaggtcctctcgggggacagcctgccccgggagaaggggaggatgcgtttccacaagctgcagaatgtccagattgccctggactacctccggcaccgccaggtgaagctggtgaacatcaggaatgatgacatcgctgacggcaaccccaagctgacccttggcctcatctggacaatcattctgcacttccagatctcagatatccaggtgagtgggcagtcggaggacatgacggccaaggagaagctgctgctgtggtcgcagcgaatggtggaggggtaccagggcctgcgatgcgacaacttcacctccagctggagagacggccgcctcttcaatgccatcatccaccggcacaagcccctgctcatcgacatgaacaaggtgtaccggcagaccaacctggagaacctggaccaggccttctctgtggcggagcgggacctgggagtgacgcggctcctggaccctgaggacgtggatgtccctcagcccgacgagaagtccatcatcacctacgtctcgtcgctgtatgacgccatgccccgcgtgccggacgtgcaggatggggtgagggccaacgagctgcagctgcgctggcaggagtaccgggagctggtgctgctgctgcttcagtggatgcgacaccacacggccgcctttgaggaacgcaggttcccctccagcttcgaggagattgagatcctgtggtctcagttcctgaagtttaaggagatggagctaccagccaaggaggccgacaagaacaggtccaagggcatctaccaatccctggagggagcggtgcaagcaggccagctcaaggtgccccctggctaccacccgctggatgtggagaaggagtggggcaagctgcacgtggccatcctggagcgggagaagcagctccgcagcgagtttgagaggctggagtgtcttcagcgcatcgtgaccaagctgcagatggaggcggggctgtgtgaggagcagctgaaccaggccgacgccctgctgcagtcggatgtccggctgctggctgcaggcaaagtgccacagcgggcgggggaggtggaacgggacttggacaaggcggatagcatgatccggctgctcttcaacgacgtgcagaccctcaaggatggacggcacccgcagggcgagcagatgtaccgcagggtgtaccgtctgcacgagcgcctggtagccatccgcaccgagtacaacctacggctgaaggcaggcgtggcggcccctgcaacccaggtggcccaggtgactctgcagagtgtgcagaggcgccccgagctggaggactccactctgcgctacctgcaggacctgctggcctgggtggaggagaaccagcaccgtgtggatggcgctgagtggggtgtggacctgcccagcgtggaggcgcagctgggcagccaccgaggcctgcaccagtccatcgaagaattccgggccaagatcgagcgggcacggagtgacgagggccagctctcccccgccacccggggtgcctaccgtgactgcctgggtcggctggacctgcagtacgccaagctgctgaactcctccaaggcccgcctcaggtccctggagagcttgcacagctttgtggcagccgccactaaggagctaatgtggctgaatgagaaggaggaggaggaggtgggcttcgactggagcgaccgcaacaccaacatgaccgccaagaaggagagctactcggcgctgatgcgggagctggagctgaaggagaagaagatcaaggagctccaaaatgctggggaccggctgctgcgggaggaccacccggcccggcccacggtggagtccttccaggcggccctgcagacgcagtggagctggatgctacagctgtgctgctgtatcgaggcacacctgaaggagaacgctgcctactttcagttcttctcagatgtgcgggaggccgaggggcagttgcagaagctgcaggaggcactgcgtaggaaatacagttgtgatcgctccgccaccgtcacccggctggaggacctgctgcaggatgcccaggacgagaaggaacagctgaacgagtacaagggccacctctcaggcctggccaagcgggccaaggccgtcgtgcagctgaagccccgccacccagcccaccccatgcggggccgcctgcccctgctggccgtgtgcgactataagcaggtggaggtgactgtgcacaagggtgacgagtgccagctggtgggccctgcacagccgtcccactggaaggtgctcagcagctccggcagcgaggccgccgtgccctccgtgtgcttcctggtgcccccgcccaaccaggaggcccaggaggccgtcaccaggctggaggcccagcaccaggccctggtcacgctgtggcaccagttgcacgtggacatgaagagccttctggcctggcagagccttcgccgcgacgtgcagctcatccgctcctggtccctggccacgttccgcaccctgaagccagaggagcagcgccaagccctgcacagcctggagctgcactaccaggccttcctgcgggacagccaggacgcgggcggcttcggacccgaggaccggctgatggctgagcgcgagtacggctcctgcagccaccactaccagcagctgctgcagagcctggaacagggtgcacaggaagagtctcgctgccagcgctgcatctccgagctcaaagacatccggctgcagctggaggcctgtgagacgcgcaccgtgcaccgcctgcggctgccgctggacaaagagccggcacgggagtgtgcccagcgcatcgccgagcagcagaaggcacaggcagaggtggaggggctgggcaagggggtcgcccggctctctgccgaggccgagaaggtcttggccctaccagagccatcgcctgcggcccccacgctgcgctcggagctggagctgacgctgggcaagctggagcaggtccgcagcctgtctgccatctacctggagaagctcaagaccatcagcctggtgatccgcggcacgcagggggccgaggaggtgctcagggcccacgaggagcagctcaaggaggcccaggccgtgccggccaccctcccggagctcgaggccaccaaggcctctctgaagaagctgcgggcccaggccgaggcacagcagcccacgttcgacgccctgcgggatgagctgcggggggcacaggaggtgggggagcgactgcagcagcggcacggggagcgggacgtggaggtggagcgctggcgggagcgggtcgcccagttgcttgagcgctggcaggctgtgctggcccagaccgacgtgcggcagcgcgagctcgagcaactgggccgccagctgcgttactaccgcgagagtgcagaccccttgggcgcctggctgcaggacgccaggcggcggcaggagcagatccaggccatgccgctggccgacagccaggctgtgcgggagcagctgcggcaggagcaggccctgctggaggagatcgagcgccacggcgagaaggtcgaggagtgccagaggtttgcgaaacagtacatcaacgccatcaaggactatgaactccagctggtgacgtacaaggcgcagcttgagccggtggcctccccggccaagaagcccaaggtccagtcgggatcagagagtgtcatccaggagtacgtggacctgcgtacgcactacagcgagctgaccacactgacgagccagtacatcaagttcatcagcgagactctgcggcgcatggaggaggaggagaggctggctgagcagcagcgggcagaggagcgcgagcggctggccgaggtggaggccgcgctggagaagcagcggcagctggccgaggcgcacgcccaggcaaaggcacaggcggagcgggaggcgaaggagctgcagcagcgcatgcaggaggaggtggtgcggcgggaggaggcggcggtggacgcgcagcagcagaagcgcagcattcaggaggagctgcagcagctgcggcagagctcggaggcggagatccaggccaaggcccggcaggcagaggcggctgagcgcagccggctgcgcatcgaggaggagatccgcgtggtgcgcctgcagttggaggccaccgagcgccagcgtggcggggctgagggggagctgcaggcactgcgtgcacgggcggaggaggctgaggcacaaaagcgacaggcgcaggaggaggccgagcgcttgcggaggcaggtgcaggacgagagccagcgtaagcggcaggcggaggtggagctggcctcgcgcgtgaaggccgaggccgaggcggcgcgcgagaagcagcgggccctgcaggccctggaggagctgcggctgcaggcggaggaggcggagcggcgcctgcggcaggccgaggtggagcgagcgcggcaggtacaggtggccctggagacggcgcagcgcagtgcagaggcggagctgcagagcaaacgcgcctccttcgccgagaagacggcacagctggagcgctccctgcaggaggaacacgtggctgtggcacagctgcgggaggaggctgagcggcgggcacagcagcaggccgaggccgagcgggcgcgcgaggaggcagagcgggagctggagcgctggcagctcaaggccaacgaggcgctacggctgcggctgcaggcggaggaggtggcgcagcagaagagcctggcgcaggccgaggctgagaagcagaaggaggaggcggagcgcgaggcgcggcggcgcggcaaggcggaggagcaggccgtccggcagcgggagctggctgaacaagagctggagaagcagcggcagctggcggaaggcaccgcgcagcagcgcctggccgcggagcaggagttgatccggctgcgggccgagacggagcagggggagcagcagcggcagctgctggaggaggagctggcccggctgcagcgtgaggcggctgcagccacgcagaaacggcaggagctggaagccgagctggccaaggtgcgggccgagatggaggtgctgctggccagcaaggcgagggctgaggaggagtcgcgctccaccagcgagaagtccaagcagaggctggaggccgaggccggccggttccgcgagctggccgaggaggccgcccgcctgcgtgccctggcggaagaggccaagcggcagcggcagctggccgaggaagacgcggcgcggcagcgggccgaggcggagcgggtgcttgcggagaagctggccgccatcggcgaggccacgcggctcaagacggaggcggagatcgcgctcaaggagaaggaggcggagaacgagcgcctgcggcggctggcggaggacgaggccttccagcggcggcggctggaggagcaggccgcgcaacacaaggctgacatcgaggagcgcctggcccagctgcgcaaggcatcggacagcgagctggagcggcagaaggggctggtggaggacacgctgaggcagcggcggcaggtggaggaggagatcctggcgctgaaggcgagcttcgagaaggcggccgctggcaaggcggagctggagctggagctgggacgcatccgcagcaacgcggaggacacgctgcgcagcaaggagcaggccgagctggaggctgcgaggcagcggcagctggcggcggaggaggagcggcggcgccgtgaggctgaggagcgcgtgcagaagagcctggcggccgaggaggaggccgcacggcagcggaaggcggcgctggaggaagtcgagcggctgaaagccaaggtggaggaggcgcggcgcctgcgggagcgagcggagcaggagtcggcgcggcagctgcagctggcccaggaggccgcccagaagcggctgcaggcggaagagaaggcacacgccttcgcggtgcagcagaaggagcaggagctacagcagacgctgcagcaggagcagagcgtgctggaccagctgcgcggcgaggcggaggcggcccggcgggcggctgaggaggcggaggaggcccgggtgcaggcggagcgtgaggcggcgcagtcccggcggcaggtggaagaggccgagcggctgaagcagtcggcagaggagcaggcacaggcccgggctcaggcacaggcggctgcagagaagctgcgcaaggaggccgagcaagaggcggcgcggcgggcacaggcggagcaggcggccctgcggcagaagcaggcagctgacgcggagatggagaagcataagaaattcgccgagcagacgctgcggcagaaggcgcaggtggagcaggagctgacaacactgcggctgcagctggaggagaccgaccaccagaagaacctgctggacgaggagctgcagcggctgaaggcggaggccacggaggccgcacgccagcgcagccaggtggaggaggagctcttctcggtgcgcgtgcagatggaggagctgagcaagctcaaggcacgcatcgaggctgagaaccgcgcactcatcttgcgtgacaaggacaatacgcagcgcttcctgcaggaggaggctgagaagatgaagcaggtggcggaggaggccgcgcggctgagtgtggcggcccaagaggctgcgcgactgcggcagctggcagaggaggacctggcacagcagcgggccttggcagagaagatgctcaaggagaagatgcaggcggtgcaggaggccacgcgactcaaggctgaggcggaactgctgcagcagcagaaggagcttgcgcaggagcaggcgcggcggctgcaggaggacaaggagcagatggcgcagcagctggcggaggagacgcagggcttccagcggacgctggaggccgagcggcagcggcagctggagatgagcgctgaggctgagcgcctcaagctgcgtgtggccgagatgagccgagcccaggcccgcgctgaggaggacgcccagcgcttccggaagcaggcggaggagatcggtgagaagctgcaccgcacggagctcgccacccaggagaaggtgaccctggtgcagacactggagatccagcgacagcagagtgaccatgatgccgagcgcctgcgggaggccatcgctgagctggagcgtgagaaggagaagctccaacaggaggccaaactgctgcagctcaagtctgaggagatgcagacggtgcagcaggagcagctgctgcaggagacgcaggccctgcagcaaagcttcctctctgaaaaggacagcctgctacagcgggagcgcttcatcgagcaggagaaggccaagctggagcagctcttccaggacgaggtggccaaggcacagcagctgcgtgaggagcagcagcggcagcagcagcagatggagcaggaacggcagcggctggtggccagcatggaggaggcgcggcggcggcagcatgaggccgaggagggcgtgcggcgcaagcaggaggagctgcagcagctggagcagcagcggcggcagcaggaggagctgctggctgaggagaaccagaggctgcgtgagcagctgcagctcctggaggagcagcaccgggccgcgctggcgcactcagaggaggtcactgcctcgcaggtggctgccacaaagaccctgcccaatggccgggatgcacttgatggccccgcggcagaggcagagccggagcacagcttcgatggcctgcggcggaaggtgtcagctcagaggctgcaggaggccggcatcctgagtgcggaggagctgcagcggttggcgcagggccacaccacggtggacgagctcgcacggcgggaagacgtgcgccactacctgcagggccgcagcagtatcgcagggctgttgctgaaggccaccaatgagaagctgagtgtttacgccgccctgcagaggcagctgctgagtcccggcacggccctcatcctgctggaggcgcaggcggcctcaggcttcctgctggaccctgtgcggaaccggcggctgaccgtcaacgaggctgtgaaggagggtgtggtgggccccgagctgcaccacaagctgctgtcggccgagcgcgccgtcactggctacaaggacccctacactggccagcagatctctctcttccaagccatgcagaagggcctcatcgtccgggagcacggcatccgcctgctggaggcccagatcgccacgggcggcgttatcgaccccgtgcacagccaccgcgtgcccgtggacgtggcctaccggcgcggctacttcgacgaggagatgaaccgcgtcctggcggaccccagcgacgacaccaagggcttctttgaccccaacacgcacgagaacctcacgtacctgcagctactggagcgctgcgtggaggaccccgagacgggcctgtgccttctgccactcacggataaggctgccaagggcggggagctggtctacactgactccgaggcccgggacgtctttgagaaggccaccgtgtctgcgccgttcggcaagttccagggcaagacggtgaccatttgggagatcatcaactcggaatacttcacggcagagcagcggcgggacctgctgcggcagttccgcacgggccggatcacagtggagaagatcatcaagatcatcatcacggtggtggaggagcaggagcagaagggccggctttgctttgagggcctgcgcagcctggtgccagccgccgagctgctggagagcagggtcatcgaccgcgagctctaccagcagctgcagcgaggtgagcgctctgtgcgagacgtagccgaggtggacactgtgcggcgggctctccggggtgccaacgtcatcgcgggtgtatggctggaggaggcggggcagaagctgagtatctacaatgccctgaagaaagacctgctgccatccgacatggccgtggccctgttggaagcccaggccggcaccgggcacatcatcgaccccgccaccagcgcccggctgaccgtggacgaggcagtgcgtgctggcctggtgggccccgagtttcatgagaagctgctatcagccgagaaggctgtgacagggtacagggacccctacacagggcagagcgtctccctgttccaggccctgaagaagggcctcattccccgggagcagggcctgcgcctgttggacgcccagctgtccacgggcggcatcgtggaccccagcaagagccaccgcgtgcccctggatgtcgcctgcgcccgaggctgcctggatgaggagaccagcagggccctgtcggcaccaagggccgacgccaaggcctacagtgaccccagcacaggggagccggccacctacggcgagctccagcagcggtgccggcccgaccagctgaccgggctgagcctgctgccgctctcagaaaaggctgctcgggcccggcaggaggagctctactcagagctgcaggcccgtgagacctttgaaaagaccccggttgaggtccccgtgggtggcttcaagggcaggacggtgacggtgtgggagctcatcagctctgagtacttcactgcggagcagcggcaggagctgttgcgtcagttccgcacgggcaaggtcaccgtggagaaggtcatcaagattctcattaccatcgtggaggaggtggagaccctgcggcaggagaggctgtccttcagcggcctccgtgcccctgtgccagccagcgagctcctggcttccggggtcctcagcagagcccagtttgagcagctcaaggacggcaagacgacggtcaaggacctttcggagctgggctccgtgcggacgctgctgcagggcagtggctgcctcgccggcatctacctggaggacaccaaggagaaggtgtccatctacgaggccatgcgccggggcctgctgagagccacaacggctgcgctcctgctggaggcgcaggcggccactggcttcctggtggaccccgtgcggaaccagcgcctgtatgtccacgaggccgtgaaggcgggcgtggtgggccccgagcttcacgagcagctgctgtctgccgagaaggccgtcaccggctacagagacccctactcgggcagcaccatctccctcttccaggccatgcagaagggcctggttctccggcagcacggcatccgcctgctggaggcccagatcgccacgggcggcatcatcgaccccgtgcacagccaccgcgtgcctgtggacgtggcctaccagcgcggctacttcagtgaggagatgaaccgcgtcctggcggaccccagcgacgacaccaagggcttctttgaccccaacacgcatgagaacctcacgtacaggcagctgctggagcggtgcgtggaggaccccgagacgggcttgcgccttctgccactgaaaggggcggagaaggctgaggtggtggagaccacgcaggtgtacactgaggaggagacaagaagggcatttgaagagacacagatcgacattcccggcggcggcagccacggcggctccaccatgtccctgtgggaggtgatgcagtcggacctgatccccgaggagcagcgggcccagctgatggctgacttccaggccggccgggtgaccaaggaacgcatgatcatcatcatcatcgagatcattgagaagacagagatcatccgccagcagggtctggcctcctacgactacgtgcgccgccgcctcacggctgaggacctgttcgaggctcggatcatctctctcgagacctacaacctgctccgggagggcaccaggagcctccgtgaggctctcgaggcggagtccgcctggtgctacctctatggcacgggctccgtggctggtgtctacctgcccggttccaggcagacactgagcatctaccaggctctcaagaaagggctgctgagtgccgaggtggcccgcctgctgctggaggcacaggcagccacaggcttcctgctggacccggtgaagggggagcggctgactgtggatgaggctgtgcggaagggcctcgtggggcccgagctgcacgaccgcctgctctcggctgagcgggcggtcaccggctaccgtgacccctacaccgagcagaccatctcgctcttccaggccatgaagaaggagctgatccctactgaggaggccctgcggctgctggatgcccagctggccaccggcggcatcgtggacccccgcctgggcttccaccttcccctggaggtggcttaccagcgtggctacctcaacaaggacacgcacgaccagctgtcagagcccagcgaggtgcgcagctacgtggacccgtccaccgacgagcgcctcagctacacgcagctgctcaggcggtgccgtcgtgacgacggcaccggccagctgctcctgccactgtcggacgcccgcaagctgaccttccgtggcctgcggaagcagatcaccatggaggagctggtgcgctcgcaggtcatggacgaggccacggcgctgcagctgcgggagggcctgacctccatcgaggaggtcaccaagaacttgcagaagttcctggaaggcaccagctgcatcgctggtgtcttcgtggacgccaccaaggaacggctctcggtgtaccaggccatgaagaagggcatcatccgccccggcacagcctttgagctcctggaggcgcaggcggccaccggttacgtcatcgaccccatcaagggactgaagctgacggtggaggaggctgtgcgtatgggcattgtgggccccgagttcaaggacaagctgctgtcggccgagcgcgccgtcactgggtacaaggacccctactctgggaagctcatctccctcttccaggccatgaagaagggcctgatcctgaaggaccatggcatccgcctgctggaggcccagatcgccacgggcggcatcatcgaccctgaggagagccaccggctgcccgtggaggtggcctacaagcgcggcctcttcgatgaggagatgaacgagatcctgaccgacccctcggacgacaccaagggcttctttgaccctaacacggaggagaacctcacctacctgcagctgatggagcgttgtatcactgacccccagacgggcctgtgtctcttgccgctgaaggagaagaagcgggagcggaagacgtcctccaagtcctccgtgcgcaagcgccgagtggtcatcgtggaccccgagacgggcaaggagatgtcagtgtacgaggcctaccgcaagggcctgattgaccaccagacgtacctggagctgtccgagcaggagtgcgagtgggaggagatcaccatctcctcctcggacggcgtggtcaagtccatgatcatcgaccgccgctccgggcgccagtacgacatcgatgatgccatcgccaagaacctcatcgaccgctcggcactggaccagtaccgcgccggcacgctctccatcaccgagttcgccgacatgctctcgggcaacgccggtggtttccgctcccgttcctcctcggtgggatcctcctcctcctaccccatcagccccgccgtctccaggacccagctggcctcctggtcagaccccactgaggagacgggccccgtggctggcatcctggacacggagacgctggagaaggtgtccatcaccgaggccatgcaccggaacctggtggataacatcacggggcagcggctgctggaggcgcaggcctgcaccgggggcatcatcgaccccagcaccggtgagcgcttccctgtcaccgacgccgtcaacaagggcctggtggacaagatcatggtggaccgcatcaacctggcccagaaggccttctgcggcttcgaggacccacgcaccaagaccaagatgtcggccgcccaggccctgaagaagggctggctctactacgaggccggccagcgcttcctggaggtgcagtacctgaccggcggcttgatcgagcccgacacgccgggccgcgtgcccctggacgaggccctgcagcgcggcacggtggacgcccgcaccgcacagaagctgcgtgacgtgggcgcctactccaagtacctcacctgccctaagaccaagctcaagatctcctataaggacgcgctggaccgcagcatggtggaggagggcacggggctgcggctgctggaggctgccgcgcagtccaccaagggctactacagcccctacagcgtcagcggctccggctctaccgctggctcccgcaccggctcgcgcaccggctcccgggccggctcccgccgcggcagctttgacgccaccggctccggcttctccatgaccttctcttcatcctcctactcctcctcgggctacggccgccgctacgcctcggggtcctcggcctccctggggggccctgagtctgccgtggcctgaggctgcctgcgcccaccccgctctgcatgcggcccagcccggctcccaccgaggcgcgggggccgttttcaacgcttaaaggtgtcttcctcccaagtggtgcctaaagtttaaccaaaaagaccagactaatatattaatatatatctgctgtccagacagcctgtatcttgggggacagggctggcccagccctgctggccgcctcaccccctcgggtctcctcactcccttctacctgccactcacacagccaggtgccttggagggtcccaagctgggccccagcccaccctcctgtcttcccagggtagcccgcctgccagtcctagctgcacagggcagctgggcccaaccctgtctgtagagggccctggtgtttctagcactggcctgcacggtgggccttgctggggacggggggccccagtcagcctctctcccagtctacccagagaagccccttccccatgggaagacgaggccctcgggcccagcccccacagtgctgtctgatctgtgctttccagctcaccccccacactcactcctgagacccctggcctccggcgtcagcctccagcctctgttcccctagtaagtgccttccatgtcggcctctaaccccaggccccgaggacccagacccagtggggaggcggacgttccagccggcatggctgggaactgcagacctgtcctcctggtgggtccaggggcccctccagcttgtggagccccacactggggtgccgcctgcccgtctctctcccatggagccccagccccctttgggcccagggacaccagccaggctctgtgctgaccctcctgttgcacccagccctggtctcagcagcgaccacccctgcctccaccctctgagctttgcatgttccactaaccccgggcgggtggcaggtggaggtgtcaggctgctggcgcctctgcaagggcagaacactaacctgaccgtgggcggggccttgcggtatccgcccccaataaaagcaattccaaccttcccgtg

SEQ ID NO: 5533 - protein, 4515 aa, Homo sapiens; identical to SEQ ID NO: 753

SEQ ID NO: 5534 - DNA, 15220 bp, Homo sapiens
cctcagcccccctgcctgccctgccaccctctttcacaccctgtagcgcgggagcttctcgcagcgccccgggccttctcgtggtaccctgcctgctgcctttgcccccgcactgactgcccggctccagcagccatggtggccggcatgctcatgccacgggaccagctgcgggccatctatgaggtgctcttccgcgagggcgtgatggtggccaagaaggaccggcggccccgcagcttgcacccccatgtgcccggcgtcaccaacctgcaggtcatgcgtgccatggcgtccctgcgggcacggggcctggtccgcgagacctttgcctggtgccacttttactggtacctcaccaatgaaggcatcgcccacctccgccagtacctgcacctgccgccagagatcgtgcccgcctctctgcagcgcgtgcgccgccccgtcgccatggtgatgcccgcacgccgcaccccccacgtgcaggctgtgcagggtcccctgggctccccacccaagcgggggccgctgccgacggaggagcagcgggtctaccgtcggaaggagcttgaggaggtgtcacctgagacccctgtggtgcctgctaccacccagcggaccctggccaggccaggcccggagcctgccccagccacagatgagcgggatcgtgtgcagaagaaaaccttcaccaagtgggtcaacaagcacctcatcaaggcccagaggcacatcagtgacctgtatgaagacctccgcgatggccacaacctcatctccctgctggaggtcctctcgggggacagcctgccccgggagaaggggaggatgcgtttccacaagctgcagaatgtccagattgccctggactacctccggcaccgccaggtgaagctggtgaacatcaggaatgatgacatcgctgacggcaaccccaagctgacccttggcctcatctggacaatcattctgcacttccagatctcagatatccaggtgagtgggcagtcggaggacatgacggccaaggagaagctgctgctgtggtcgcagcgaatggtggaggggtaccagggcctgcgatgcgacaacttcacctccagctggagagacggccgcctcttcaatgccatcatccaccggcacaagcccctgctcatcgacatgaacaaggtgtaccggcagaccaacctggagaacctggaccaggccttctctgtggcggagcgggacctgggagtgacgcggctcctggaccctgaggacgtggatgtccctcagcccgacgagaagtccatcatcacctacgtctcgtcgctgtatgacgccatgccccgcgtgccggacgtgcaggatggggtgagggccaacgagctgcagctgcgctggcaggagtaccgggagctggtgctgctgctgcttcagtggatgcgacaccacacggccgcctttgaggaacgcaggttcccctccagcttcgaggagattgagatcctgtggtctcagttcctgaagtttaaggagatggagctaccagccaaggaggccgacaagaacaggtccaagggcatctaccaatccctggagggagcggtgcaagcaggccagctcaaggtgccccctggctaccacccgctggatgtggagaaggagtggggcaagctgcacgtggccatcctggagcgggagaagcagctccgcagcgagtttgagaggctggagtgtcttcagcgcatcgtgaccaagctgcagatggaggcggggctgtgtgaggagcagctgaaccaggccgacgccctgctgcagtcggatgtccggctgctggctgcaggcaaagtgccacagcgggcgggggaggtggaacgggacttggacaaggcggatagcatgatccggctgctcttcaacgacgtgcagaccctcaaggatggacggcacccgcagggcgagcagatgtaccgcagggtgtaccgtctgcacgagcgcctggtagccatccgcaccgagtacaacctacggctgaaggcaggcgtggcggcccctgcaacccaggtggcccaggtgactctgcagagtgtgcagaggcgccccgagctggaggactccactctgcgctacctgcaggacctgctggcctgggtggaggagaaccagcaccgtgtggatggcgctgagtggggtgtggacctgcccagcgtggaggcgcagctgggcagccaccgaggcctgcaccagtccatcgaagaattccgggccaagatcgagcgggcacggagtgacgagggccagctctcccccgccacccggggtgcctaccgtgactgcctgggtcggctggacctgcagtacgccaagctgctgaactcctccaaggcccgcctcaggtccctggagagcttgcacagctttgtggcagccgccactaaggagctaatgtggctgaatgagaaggaggaggaggaggtgggcttcgactggagcgaccgcaacaccaacatgaccgccaagaaggagagctactcggcgctgatgcgggagctggagctgaaggagaagaagatcaaggagctccaaaatgctggggaccggctgctgcgggaggaccacccggcccggcccacggtggagtccttccaggcggccctgcagacgcagtggagctggatgctacagctgtgctgctgtatcgaggcacacctgaaggagaacgctgcctactttcagttcttctcagatgtgcgggaggccgaggggcagttgcagaagctgcaggaggcactgcgtaggaaatacagttgtgatcgctccgccaccgtcacccggctggaggacctgctgcaggatgcccaggacgagaaggaacagctgaacgagtacaagggccacctctcaggcctggccaagcgggccaaggccgtcgtgcagctgaagccccgccacccagcccaccccatgcggggccgcctgcccctgctggccgtgtgcgactataagcaggtggaggtgactgtgcacaagggtgacgagtgccagctggtgggccctgcacagccgtcccactggaaggtgctcagcagctccggcagcgaggccgccgtgccctccgtgtgcttcctggtgcccccgcccaaccaggaggcccaggaggccgtcaccaggctggaggcccagcaccaggccctggtcacgctgtggcaccagttgcacgtggacatgaagagccttctggcctggcagagccttcgccgcgacgtgcagctcatccgctcctggtccctggccacgttccgcaccctgaagccagaggagcagcgccaagccctgcacagcctggagctgcactaccaggccttcctgcgggacagccaggacgcgggcggcttcggacccgaggaccggctgatggctgagcgcgagtacggctcctgcagccaccactaccagcagctgctgcagagcctggaacagggtgcacaggaagagtctcgctgccagcgctgcatctccgagctcaaagacatccggctgcagctggaggcctgtgagacgcgcaccgtgcaccgcctgcggctgccgctggacaaagagccggcacgggagtgtgcccagcgcatcgccgagcagcagaaggcacaggcagaggtggaggggctgggcaagggggtcgcccggctctctgccgaggccgagaaggtcttggccctaccagagccatcgcctgcggcccccacgctgcgctcggagctggagctgacgctgggcaagctggagcaggtccgcagcctgtctgccatctacctggagaagctcaagaccatcagcctggtgatccgcggcacgcagggggccgaggaggtgctcagggcccacgaggagcagctcaaggaggcccaggccgtgccggccaccctcccggagctcgaggccaccaaggcctctctgaagaagctgcgggcccaggccgaggcacagcagcccacgttcgacgccctgcgggatgagctgcggggggcacaggaggtgggggagcgactgcagcagcggcacggggagcgggacgtggaggtggagcgctggcgggagcgggtcgcccagttgcttgagcgctggcaggctgtgctggcccagaccgacgtgcggcagcgcgagctcgagcaactgggccgccagctgcgttactaccgcgagagtgcagaccccttgggcgcctggctgcaggacgccaggcggcggcaggagcagatccaggccatgccgctggccgacagccaggctgtgcgggagcagctgcggcaggagcaggccctgctggaggagatcgagcgccacggcgagaaggtcgaggagtgccagaggtttgcgaaacagtacatcaacgccatcaaggactatgaactccagctggtgacgtacaaggcgcagcttgagccggtggcctccccggccaagaagcccaaggtccagtcgggatcagagagtgtcatccaggagtacgtggacctgcgtacgcactacagcgagctgaccacactgacgagccagtacatcaagttcatcagcgagactctgcggcgcatggaggaggaggagaggctggctgagcagcagcgggcagaggagcgcgagcggctggccgaggtggaggccgcgctggagaagcagcggcagctggccgaggcgcacgcccaggcaaaggcacaggcggagcgggaggcgaaggagctgcagcagcgcatgcaggaggaggtggtgcggcgggaggaggcggcggtggacgcgcagcagcagaagcgcagcattcaggaggagctgcagcagctgcggcagagctcggaggcggagatccaggccaaggcccggcaggcagaggcggctgagcgcagccggctgcgcatcgaggaggagatccgcgtggtgcgcctgcagttggaggccaccgagcgccagcgtggcggggctgagggggagctgcaggcactgcgtgcacgggcggaggaggctgaggcacaaaagcgacaggcgcaggaggaggccgagcgcttgcggaggcaggtgcaggacgagagccagcgtaagcggcaggcggaggtggagctggcctcgcgcgtgaaggccgaggccgaggcggcgcgcgagaagcagcgggccctgcaggccctggaggagctgcggctgcaggcggaggaggcggagcggcgcctgcggcaggccgaggtggagcgagcgcggcaggtacaggtggccctggagacggcgcagcgcagtgcagaggcggagctgcagagcaaacgcgcctccttcgccgagaagacggcacagctggagcgctccctgcaggaggaacacgtggctgtggcacagctgcgggaggaggctgagcggcgggcacagcagcaggccgaggccgagcgggcgcgcgaggaggcagagcgggagctggagcgctggcagctcaaggccaacgaggcgctacggctgcggctgcaggcggaggaggtggcgcagcagaagagcctggcgcaggccgaggctgagaagcagaaggaggaggcggagcgcgaggcgcggcggcgcggcaaggcggaggagcaggccgtccggcagcgggagctggctgaacaagagctggagaagcagcggcagctggcggaaggcaccgcgcagcagcgcctggccgcggagcaggagttgatccggctgcgggccgagacggagcagggggagcagcagcggcagctgctggaggaggagctggcccggctgcagcgtgaggcggctgcagccacgcagaaacggcaggagctggaagccgagctggccaaggtgcgggccgagatggaggtgctgctggccagcaaggcgagggctgaggaggagtcgcgctccaccagcgagaagtccaagcagaggctggaggccgaggccggccggttccgcgagctggccgaggaggccgcccgcctgcgtgccctggcggaagaggccaagcggcagcggcagctggccgaggaagacgcggcgcggcagcgggccgaggcggagcgggtgcttgcggagaagctggccgccatcggcgaggccacgcggctcaagacggaggcggagatcgcgctcaaggagaaggaggcggagaacgagcgcctgcggcggctggcggaggacgaggccttccagcggcggcggctggaggagcaggccgcgcaacacaaggctgacatcgaggagcgcctggcccagctgcgcaaggcatcggacagcgagctggagcggcagaaggggctggtggaggacacgctgaggcagcggcggcaggtggaggaggagatcctggcgctgaaggcgagcttcgagaaggcggccgctggcaaggcggagctggagctggagctgggacgcatccgcagcaacgcggaggacacgctgcgcagcaaggagcaggccgagctggaggctgcgaggcagcggcagctggcggcggaggaggagcggcggcgccgtgaggctgaggagcgcgtgcagaagagcctggcggccgaggaggaggccgcacggcagcggaaggcggcgctggaggaagtcgagcggctgaaagccaaggtggaggaggcgcggcgcctgcgggagcgagcggagcaggagtcggcgcggcagctgcagctggcccaggaggccgcccagaagcggctgcaggcggaagagaaggcacacgccttcgcggtgcagcagaaggagcaggagctacagcagacgctgcagcaggagcagagcgtgctggaccagctgcgcggcgaggcggaggcggcccggcgggcggctgaggaggcggaggaggcccgggtgcaggcggagcgtgaggcggcgcagtcccggcggcaggtggaagaggccgagcggctgaagcagtcggcagaggagcaggcacaggcccgggctcaggcacaggcggctgcagagaagctgcgcaaggaggccgagcaagaggcggcgcggcgggcacaggcggagcaggcggccctgcggcagaagcaggcagctgacgcggagatggagaagcataagaaattcgccgagcagacgctgcggcagaaggcgcaggtggagcaggagctgacaacactgcggctgcagctggaggagaccgaccaccagaagaacctgctggacgaggagctgcagcggctgaaggcggaggccacggaggccgcacgccagcgcagccaggtggaggaggagctcttctcggtgcgcgtgcagatggaggagctgagcaagctcaaggcacgcatcgaggctgagaaccgcgcactcatcttgcgtgacaaggacaatacgcagcgcttcctgcaggaggaggctgagaagatgaagcaggtggcggaggaggccgcgcggctgagtgtggcggcccaagaggctgcgcgactgcggcagctggcagaggaggacctggcacagcagcgggccttggcagagaagatgctcaaggagaagatgcaggcggtgcaggaggccacgcgactcaaggctgaggcggaactgctgcagcagcagaaggagcttgcgcaggagcaggcgcggcggctgcaggaggacaaggagcagatggcgcagcagctggcggaggagacgcagggcttccagcggacgctggaggccgagcggcagcggcagctggagatgagcgctgaggctgagcgcctcaagctgcgtgtggccgagatgagccgagcccaggcccgcgctgaggaggacgcccagcgcttccggaagcaggcggaggagatcggtgagaagctgcaccgcacggagctcgccacccaggagaaggtgaccctggtgcagacactggagatccagcgacagcagagtgaccatgatgccgagcgcctgcgggaggccatcgctgagctggagcgtgagaaggagaagctccaacaggaggccaaactgctgcagctcaagtctgaggagatgcagacggtgcagcaggagcagctgctgcaggagacgcaggccctgcagcaaagcttcctctctgaaaaggacagcctgctacagcgggagcgcttcatcgagcaggagaaggccaagctggagcagctcttccaggacgaggtggccaaggcacagcagctgcgtgaggagcagcagcggcagcagcagcagatggagcaggaacggcagcggctggtggccagcatggaggaggcgcggcggcggcagcatgaggccgaggagggcgtgcggcgcaagcaggaggagctgcagcagctggagcagcagcggcggcagcaggaggagctgctggctgaggagaaccagaggctgcgtgagcagctgcagctcctggaggagcagcaccgggccgcgctggcgcactcagaggaggtcactgcctcgcaggtggctgccacaaagaccctgcccaatggccgggatgcacttgatggccccgcggcagaggcagagccggagcacagcttcgatggcctgcggcggaaggtgtcagctcagaggctgcaggaggccggcatcctgagtgcggaggagctgcagcggttggcgcagggccacaccacggtggacgagctcgcacggcgggaagacgtgcgccactacctgcagggccgcagcagtatcgcagggctgttgctgaaggccaccaatgagaagctgagtgtttacgccgccctgcagaggcagctgctgagtcccggcacggccctcatcctgctggaggcgcaggcggcctcaggcttcctgctggaccctgtgcggaaccggcggctgaccgtcaacgaggctgtgaaggagggtgtggtgggccccgagctgcaccacaagctgctgtcggccgagcgcgccgtcactggctacaaggacccctacactggccagcagatctctctcttccaagccatgcagaagggcctcatcgtccgggagcacggcatccgcctgctggaggcccagatcgccacgggcggcgttatcgaccccgtgcacagccaccgcgtgcccgtggacgtggcctaccggcgcggctacttcgacgaggagatgaaccgcgtcctggcggaccccagcgacgacaccaagggcttctttgaccccaacacgcacgagaacctcacgtacctgcagctactggagcgctgcgtggaggaccccgagacgggcctgtgccttctgccactcacggataaggctgccaagggcggggagctggtctacactgactccgaggcccgggacgtctttgagaaggccaccgtgtctgcgccgttcggcaagttccagggcaagacggtgaccatttgggagatcatcaactcggaatacttcacggcagagcagcggcgggacctgctgcggcagttccgcacgggccggatcacagtggagaagatcatcaagatcatcatcacggtggtggaggagcaggagcagaagggccggctttgctttgagggcctgcgcagcctggtgccagccgccgagctgctggagagcagggtcatcgaccgcgagctctaccagcagctgcagcgaggtgagcgctctgtgcgagacgtagccgaggtggacactgtgcggcgggctctccggggtgccaacgtcatcgcgggtgtatggctggaggaggcggggcagaagctgagtatctacaatgccctgaagaaagacctgctgccatccgacatggccgtggccctgttggaagcccaggccggcaccgggcacatcatcgaccccgccaccagcgcccggctgaccgtggacgaggcagtgcgtgctggcctggtgggccccgagtttcatgagaagctgctatcagccgagaaggctgtgacagggtacagggacccctacacagggcagagcgtctccctgttccaggccctgaagaagggcctcattccccgggagcagggcctgcgcctgttggacgcccagctgtccacgggcggcatcgtggaccccagcaagagccaccgcgtgcccctggatgtcgcctgcgcccgaggctgcctggatgaggagaccagcagggccctgtcggcaccaagggccgacgccaaggcctacagtgaccccagcacaggggagccggccacctacggcgagctccagcagcggtgccggcccgaccagctgaccgggctgagcctgctgccgctctcagaaaaggctgctcgggcccggcaggaggagctctactcagagctgcaggcccgtgagacctttgaaaagaccccggttgaggtccccgtgggtggcttcaagggcaggacggtgacggtgtgggagctcatcagctctgagtacttcactgcggagcagcggcaggagctgttgcgtcagttccgcacgggcaaggtcaccgtggagaaggtcatcaagattctcattaccatcgtggaggaggtggagaccctgcggcaggagaggctgtccttcagcggcctccgtgcccctgtgccagccagcgagctcctggcttccggggtcctcagcagagcccagtttgagcagctcaaggacggcaagacgacggtcaaggacctttcggagctgggctccgtgcggacgctgctgcagggcagtggctgcctcgccggcatctacctggaggacaccaaggagaaggtgtccatctacgaggccatgcgccggggcctgctgagagccacaacggctgcgctcctgctggaggcgcaggcggccactggcttcctggtggaccccgtgcggaaccagcgcctgtatgtccacgaggccgtgaaggcgggcgtggtgggccccgagcttcacgagcagctgctgtctgccgagaaggccgtcaccggctacagagacccctactcgggcagcaccatctccctcttccaggccatgcagaagggcctggttctccggcagcacggcatccgcctgctggaggcccagatcgccacgggcggcatcatcgaccccgtgcacagccaccgcgtgcctgtggacgtggcctaccagcgcggctacttcagtgaggagatgaaccgcgtcctggcggaccccagcgacgacaccaagggcttctttgaccccaacacgcatgagaacctcacgtacaggcagctgctggagcggtgcgtggaggaccccgagacgggcttgcgccttctgccactgaaaggggcggagaaggctgaggtggtggagaccacgcaggtgtacactgaggaggagacaagaagggcatttgaagagacacagatcgacattcccggcggcggcagccacggcggctccaccatgtccctgtgggaggtgatgcagtcggacctgatccccgaggagcagcgggcccagctgatggctgacttccaggccggccgggtgaccaaggaacgcatgatcatcatcatcatcgagatcattgagaagacagagatcatccgccagcagggtctggcctcctacgactacgtgcgccgccgcctcacggctgaggacctgttcgaggctcggatcatctctctcgagacctacaacctgctccgggagggcaccaggagcctccgtgaggctctcgaggcggagtccgcctggtgctacctctatggcacgggctccgtggctggtgtctacctgcccggttccaggcagacactgagcatctaccaggctctcaagaaagggctgctgagtgccgaggtggcccgcctgctgctggaggcacaggcagccacaggcttcctgctggacccggtgaagggggagcggctgactgtggatgaggctgtgcggaagggcctcgtggggcccgagctgcacgaccgcctgctctcggctgagcgggcggtcaccggctaccgtgacccctacaccgagcagaccatctcgctcttccaggccatgaagaaggagctgatccctactgaggaggccctgcggctgctggatgcccagctggccaccggcggcatcgtggacccccgcctgggcttccaccttcccctggaggtggcttaccagcgtggctacctcaacaaggacacgcacgaccagctgtcagagcccagcgaggtgcgcagctacgtggacccgtccaccgacgagcgcctcagctacacgcagctgctcaggcggtgccgtcgtgacgacggcaccggccagctgctcctgccactgtcggacgcccgcaagctgaccttccgtggcctgcggaagcagatcaccatggaggagctggtgcgctcgcaggtcatggacgaggccacggcgctgcagctgcgggagggcctgacctccatcgaggaggtcaccaagaacttgcagaagttcctggaaggcaccagctgcatcgctggtgtcttcgtggacgccaccaaggaacggctctcggtgtaccaggccatgaagaagggcatcatccgccccggcacagcctttgagctcctggaggcgcaggcggccaccggttacgtcatcgaccccatcaagggactgaagctgacggtggaggaggctgtgcgtatgggcattgtgggccccgagttcaaggacaagctgctgtcggccgagcgcgccgtcactgggtacaaggacccctactctgggaagctcatctccctcttccaggccatgaagaagggcctgatcctgaaggaccatggcatccgcctgctggaggcccagatcgccacgggcggcatcatcgaccctgaggagagccaccggctgcccgtggaggtggcctacaagcgcggcctcttcgatgaggagatgaacgagatcctgaccgacccctcggacgacaccaagggcttctttgaccctaacacggaggagaacctcacctacctgcagctgatggagcgttgtatcactgacccccagacgggcctgtgtctcttgccgctgaaggagaagaagcgggagcggaagacgtcctccaagtcctccgtgcgcaagcgccgagtggtcatcgtggaccccgagacgggcaaggagatgtcagtgtacgaggcctaccgcaagggcctgattgaccaccagacgtacctggagctgtccgagcaggagtgcgagtgggaggagatcaccatctcctcctcggacggcgtggtcaagtccatgatcatcgaccgccgctccgggcgccagtacgacatcgatgatgccatcgccaagaacctcatcgaccgctcggcactggaccagtaccgcgccggcacgctctccatcaccgagttcgccgacatgctctcgggcaacgccggtggtttccgctcccgttcctcctcggtgggatcctcctcctcctaccccatcagccccgccgtctccaggacccagctggcctcctggtcagaccccactgaggagacgggccccgtggctggcatcctggacacggagacgctggagaaggtgtccatcaccgaggccatgcaccggaacctggtggataacatcacggggcagcggctgctggaggcgcaggcctgcaccgggggcatcatcgaccccagcaccggtgagcgcttccctgtcaccgacgccgtcaacaagggcctggtggacaagatcatggtggaccgcatcaacctggcccagaaggccttctgcggcttcgaggacccacgcaccaagaccaagatgtcggccgcccaggccctgaagaagggctggctctactacgaggccggccagcgcttcctggaggtgcagtacctgaccggcggcttgatcgagcccgacacgccgggccgcgtgcccctggacgaggccctgcagcgcggcacggtggacgcccgcaccgcacagaagctgcgtgacgtgggcgcctactccaagtacctcacctgccctaagaccaagctcaagatctcctataaggacgcgctggaccgcagcatggtggaggagggcacggggctgcggctgctggaggctgccgcgcagtccaccaagggctactacagcccctacagcgtcagcggctccggctctaccgctggctcccgcaccggctcgcgcaccggctcccgggccggctcccgccgcggcagctttgacgccaccggctccggcttctccatgaccttctcttcatcctcctactcctcctcgggctacggccgccgctacgcctcggggtcctcggcctccctggggggccctgagtctgccgtggcctgaggctgcctgcgcccaccccgctctgcatgcggcccagcccggctcccaccgaggcgcgggggccgttttcaacgcttaaaggtgtcttcctcccaagtggtgcctaaagtttaaccaaaaagaccagactaatatattaatatatatctgctgtccagacagcctgtatcttgggggacagggctggcccagccctgctggccgcctcaccccctcgggtctcctcactcccttctacctgccactcacacagccaggtgccttggagggtcccaagctgggccccagcccaccctcctgtcttcccagggtagcccgcctgccagtcctagctgcacagggcagctgggcccaaccctgtctgtagagggccctggtgtttctagcactggcctgcacggtgggccttgctggggacggggggccccagtcagcctctctcccagtctacccagagaagccccttccccatgggaagacgaggccctcgggcccagcccccacagtgctgtctgatctgtgctttccagctcaccccccacactcactcctgagacccctggcctccggcgtcagcctccagcctctgttcccctagtaagtgccttccatgtcggcctctaaccccaggccccgaggacccagacccagtggggaggcggacgttccagccggcatggctgggaactgcagacctgtcctcctggtgggtccaggggcccctccagcttgtggagccccacactggggtgccgcctgcccgtctctctcccatggagccccagccccctttgggcccagggacaccagccaggctctgtgctgaccctcctgttgcacccagccctggtctcagcagcgaccacccctgcctccaccctctgagctttgcatgttccactaaccccgggcgggtggcaggtggaggtgtcaggctgctggcgcctctgcaagggcagaacactaacctgaccgtgggcggggccttgcggtatccgcccccaataaaagcaattccaaccttcccgtg

SEQ ID NO: 5535 - protein, 4684 aa, Homo sapiens; identical to SEQ ID NO: 751

SEQ ID NO: 5536 - DNA, 14757 bp, Homo sapiens
attgatcagctgaagccccgcccctggccggcaagccctgccccggacctccgggctcctcccccggctgcggcgctggcctgggcagtgcggtgcggggctggactctgcctggtggtggcacagccgccctcagccccggcgcagacatggacccctcgcgagccatccagaacgagatcagctccctcaaagatgagcgggatcgtgtgcagaagaaaaccttcaccaagtgggtcaacaagcacctcatcaaggcccagaggcacatcagtgacctgtatgaagacctccgcgatggccacaacctcatctccctgctggaggtcctctcgggggacagcctgccccgggagaaggggaggatgcgtttccacaagctgcagaatgtccagattgccctggactacctccggcaccgccaggtgaagctggtgaacatcaggaatgatgacatcgctgacggcaaccccaagctgacccttggcctcatctggacaatcattctgcacttccagatctcagatatccaggtgagtgggcagtcggaggacatgacggccaaggagaagctgctgctgtggtcgcagcgaatggtggaggggtaccagggcctgcgatgcgacaacttcacctccagctggagagacggccgcctcttcaatgccatcatccaccggcacaagcccctgctcatcgacatgaacaaggtgtaccggcagaccaacctggagaacctggaccaggccttctctgtggcggagcgggacctgggagtgacgcggctcctggaccctgaggacgtggatgtccctcagcccgacgagaagtccatcatcacctacgtctcgtcgctgtatgacgccatgccccgcgtgccggacgtgcaggatggggtgagggccaacgagctgcagctgcgctggcaggagtaccgggagctggtgctgctgctgcttcagtggatgcgacaccacacggccgcctttgaggaacgcaggttcccctccagcttcgaggagattgagatcctgtggtctcagttcctgaagtttaaggagatggagctaccagccaaggaggccgacaagaacaggtccaagggcatctaccaatccctggagggagcggtgcaagcaggccagctcaaggtgccccctggctaccacccgctggatgtggagaaggagtggggcaagctgcacgtggccatcctggagcgggagaagcagctccgcagcgagtttgagaggctggagtgtcttcagcgcatcgtgaccaagctgcagatggaggcggggctgtgtgaggagcagctgaaccaggccgacgccctgctgcagtcggatgtccggctgctggctgcaggcaaagtgccacagcgggcgggggaggtggaacgggacttggacaaggcggatagcatgatccggctgctcttcaacgacgtgcagaccctcaaggatggacggcacccgcagggcgagcagatgtaccgcagggtgtaccgtctgcacgagcgcctggtagccatccgcaccgagtacaacctacggctgaaggcaggcgtggcggcccctgcaacccaggtggcccaggtgactctgcagagtgtgcagaggcgccccgagctggaggactccactctgcgctacctgcaggacctgctggcctgggtggaggagaaccagcaccgtgtggatggcgctgagtggggtgtggacctgcccagcgtggaggcgcagctgggcagccaccgaggcctgcaccagtccatcgaagaattccgggccaagatcgagcgggcacggagtgacgagggccagctctcccccgccacccggggtgcctaccgtgactgcctgggtcggctggacctgcagtacgccaagctgctgaactcctccaaggcccgcctcaggtccctggagagcttgcacagctttgtggcagccgccactaaggagctaatgtggctgaatgagaaggaggaggaggaggtgggcttcgactggagcgaccgcaacaccaacatgaccgccaagaaggagagctactcggcgctgatgcgggagctggagctgaaggagaagaagatcaaggagctccaaaatgctggggaccggctgctgcgggaggaccacccggcccggcccacggtggagtccttccaggcggccctgcagacgcagtggagctggatgctacagctgtgctgctgtatcgaggcacacctgaaggagaacgctgcctactttcagttcttctcagatgtgcgggaggccgaggggcagttgcagaagctgcaggaggcactgcgtaggaaatacagttgtgatcgctccgccaccgtcacccggctggaggacctgctgcaggatgcccaggacgagaaggaacagctgaacgagtacaagggccacctctcaggcctggccaagcgggccaaggccgtcgtgcagctgaagccccgccacccagcccaccccatgcggggccgcctgcccctgctggccgtgtgcgactataagcaggtggaggtgactgtgcacaagggtgacgagtgccagctggtgggccctgcacagccgtcccactggaaggtgctcagcagctccggcagcgaggccgccgtgccctccgtgtgcttcctggtgcccccgcccaaccaggaggcccaggaggccgtcaccaggctggaggcccagcaccaggccctggtcacgctgtggcaccagttgcacgtggacatgaagagccttctggcctggcagagccttcgccgcgacgtgcagctcatccgctcctggtccctggccacgttccgcaccctgaagccagaggagcagcgccaagccctgcacagcctggagctgcactaccaggccttcctgcgggacagccaggacgcgggcggcttcggacccgaggaccggctgatggctgagcgcgagtacggctcctgcagccaccactaccagcagctgctgcagagcctggaacagggtgcacaggaagagtctcgctgccagcgctgcatctccgagctcaaagacatccggctgcagctggaggcctgtgagacgcgcaccgtgcaccgcctgcggctgccgctggacaaagagccggcacgggagtgtgcccagcgcatcgccgagcagcagaaggcacaggcagaggtggaggggctgggcaagggggtcgcccggctctctgccgaggccgagaaggtcttggccctaccagagccatcgcctgcggcccccacgctgcgctcggagctggagctgacgctgggcaagctggagcaggtccgcagcctgtctgccatctacctggagaagctcaagaccatcagcctggtgatccgcggcacgcagggggccgaggaggtgctcagggcccacgaggagcagctcaaggaggcccaggccgtgccggccaccctcccggagctcgaggccaccaaggcctctctgaagaagctgcgggcccaggccgaggcacagcagcccacgttcgacgccctgcgggatgagctgcggggggcacaggaggtgggggagcgactgcagcagcggcacggggagcgggacgtggaggtggagcgctggcgggagcgggtcgcccagttgcttgagcgctggcaggctgtgctggcccagaccgacgtgcggcagcgcgagctcgagcaactgggccgccagctgcgttactaccgcgagagtgcagaccccttgggcgcctggctgcaggacgccaggcggcggcaggagcagatccaggccatgccgctggccgacagccaggctgtgcgggagcagctgcggcaggagcaggccctgctggaggagatcgagcgccacggcgagaaggtcgaggagtgccagaggtttgcgaaacagtacatcaacgccatcaaggactatgaactccagctggtgacgtacaaggcgcagcttgagccggtggcctccccggccaagaagcccaaggtccagtcgggatcagagagtgtcatccaggagtacgtggacctgcgtacgcactacagcgagctgaccacactgacgagccagtacatcaagttcatcagcgagactctgcggcgcatggaggaggaggagaggctggctgagcagcagcgggcagaggagcgcgagcggctggccgaggtggaggccgcgctggagaagcagcggcagctggccgaggcgcacgcccaggcaaaggcacaggcggagcgggaggcgaaggagctgcagcagcgcatgcaggaggaggtggtgcggcgggaggaggcggcggtggacgcgcagcagcagaagcgcagcattcaggaggagctgcagcagctgcggcagagctcggaggcggagatccaggccaaggcccggcaggcagaggcggctgagcgcagccggctgcgcatcgaggaggagatccgcgtggtgcgcctgcagttggaggccaccgagcgccagcgtggcggggctgagggggagctgcaggcactgcgtgcacgggcggaggaggctgaggcacaaaagcgacaggcgcaggaggaggccgagcgcttgcggaggcaggtgcaggacgagagccagcgtaagcggcaggcggaggtggagctggcctcgcgcgtgaaggccgaggccgaggcggcgcgcgagaagcagcgggccctgcaggccctggaggagctgcggctgcaggcggaggaggcggagcggcgcctgcggcaggccgaggtggagcgagcgcggcaggtacaggtggccctggagacggcgcagcgcagtgcagaggcggagctgcagagcaaacgcgcctccttcgccgagaagacggcacagctggagcgctccctgcaggaggaacacgtggctgtggcacagctgcgggaggaggctgagcggcgggcacagcagcaggccgaggccgagcgggcgcgcgaggaggcagagcgggagctggagcgctggcagctcaaggccaacgaggcgctacggctgcggctgcaggcggaggaggtggcgcagcagaagagcctggcgcaggccgaggctgagaagcagaaggaggaggcggagcgcgaggcgcggcggcgcggcaaggcggaggagcaggccgtccggcagcgggagctggctgaacaagagctggagaagcagcggcagctggcggaaggcaccgcgcagcagcgcctggccgcggagcaggagttgatccggctgcgggccgagacggagcagggggagcagcagcggcagctgctggaggaggagctggcccggctgcagcgtgaggcggctgcagccacgcagaaacggcaggagctggaagccgagctggccaaggtgcgggccgagatggaggtgctgctggccagcaaggcgagggctgaggaggagtcgcgctccaccagcgagaagtccaagcagaggctggaggccgaggccggccggttccgcgagctggccgaggaggccgcccgcctgcgtgccctggcggaagaggccaagcggcagcggcagctggccgaggaagacgcggcgcggcagcgggccgaggcggagcgggtgcttgcggagaagctggccgccatcggcgaggccacgcggctcaagacggaggcggagatcgcgctcaaggagaaggaggcggagaacgagcgcctgcggcggctggcggaggacgaggccttccagcggcggcggctggaggagcaggccgcgcaacacaaggctgacatcgaggagcgcctggcccagctgcgcaaggcatcggacagcgagctggagcggcagaaggggctggtggaggacacgctgaggcagcggcggcaggtggaggaggagatcctggcgctgaaggcgagcttcgagaaggcggccgctggcaaggcggagctggagctggagctgggacgcatccgcagcaacgcggaggacacgctgcgcagcaaggagcaggccgagctggaggctgcgaggcagcggcagctggcggcggaggaggagcggcggcgccgtgaggctgaggagcgcgtgcagaagagcctggcggccgaggaggaggccgcacggcagcggaaggcggcgctggaggaagtcgagcggctgaaagccaaggtggaggaggcgcggcgcctgcgggagcgagcggagcaggagtcggcgcggcagctgcagctggcccaggaggccgcccagaagcggctgcaggcggaagagaaggcacacgccttcgcggtgcagcagaaggagcaggagctacagcagacgctgcagcaggagcagagcgtgctggaccagctgcgcggcgaggcggaggcggcccggcgggcggctgaggaggcggaggaggcccgggtgcaggcggagcgtgaggcggcgcagtcccggcggcaggtggaagaggccgagcggctgaagcagtcggcagaggagcaggcacaggcccgggctcaggcacaggcggctgcagagaagctgcgcaaggaggccgagcaagaggcggcgcggcgggcacaggcggagcaggcggccctgcggcagaagcaggcagctgacgcggagatggagaagcataagaaattcgccgagcagacgctgcggcagaaggcgcaggtggagcaggagctgacaacactgcggctgcagctggaggagaccgaccaccagaagaacctgctggacgaggagctgcagcggctgaaggcggaggccacggaggccgcacgccagcgcagccaggtggaggaggagctcttctcggtgcgcgtgcagatggaggagctgagcaagctcaaggcacgcatcgaggctgagaaccgcgcactcatcttgcgtgacaaggacaatacgcagcgcttcctgcaggaggaggctgagaagatgaagcaggtggcggaggaggccgcgcggctgagtgtggcggcccaagaggctgcgcgactgcggcagctggcagaggaggacctggcacagcagcgggccttggcagagaagatgctcaaggagaagatgcaggcggtgcaggaggccacgcgactcaaggctgaggcggaactgctgcagcagcagaaggagcttgcgcaggagcaggcgcggcggctgcaggaggacaaggagcagatggcgcagcagctggcggaggagacgcagggcttccagcggacgctggaggccgagcggcagcggcagctggagatgagcgctgaggctgagcgcctcaagctgcgtgtggccgagatgagccgagcccaggcccgcgctgaggaggacgcccagcgcttccggaagcaggcggaggagatcggtgagaagctgcaccgcacggagctcgccacccaggagaaggtgaccctggtgcagacactggagatccagcgacagcagagtgaccatgatgccgagcgcctgcgggaggccatcgctgagctggagcgtgagaaggagaagctccaacaggaggccaaactgctgcagctcaagtctgaggagatgcagacggtgcagcaggagcagctgctgcaggagacgcaggccctgcagcaaagcttcctctctgaaaaggacagcctgctacagcgggagcgcttcatcgagcaggagaaggccaagctggagcagctcttccaggacgaggtggccaaggcacagcagctgcgtgaggagcagcagcggcagcagcagcagatggagcaggaacggcagcggctggtggccagcatggaggaggcgcggcggcggcagcatgaggccgaggagggcgtgcggcgcaagcaggaggagctgcagcagctggagcagcagcggcggcagcaggaggagctgctggctgaggagaaccagaggctgcgtgagcagctgcagctcctggaggagcagcaccgggccgcgctggcgcactcagaggaggtcactgcctcgcaggtggctgccacaaagaccctgcccaatggccgggatgcacttgatggccccgcggcagaggcagagccggagcacagcttcgatggcctgcggcggaaggtgtcagctcagaggctgcaggaggccggcatcctgagtgcggaggagctgcagcggttggcgcagggccacaccacggtggacgagctcgcacggcgggaagacgtgcgccactacctgcagggccgcagcagtatcgcagggctgttgctgaaggccaccaatgagaagctgagtgtttacgccgccctgcagaggcagctgctgagtcccggcacggccctcatcctgctggaggcgcaggcggcctcaggcttcctgctggaccctgtgcggaaccggcggctgaccgtcaacgaggctgtgaaggagggtgtggtgggccccgagctgcaccacaagctgctgtcggccgagcgcgccgtcactggctacaaggacccctacactggccagcagatctctctcttccaagccatgcagaagggcctcatcgtccgggagcacggcatccgcctgctggaggcccagatcgccacgggcggcgttatcgaccccgtgcacagccaccgcgtgcccgtggacgtggcctaccggcgcggctacttcgacgaggagatgaaccgcgtcctggcggaccccagcgacgacaccaagggcttctttgaccccaacacgcacgagaacctcacgtacctgcagctactggagcgctgcgtggaggaccccgagacgggcctgtgccttctgccactcacggataaggctgccaagggcggggagctggtctacactgactccgaggcccgggacgtctttgagaaggccaccgtgtctgcgccgttcggcaagttccagggcaagacggtgaccatttgggagatcatcaactcggaatacttcacggcagagcagcggcgggacctgctgcggcagttccgcacgggccggatcacagtggagaagatcatcaagatcatcatcacggtggtggaggagcaggagcagaagggccggctttgctttgagggcctgcgcagcctggtgccagccgccgagctgctggagagcagggtcatcgaccgcgagctctaccagcagctgcagcgaggtgagcgctctgtgcgagacgtagccgaggtggacactgtgcggcgggctctccggggtgccaacgtcatcgcgggtgtatggctggaggaggcggggcagaagctgagtatctacaatgccctgaagaaagacctgctgccatccgacatggccgtggccctgttggaagcccaggccggcaccgggcacatcatcgaccccgccaccagcgcccggctgaccgtggacgaggcagtgcgtgctggcctggtgggccccgagtttcatgagaagctgctatcagccgagaaggctgtgacagggtacagggacccctacacagggcagagcgtctccctgttccaggccctgaagaagggcctcattccccgggagcagggcctgcgcctgttggacgcccagctgtccacgggcggcatcgtggaccccagcaagagccaccgcgtgcccctggatgtcgcctgcgcccgaggctgcctggatgaggagaccagcagggccctgtcggcaccaagggccgacgccaaggcctacagtgaccccagcacaggggagccggccacctacggcgagctccagcagcggtgccggcccgaccagctgaccgggctgagcctgctgccgctctcagaaaaggctgctcgggcccggcaggaggagctctactcagagctgcaggcccgtgagacctttgaaaagaccccggttgaggtccccgtgggtggcttcaagggcaggacggtgacggtgtgggagctcatcagctctgagtacttcactgcggagcagcggcaggagctgttgcgtcagttccgcacgggcaaggtcaccgtggagaaggtcatcaagattctcattaccatcgtggaggaggtggagaccctgcggcaggagaggctgtccttcagcggcctccgtgcccctgtgccagccagcgagctcctggcttccggggtcctcagcagagcccagtttgagcagctcaaggacggcaagacgacggtcaaggacctttcggagctgggctccgtgcggacgctgctgcagggcagtggctgcctcgccggcatctacctggaggacaccaaggagaaggtgtccatctacgaggccatgcgccggggcctgctgagagccacaacggctgcgctcctgctggaggcgcaggcggccactggcttcctggtggaccccgtgcggaaccagcgcctgtatgtccacgaggccgtgaaggcgggcgtggtgggccccgagcttcacgagcagctgctgtctgccgagaaggccgtcaccggctacagagacccctactcgggcagcaccatctccctcttccaggccatgcagaagggcctggttctccggcagcacggcatccgcctgctggaggcccagatcgccacgggcggcatcatcgaccccgtgcacagccaccgcgtgcctgtggacgtggcctaccagcgcggctacttcagtgaggagatgaaccgcgtcctggcggaccccagcgacgacaccaagggcttctttgaccccaacacgcatgagaacctcacgtacaggcagctgctggagcggtgcgtggaggaccccgagacgggcttgcgccttctgccactgaaaggggcggagaaggctgaggtggtggagaccacgcaggtgtacactgaggaggagacaagaagggcatttgaagagacacagatcgacattcccggcggcggcagccacggcggctccaccatgtccctgtgggaggtgatgcagtcggacctgatccccgaggagcagcgggcccagctgatggctgacttccaggccggccgggtgaccaaggaacgcatgatcatcatcatcatcgagatcattgagaagacagagatcatccgccagcagggtctggcctcctacgactacgtgcgccgccgcctcacggctgaggacctgttcgaggctcggatcatctctctcgagacctacaacctgctccgggagggcaccaggagcctccgtgaggctctcgaggcggagtccgcctggtgctacctctatggcacgggctccgtggctggtgtctacctgcccggttccaggcagacactgagcatctaccaggctctcaagaaagggctgctgagtgccgaggtggcccgcctgctgctggaggcacaggcagccacaggcttcctgctggacccggtgaagggggagcggctgactgtggatgaggctgtgcggaagggcctcgtggggcccgagctgcacgaccgcctgctctcggctgagcgggcggtcaccggctaccgtgacccctacaccgagcagaccatctcgctcttccaggccatgaagaaggagctgatccctactgaggaggccctgcggctgctggatgcccagctggccaccggcggcatcgtggacccccgcctgggcttccaccttcccctggaggtggcttaccagcgtggctacctcaacaaggacacgcacgaccagctgtcagagcccagcgaggtgcgcagctacgtggacccgtccaccgacgagcgcctcagctacacgcagctgctcaggcggtgccgtcgtgacgacggcaccggccagctgctcctgccactgtcggacgcccgcaagctgaccttccgtggcctgcggaagcagatcaccatggaggagctggtgcgctcgcaggtcatggacgaggccacggcgctgcagctgcgggagggcctgacctccatcgaggaggtcaccaagaacttgcagaagttcctggaaggcaccagctgcatcgctggtgtcttcgtggacgccaccaaggaacggctctcggtgtaccaggccatgaagaagggcatcatccgccccggcacagcctttgagctcctggaggcgcaggcggccaccggttacgtcatcgaccccatcaagggactgaagctgacggtggaggaggctgtgcgtatgggcattgtgggccccgagttcaaggacaagctgctgtcggccgagcgcgccgtcactgggtacaaggacccctactctgggaagctcatctccctcttccaggccatgaagaagggcctgatcctgaaggaccatggcatccgcctgctggaggcccagatcgccacgggcggcatcatcgaccctgaggagagccaccggctgcccgtggaggtggcctacaagcgcggcctcttcgatgaggagatgaacgagatcctgaccgacccctcggacgacaccaagggcttctttgaccctaacacggaggagaacctcacctacctgcagctgatggagcgttgtatcactgacccccagacgggcctgtgtctcttgccgctgaaggagaagaagcgggagcggaagacgtcctccaagtcctccgtgcgcaagcgccgagtggtcatcgtggaccccgagacgggcaaggagatgtcagtgtacgaggcctaccgcaagggcctgattgaccaccagacgtacctggagctgtccgagcaggagtgcgagtgggaggagatcaccatctcctcctcggacggcgtggtcaagtccatgatcatcgaccgccgctccgggcgccagtacgacatcgatgatgccatcgccaagaacctcatcgaccgctcggcactggaccagtaccgcgccggcacgctctccatcaccgagttcgccgacatgctctcgggcaacgccggtggtttccgctcccgttcctcctcggtgggatcctcctcctcctaccccatcagccccgccgtctccaggacccagctggcctcctggtcagaccccactgaggagacgggccccgtggctggcatcctggacacggagacgctggagaaggtgtccatcaccgaggccatgcaccggaacctggtggataacatcacggggcagcggctgctggaggcgcaggcctgcaccgggggcatcatcgaccccagcaccggtgagcgcttccctgtcaccgacgccgtcaacaagggcctggtggacaagatcatggtggaccgcatcaacctggcccagaaggccttctgcggcttcgaggacccacgcaccaagaccaagatgtcggccgcccaggccctgaagaagggctggctctactacgaggccggccagcgcttcctggaggtgcagtacctgaccggcggcttgatcgagcccgacacgccgggccgcgtgcccctggacgaggccctgcagcgcggcacggtggacgcccgcaccgcacagaagctgcgtgacgtgggcgcctactccaagtacctcacctgccctaagaccaagctcaagatctcctataaggacgcgctggaccgcagcatggtggaggagggcacggggctgcggctgctggaggctgccgcgcagtccaccaagggctactacagcccctacagcgtcagcggctccggctctaccgctggctcccgcaccggctcgcgcaccggctcccgggccggctcccgccgcggcagctttgacgccaccggctccggcttctccatgaccttctcttcatcctcctactcctcctcgggctacggccgccgctacgcctcggggtcctcggcctccctggggggccctgagtctgccgtggcctgaggctgcctgcgcccaccccgctctgcatgcggcccagcccggctcccaccgaggcgcgggggccgttttcaacgcttaaaggtgtcttcctcccaagtggtgcctaaagtttaaccaaaaagaccagactaatatattaatatatatctgctgtccagacagcctgtatcttgggggacagggctggcccagccctgctggccgcctcaccccctcgggtctcctcactcccttctacctgccactcacacagccaggtgccttggagggtcccaagctgggccccagcccaccctcctgtcttcccagggtagcccgcctgccagtcctagctgcacagggcagctgggcccaaccctgtctgtagagggccctggtgtttctagcactggcctgcacggtgggccttgctggggacggggggccccagtcagcctctctcccagtctacccagagaagccccttccccatgggaagacgaggccctcgggcccagcccccacagtgctgtctgatctgtgctttccagctcaccccccacactcactcctgagacccctggcctccggcgtcagcctccagcctctgttcccctagtaagtgccttccatgtcggcctctaaccccaggccccgaggacccagacccagtggggaggcggacgttccagccggcatggctgggaactgcagacctgtcctcctggtgggtccaggggcccctccagcttgtggagccccacactggggtgccgcctgcccgtctctctcccatggagccccagccccctttgggcccagggacaccagccaggctctgtgctgaccctcctgttgcacccagccctggtctcagcagcgaccacccctgcctccaccctctgagctttgcatgttccactaaccccgggcgggtggcaggtggaggtgtcaggctgctggcgcctctgcaagggcagaacactaacctgaccgtgggcggggccttgcggtatccgcccccaataaaagcaattccaaccttcccgtg

SEQ ID NO: 5537 - protein, 4525 aa, Homo sapiens; identical to SEQ ID NO: 749

SEQ ID NO: 5538 - DNA, 14689 bp, Homo sapiens
agagtggccgccgggtgctggaggctccgctgcaccccgcgccccgcgcccgccggcatggccggcccgctgcccgacgagcaggacttcatccaggcctacgaggaggtgcgcgagaagtacaaagatgagcgggatcgtgtgcagaagaaaaccttcaccaagtgggtcaacaagcacctcatcaaggcccagaggcacatcagtgacctgtatgaagacctccgcgatggccacaacctcatctccctgctggaggtcctctcgggggacagcctgccccgggagaaggggaggatgcgtttccacaagctgcagaatgtccagattgccctggactacctccggcaccgccaggtgaagctggtgaacatcaggaatgatgacatcgctgacggcaaccccaagctgacccttggcctcatctggacaatcattctgcacttccagatctcagatatccaggtgagtgggcagtcggaggacatgacggccaaggagaagctgctgctgtggtcgcagcgaatggtggaggggtaccagggcctgcgatgcgacaacttcacctccagctggagagacggccgcctcttcaatgccatcatccaccggcacaagcccctgctcatcgacatgaacaaggtgtaccggcagaccaacctggagaacctggaccaggccttctctgtggcggagcgggacctgggagtgacgcggctcctggaccctgaggacgtggatgtccctcagcccgacgagaagtccatcatcacctacgtctcgtcgctgtatgacgccatgccccgcgtgccggacgtgcaggatggggtgagggccaacgagctgcagctgcgctggcaggagtaccgggagctggtgctgctgctgcttcagtggatgcgacaccacacggccgcctttgaggaacgcaggttcccctccagcttcgaggagattgagatcctgtggtctcagttcctgaagtttaaggagatggagctaccagccaaggaggccgacaagaacaggtccaagggcatctaccaatccctggagggagcggtgcaagcaggccagctcaaggtgccccctggctaccacccgctggatgtggagaaggagtggggcaagctgcacgtggccatcctggagcgggagaagcagctccgcagcgagtttgagaggctggagtgtcttcagcgcatcgtgaccaagctgcagatggaggcggggctgtgtgaggagcagctgaaccaggccgacgccctgctgcagtcggatgtccggctgctggctgcaggcaaagtgccacagcgggcgggggaggtggaacgggacttggacaaggcggatagcatgatccggctgctcttcaacgacgtgcagaccctcaaggatggacggcacccgcagggcgagcagatgtaccgcagggtgtaccgtctgcacgagcgcctggtagccatccgcaccgagtacaacctacggctgaaggcaggcgtggcggcccctgcaacccaggtggcccaggtgactctgcagagtgtgcagaggcgccccgagctggaggactccactctgcgctacctgcaggacctgctggcctgggtggaggagaaccagcaccgtgtggatggcgctgagtggggtgtggacctgcccagcgtggaggcgcagctgggcagccaccgaggcctgcaccagtccatcgaagaattccgggccaagatcgagcgggcacggagtgacgagggccagctctcccccgccacccggggtgcctaccgtgactgcctgggtcggctggacctgcagtacgccaagctgctgaactcctccaaggcccgcctcaggtccctggagagcttgcacagctttgtggcagccgccactaaggagctaatgtggctgaatgagaaggaggaggaggaggtgggcttcgactggagcgaccgcaacaccaacatgaccgccaagaaggagagctactcggcgctgatgcgggagctggagctgaaggagaagaagatcaaggagctccaaaatgctggggaccggctgctgcgggaggaccacccggcccggcccacggtggagtccttccaggcggccctgcagacgcagtggagctggatgctacagctgtgctgctgtatcgaggcacacctgaaggagaacgctgcctactttcagttcttctcagatgtgcgggaggccgaggggcagttgcagaagctgcaggaggcactgcgtaggaaatacagttgtgatcgctccgccaccgtcacccggctggaggacctgctgcaggatgcccaggacgagaaggaacagctgaacgagtacaagggccacctctcaggcctggccaagcgggccaaggccgtcgtgcagctgaagccccgccacccagcccaccccatgcggggccgcctgcccctgctggccgtgtgcgactataagcaggtggaggtgactgtgcacaagggtgacgagtgccagctggtgggccctgcacagccgtcccactggaaggtgctcagcagctccggcagcgaggccgccgtgccctccgtgtgcttcctggtgcccccgcccaaccaggaggcccaggaggccgtcaccaggctggaggcccagcaccaggccctggtcacgctgtggcaccagttgcacgtggacatgaagagccttctggcctggcagagccttcgccgcgacgtgcagctcatccgctcctggtccctggccacgttccgcaccctgaagccagaggagcagcgccaagccctgcacagcctggagctgcactaccaggccttcctgcgggacagccaggacgcgggcggcttcggacccgaggaccggctgatggctgagcgcgagtacggctcctgcagccaccactaccagcagctgctgcagagcctggaacagggtgcacaggaagagtctcgctgccagcgctgcatctccgagctcaaagacatccggctgcagctggaggcctgtgagacgcgcaccgtgcaccgcctgcggctgccgctggacaaagagccggcacgggagtgtgcccagcgcatcgccgagcagcagaaggcacaggcagaggtggaggggctgggcaagggggtcgcccggctctctgccgaggccgagaaggtcttggccctaccagagccatcgcctgcggcccccacgctgcgctcggagctggagctgacgctgggcaagctggagcaggtccgcagcctgtctgccatctacctggagaagctcaagaccatcagcctggtgatccgcggcacgcagggggccgaggaggtgctcagggcccacgaggagcagctcaaggaggcccaggccgtgccggccaccctcccggagctcgaggccaccaaggcctctctgaagaagctgcgggcccaggccgaggcacagcagcccacgttcgacgccctgcgggatgagctgcggggggcacaggaggtgggggagcgactgcagcagcggcacggggagcgggacgtggaggtggagcgctggcgggagcgggtcgcccagttgcttgagcgctggcaggctgtgctggcccagaccgacgtgcggcagcgcgagctcgagcaactgggccgccagctgcgttactaccgcgagagtgcagaccccttgggcgcctggctgcaggacgccaggcggcggcaggagcagatccaggccatgccgctggccgacagccaggctgtgcgggagcagctgcggcaggagcaggccctgctggaggagatcgagcgccacggcgagaaggtcgaggagtgccagaggtttgcgaaacagtacatcaacgccatcaaggactatgaactccagctggtgacgtacaaggcgcagcttgagccggtggcctccccggccaagaagcccaaggtccagtcgggatcagagagtgtcatccaggagtacgtggacctgcgtacgcactacagcgagctgaccacactgacgagccagtacatcaagttcatcagcgagactctgcggcgcatggaggaggaggagaggctggctgagcagcagcgggcagaggagcgcgagcggctggccgaggtggaggccgcgctggagaagcagcggcagctggccgaggcgcacgcccaggcaaaggcacaggcggagcgggaggcgaaggagctgcagcagcgcatgcaggaggaggtggtgcggcgggaggaggcggcggtggacgcgcagcagcagaagcgcagcattcaggaggagctgcagcagctgcggcagagctcggaggcggagatccaggccaaggcccggcaggcagaggcggctgagcgcagccggctgcgcatcgaggaggagatccgcgtggtgcgcctgcagttggaggccaccgagcgccagcgtggcggggctgagggggagctgcaggcactgcgtgcacgggcggaggaggctgaggcacaaaagcgacaggcgcaggaggaggccgagcgcttgcggaggcaggtgcaggacgagagccagcgtaagcggcaggcggaggtggagctggcctcgcgcgtgaaggccgaggccgaggcggcgcgcgagaagcagcgggccctgcaggccctggaggagctgcggctgcaggcggaggaggcggagcggcgcctgcggcaggccgaggtggagcgagcgcggcaggtacaggtggccctggagacggcgcagcgcagtgcagaggcggagctgcagagcaaacgcgcctccttcgccgagaagacggcacagctggagcgctccctgcaggaggaacacgtggctgtggcacagctgcgggaggaggctgagcggcgggcacagcagcaggccgaggccgagcgggcgcgcgaggaggcagagcgggagctggagcgctggcagctcaaggccaacgaggcgctacggctgcggctgcaggcggaggaggtggcgcagcagaagagcctggcgcaggccgaggctgagaagcagaaggaggaggcggagcgcgaggcgcggcggcgcggcaaggcggaggagcaggccgtccggcagcgggagctggctgaacaagagctggagaagcagcggcagctggcggaaggcaccgcgcagcagcgcctggccgcggagcaggagttgatccggctgcgggccgagacggagcagggggagcagcagcggcagctgctggaggaggagctggcccggctgcagcgtgaggcggctgcagccacgcagaaacggcaggagctggaagccgagctggccaaggtgcgggccgagatggaggtgctgctggccagcaaggcgagggctgaggaggagtcgcgctccaccagcgagaagtccaagcagaggctggaggccgaggccggccggttccgcgagctggccgaggaggccgcccgcctgcgtgccctggcggaagaggccaagcggcagcggcagctggccgaggaagacgcggcgcggcagcgggccgaggcggagcgggtgcttgcggagaagctggccgccatcggcgaggccacgcggctcaagacggaggcggagatcgcgctcaaggagaaggaggcggagaacgagcgcctgcggcggctggcggaggacgaggccttccagcggcggcggctggaggagcaggccgcgcaacacaaggctgacatcgaggagcgcctggcccagctgcgcaaggcatcggacagcgagctggagcggcagaaggggctggtggaggacacgctgaggcagcggcggcaggtggaggaggagatcctggcgctgaaggcgagcttcgagaaggcggccgctggcaaggcggagctggagctggagctgggacgcatccgcagcaacgcggaggacacgctgcgcagcaaggagcaggccgagctggaggctgcgaggcagcggcagctggcggcggaggaggagcggcggcgccgtgaggctgaggagcgcgtgcagaagagcctggcggccgaggaggaggccgcacggcagcggaaggcggcgctggaggaagtcgagcggctgaaagccaaggtggaggaggcgcggcgcctgcgggagcgagcggagcaggagtcggcgcggcagctgcagctggcccaggaggccgcccagaagcggctgcaggcggaagagaaggcacacgccttcgcggtgcagcagaaggagcaggagctacagcagacgctgcagcaggagcagagcgtgctggaccagctgcgcggcgaggcggaggcggcccggcgggcggctgaggaggcggaggaggcccgggtgcaggcggagcgtgaggcggcgcagtcccggcggcaggtggaagaggccgagcggctgaagcagtcggcagaggagcaggcacaggcccgggctcaggcacaggcggctgcagagaagctgcgcaaggaggccgagcaagaggcggcgcggcgggcacaggcggagcaggcggccctgcggcagaagcaggcagctgacgcggagatggagaagcataagaaattcgccgagcagacgctgcggcagaaggcgcaggtggagcaggagctgacaacactgcggctgcagctggaggagaccgaccaccagaagaacctgctggacgaggagctgcagcggctgaaggcggaggccacggaggccgcacgccagcgcagccaggtggaggaggagctcttctcggtgcgcgtgcagatggaggagctgagcaagctcaaggcacgcatcgaggctgagaaccgcgcactcatcttgcgtgacaaggacaatacgcagcgcttcctgcaggaggaggctgagaagatgaagcaggtggcggaggaggccgcgcggctgagtgtggcggcccaagaggctgcgcgactgcggcagctggcagaggaggacctggcacagcagcgggccttggcagagaagatgctcaaggagaagatgcaggcggtgcaggaggccacgcgactcaaggctgaggcggaactgctgcagcagcagaaggagcttgcgcaggagcaggcgcggcggctgcaggaggacaaggagcagatggcgcagcagctggcggaggagacgcagggcttccagcggacgctggaggccgagcggcagcggcagctggagatgagcgctgaggctgagcgcctcaagctgcgtgtggccgagatgagccgagcccaggcccgcgctgaggaggacgcccagcgcttccggaagcaggcggaggagatcggtgagaagctgcaccgcacggagctcgccacccaggagaaggtgaccctggtgcagacactggagatccagcgacagcagagtgaccatgatgccgagcgcctgcgggaggccatcgctgagctggagcgtgagaaggagaagctccaacaggaggccaaactgctgcagctcaagtctgaggagatgcagacggtgcagcaggagcagctgctgcaggagacgcaggccctgcagcaaagcttcctctctgaaaaggacagcctgctacagcgggagcgcttcatcgagcaggagaaggccaagctggagcagctcttccaggacgaggtggccaaggcacagcagctgcgtgaggagcagcagcggcagcagcagcagatggagcaggaacggcagcggctggtggccagcatggaggaggcgcggcggcggcagcatgaggccgaggagggcgtgcggcgcaagcaggaggagctgcagcagctggagcagcagcggcggcagcaggaggagctgctggctgaggagaaccagaggctgcgtgagcagctgcagctcctggaggagcagcaccgggccgcgctggcgcactcagaggaggtcactgcctcgcaggtggctgccacaaagaccctgcccaatggccgggatgcacttgatggccccgcggcagaggcagagccggagcacagcttcgatggcctgcggcggaaggtgtcagctcagaggctgcaggaggccggcatcctgagtgcggaggagctgcagcggttggcgcagggccacaccacggtggacgagctcgcacggcgggaagacgtgcgccactacctgcagggccgcagcagtatcgcagggctgttgctgaaggccaccaatgagaagctgagtgtttacgccgccctgcagaggcagctgctgagtcccggcacggccctcatcctgctggaggcgcaggcggcctcaggcttcctgctggaccctgtgcggaaccggcggctgaccgtcaacgaggctgtgaaggagggtgtggtgggccccgagctgcaccacaagctgctgtcggccgagcgcgccgtcactggctacaaggacccctacactggccagcagatctctctcttccaagccatgcagaagggcctcatcgtccgggagcacggcatccgcctgctggaggcccagatcgccacgggcggcgttatcgaccccgtgcacagccaccgcgtgcccgtggacgtggcctaccggcgcggctacttcgacgaggagatgaaccgcgtcctggcggaccccagcgacgacaccaagggcttctttgaccccaacacgcacgagaacctcacgtacctgcagctactggagcgctgcgtggaggaccccgagacgggcctgtgccttctgccactcacggataaggctgccaagggcggggagctggtctacactgactccgaggcccgggacgtctttgagaaggccaccgtgtctgcgccgttcggcaagttccagggcaagacggtgaccatttgggagatcatcaactcggaatacttcacggcagagcagcggcgggacctgctgcggcagttccgcacgggccggatcacagtggagaagatcatcaagatcatcatcacggtggtggaggagcaggagcagaagggccggctttgctttgagggcctgcgcagcctggtgccagccgccgagctgctggagagcagggtcatcgaccgcgagctctaccagcagctgcagcgaggtgagcgctctgtgcgagacgtagccgaggtggacactgtgcggcgggctctccggggtgccaacgtcatcgcgggtgtatggctggaggaggcggggcagaagctgagtatctacaatgccctgaagaaagacctgctgccatccgacatggccgtggccctgttggaagcccaggccggcaccgggcacatcatcgaccccgccaccagcgcccggctgaccgtggacgaggcagtgcgtgctggcctggtgggccccgagtttcatgagaagctgctatcagccgagaaggctgtgacagggtacagggacccctacacagggcagagcgtctccctgttccaggccctgaagaagggcctcattccccgggagcagggcctgcgcctgttggacgcccagctgtccacgggcggcatcgtggaccccagcaagagccaccgcgtgcccctggatgtcgcctgcgcccgaggctgcctggatgaggagaccagcagggccctgtcggcaccaagggccgacgccaaggcctacagtgaccccagcacaggggagccggccacctacggcgagctccagcagcggtgccggcccgaccagctgaccgggctgagcctgctgccgctctcagaaaaggctgctcgggcccggcaggaggagctctactcagagctgcaggcccgtgagacctttgaaaagaccccggttgaggtccccgtgggtggcttcaagggcaggacggtgacggtgtgggagctcatcagctctgagtacttcactgcggagcagcggcaggagctgttgcgtcagttccgcacgggcaaggtcaccgtggagaaggtcatcaagattctcattaccatcgtggaggaggtggagaccctgcggcaggagaggctgtccttcagcggcctccgtgcccctgtgccagccagcgagctcctggcttccggggtcctcagcagagcccagtttgagcagctcaaggacggcaagacgacggtcaaggacctttcggagctgggctccgtgcggacgctgctgcagggcagtggctgcctcgccggcatctacctggaggacaccaaggagaaggtgtccatctacgaggccatgcgccggggcctgctgagagccacaacggctgcgctcctgctggaggcgcaggcggccactggcttcctggtggaccccgtgcggaaccagcgcctgtatgtccacgaggccgtgaaggcgggcgtggtgggccccgagcttcacgagcagctgctgtctgccgagaaggccgtcaccggctacagagacccctactcgggcagcaccatctccctcttccaggccatgcagaagggcctggttctccggcagcacggcatccgcctgctggaggcccagatcgccacgggcggcatcatcgaccccgtgcacagccaccgcgtgcctgtggacgtggcctaccagcgcggctacttcagtgaggagatgaaccgcgtcctggcggaccccagcgacgacaccaagggcttctttgaccccaacacgcatgagaacctcacgtacaggcagctgctggagcggtgcgtggaggaccccgagacgggcttgcgccttctgccactgaaaggggcggagaaggctgaggtggtggagaccacgcaggtgtacactgaggaggagacaagaagggcatttgaagagacacagatcgacattcccggcggcggcagccacggcggctccaccatgtccctgtgggaggtgatgcagtcggacctgatccccgaggagcagcgggcccagctgatggctgacttccaggccggccgggtgaccaaggaacgcatgatcatcatcatcatcgagatcattgagaagacagagatcatccgccagcagggtctggcctcctacgactacgtgcgccgccgcctcacggctgaggacctgttcgaggctcggatcatctctctcgagacctacaacctgctccgggagggcaccaggagcctccgtgaggctctcgaggcggagtccgcctggtgctacctctatggcacgggctccgtggctggtgtctacctgcccggttccaggcagacactgagcatctaccaggctctcaagaaagggctgctgagtgccgaggtggcccgcctgctgctggaggcacaggcagccacaggcttcctgctggacccggtgaagggggagcggctgactgtggatgaggctgtgcggaagggcctcgtggggcccgagctgcacgaccgcctgctctcggctgagcgggcggtcaccggctaccgtgacccctacaccgagcagaccatctcgctcttccaggccatgaagaaggagctgatccctactgaggaggccctgcggctgctggatgcccagctggccaccggcggcatcgtggacccccgcctgggcttccaccttcccctggaggtggcttaccagcgtggctacctcaacaaggacacgcacgaccagctgtcagagcccagcgaggtgcgcagctacgtggacccgtccaccgacgagcgcctcagctacacgcagctgctcaggcggtgccgtcgtgacgacggcaccggccagctgctcctgccactgtcggacgcccgcaagctgaccttccgtggcctgcggaagcagatcaccatggaggagctggtgcgctcgcaggtcatggacgaggccacggcgctgcagctgcgggagggcctgacctccatcgaggaggtcaccaagaacttgcagaagttcctggaaggcaccagctgcatcgctggtgtcttcgtggacgccaccaaggaacggctctcggtgtaccaggccatgaagaagggcatcatccgccccggcacagcctttgagctcctggaggcgcaggcggccaccggttacgtcatcgaccccatcaagggactgaagctgacggtggaggaggctgtgcgtatgggcattgtgggccccgagttcaaggacaagctgctgtcggccgagcgcgccgtcactgggtacaaggacccctactctgggaagctcatctccctcttccaggccatgaagaagggcctgatcctgaaggaccatggcatccgcctgctggaggcccagatcgccacgggcggcatcatcgaccctgaggagagccaccggctgcccgtggaggtggcctacaagcgcggcctcttcgatgaggagatgaacgagatcctgaccgacccctcggacgacaccaagggcttctttgaccctaacacggaggagaacctcacctacctgcagctgatggagcgttgtatcactgacccccagacgggcctgtgtctcttgccgctgaaggagaagaagcgggagcggaagacgtcctccaagtcctccgtgcgcaagcgccgagtggtcatcgtggaccccgagacgggcaaggagatgtcagtgtacgaggcctaccgcaagggcctgattgaccaccagacgtacctggagctgtccgagcaggagtgcgagtgggaggagatcaccatctcctcctcggacggcgtggtcaagtccatgatcatcgaccgccgctccgggcgccagtacgacatcgatgatgccatcgccaagaacctcatcgaccgctcggcactggaccagtaccgcgccggcacgctctccatcaccgagttcgccgacatgctctcgggcaacgccggtggtttccgctcccgttcctcctcggtgggatcctcctcctcctaccccatcagccccgccgtctccaggacccagctggcctcctggtcagaccccactgaggagacgggccccgtggctggcatcctggacacggagacgctggagaaggtgtccatcaccgaggccatgcaccggaacctggtggataacatcacggggcagcggctgctggaggcgcaggcctgcaccgggggcatcatcgaccccagcaccggtgagcgcttccctgtcaccgacgccgtcaacaagggcctggtggacaagatcatggtggaccgcatcaacctggcccagaaggccttctgcggcttcgaggacccacgcaccaagaccaagatgtcggccgcccaggccctgaagaagggctggctctactacgaggccggccagcgcttcctggaggtgcagtacctgaccggcggcttgatcgagcccgacacgccgggccgcgtgcccctggacgaggccctgcagcgcggcacggtggacgcccgcaccgcacagaagctgcgtgacgtgggcgcctactccaagtacctcacctgccctaagaccaagctcaagatctcctataaggacgcgctggaccgcagcatggtggaggagggcacggggctgcggctgctggaggctgccgcgcagtccaccaagggctactacagcccctacagcgtcagcggctccggctctaccgctggctcccgcaccggctcgcgcaccggctcccgggccggctcccgccgcggcagctttgacgccaccggctccggcttctccatgaccttctcttcatcctcctactcctcctcgggctacggccgccgctacgcctcggggtcctcggcctccctggggggccctgagtctgccgtggcctgaggctgcctgcgcccaccccgctctgcatgcggcccagcccggctcccaccgaggcgcgggggccgttttcaacgcttaaaggtgtcttcctcccaagtggtgcctaaagtttaaccaaaaagaccagactaatatattaatatatatctgctgtccagacagcctgtatcttgggggacagggctggcccagccctgctggccgcctcaccccctcgggtctcctcactcccttctacctgccactcacacagccaggtgccttggagggtcccaagctgggccccagcccaccctcctgtcttcccagggtagcccgcctgccagtcctagctgcacagggcagctgggcccaaccctgtctgtagagggccctggtgtttctagcactggcctgcacggtgggccttgctggggacggggggccccagtcagcctctctcccagtctacccagagaagccccttccccatgggaagacgaggccctcgggcccagcccccacagtgctgtctgatctgtgctttccagctcaccccccacactcactcctgagacccctggcctccggcgtcagcctccagcctctgttcccctagtaagtgccttccatgtcggcctctaaccccaggccccgaggacccagacccagtggggaggcggacgttccagccggcatggctgggaactgcagacctgtcctcctggtgggtccaggggcccctccagcttgtggagccccacactggggtgccgcctgcccgtctctctcccatggagccccagccccctttgggcccagggacaccagccaggctctgtgctgaccctcctgttgcacccagccctggtctcagcagcgaccacccctgcctccaccctctgagctttgcatgttccactaaccccgggcgggtggcaggtggaggtgtcaggctgctggcgcctctgcaagggcagaacactaacctgaccgtgggcggggccttgcggtatccgcccccaataaaagcaattccaaccttcccgtg

SEQ ID NO: 5539 - protein, 4533 aa, Homo sapiens; identical to SEQ ID NO: 747

SEQ ID NO: 5540 - DNA, 14805 bp, Homo sapiens
agtctggctgcggcggcagagctgaagtgagcggagccaccaggcatgccatgtcgggtgaggacgctgaggtccgggcagtctctgaagatgtctccaatggaagcagtggctcgcccagccctggggacacactgccctggaaccttgggaaaacgcagcggagccggcgcagcgggggtggcgctgggagcaacgggagtgtcctggacccagctgagcgggcggtcattcgcatcgcagatgagcgggatcgtgtgcagaagaaaaccttcaccaagtgggtcaacaagcacctcatcaaggcccagaggcacatcagtgacctgtatgaagacctccgcgatggccacaacctcatctccctgctggaggtcctctcgggggacagcctgccccgggagaaggggaggatgcgtttccacaagctgcagaatgtccagattgccctggactacctccggcaccgccaggtgaagctggtgaacatcaggaatgatgacatcgctgacggcaaccccaagctgacccttggcctcatctggacaatcattctgcacttccagatctcagatatccaggtgagtgggcagtcggaggacatgacggccaaggagaagctgctgctgtggtcgcagcgaatggtggaggggtaccagggcctgcgatgcgacaacttcacctccagctggagagacggccgcctcttcaatgccatcatccaccggcacaagcccctgctcatcgacatgaacaaggtgtaccggcagaccaacctggagaacctggaccaggccttctctgtggcggagcgggacctgggagtgacgcggctcctggaccctgaggacgtggatgtccctcagcccgacgagaagtccatcatcacctacgtctcgtcgctgtatgacgccatgccccgcgtgccggacgtgcaggatggggtgagggccaacgagctgcagctgcgctggcaggagtaccgggagctggtgctgctgctgcttcagtggatgcgacaccacacggccgcctttgaggaacgcaggttcccctccagcttcgaggagattgagatcctgtggtctcagttcctgaagtttaaggagatggagctaccagccaaggaggccgacaagaacaggtccaagggcatctaccaatccctggagggagcggtgcaagcaggccagctcaaggtgccccctggctaccacccgctggatgtggagaaggagtggggcaagctgcacgtggccatcctggagcgggagaagcagctccgcagcgagtttgagaggctggagtgtcttcagcgcatcgtgaccaagctgcagatggaggcggggctgtgtgaggagcagctgaaccaggccgacgccctgctgcagtcggatgtccggctgctggctgcaggcaaagtgccacagcgggcgggggaggtggaacgggacttggacaaggcggatagcatgatccggctgctcttcaacgacgtgcagaccctcaaggatggacggcacccgcagggcgagcagatgtaccgcagggtgtaccgtctgcacgagcgcctggtagccatccgcaccgagtacaacctacggctgaaggcaggcgtggcggcccctgcaacccaggtggcccaggtgactctgcagagtgtgcagaggcgccccgagctggaggactccactctgcgctacctgcaggacctgctggcctgggtggaggagaaccagcaccgtgtggatggcgctgagtggggtgtggacctgcccagcgtggaggcgcagctgggcagccaccgaggcctgcaccagtccatcgaagaattccgggccaagatcgagcgggcacggagtgacgagggccagctctcccccgccacccggggtgcctaccgtgactgcctgggtcggctggacctgcagtacgccaagctgctgaactcctccaaggcccgcctcaggtccctggagagcttgcacagctttgtggcagccgccactaaggagctaatgtggctgaatgagaaggaggaggaggaggtgggcttcgactggagcgaccgcaacaccaacatgaccgccaagaaggagagctactcggcgctgatgcgggagctggagctgaaggagaagaagatcaaggagctccaaaatgctggggaccggctgctgcgggaggaccacccggcccggcccacggtggagtccttccaggcggccctgcagacgcagtggagctggatgctacagctgtgctgctgtatcgaggcacacctgaaggagaacgctgcctactttcagttcttctcagatgtgcgggaggccgaggggcagttgcagaagctgcaggaggcactgcgtaggaaatacagttgtgatcgctccgccaccgtcacccggctggaggacctgctgcaggatgcccaggacgagaaggaacagctgaacgagtacaagggccacctctcaggcctggccaagcgggccaaggccgtcgtgcagctgaagccccgccacccagcccaccccatgcggggccgcctgcccctgctggccgtgtgcgactataagcaggtggaggtgactgtgcacaagggtgacgagtgccagctggtgggccctgcacagccgtcccactggaaggtgctcagcagctccggcagcgaggccgccgtgccctccgtgtgcttcctggtgcccccgcccaaccaggaggcccaggaggccgtcaccaggctggaggcccagcaccaggccctggtcacgctgtggcaccagttgcacgtggacatgaagagccttctggcctggcagagccttcgccgcgacgtgcagctcatccgctcctggtccctggccacgttccgcaccctgaagccagaggagcagcgccaagccctgcacagcctggagctgcactaccaggccttcctgcgggacagccaggacgcgggcggcttcggacccgaggaccggctgatggctgagcgcgagtacggctcctgcagccaccactaccagcagctgctgcagagcctggaacagggtgcacaggaagagtctcgctgccagcgctgcatctccgagctcaaagacatccggctgcagctggaggcctgtgagacgcgcaccgtgcaccgcctgcggctgccgctggacaaagagccggcacgggagtgtgcccagcgcatcgccgagcagcagaaggcacaggcagaggtggaggggctgggcaagggggtcgcccggctctctgccgaggccgagaaggtcttggccctaccagagccatcgcctgcggcccccacgctgcgctcggagctggagctgacgctgggcaagctggagcaggtccgcagcctgtctgccatctacctggagaagctcaagaccatcagcctggtgatccgcggcacgcagggggccgaggaggtgctcagggcccacgaggagcagctcaaggaggcccaggccgtgccggccaccctcccggagctcgaggccaccaaggcctctctgaagaagctgcgggcccaggccgaggcacagcagcccacgttcgacgccctgcgggatgagctgcggggggcacaggaggtgggggagcgactgcagcagcggcacggggagcgggacgtggaggtggagcgctggcgggagcgggtcgcccagttgcttgagcgctggcaggctgtgctggcccagaccgacgtgcggcagcgcgagctcgagcaactgggccgccagctgcgttactaccgcgagagtgcagaccccttgggcgcctggctgcaggacgccaggcggcggcaggagcagatccaggccatgccgctggccgacagccaggctgtgcgggagcagctgcggcaggagcaggccctgctggaggagatcgagcgccacggcgagaaggtcgaggagtgccagaggtttgcgaaacagtacatcaacgccatcaaggactatgaactccagctggtgacgtacaaggcgcagcttgagccggtggcctccccggccaagaagcccaaggtccagtcgggatcagagagtgtcatccaggagtacgtggacctgcgtacgcactacagcgagctgaccacactgacgagccagtacatcaagttcatcagcgagactctgcggcgcatggaggaggaggagaggctggctgagcagcagcgggcagaggagcgcgagcggctggccgaggtggaggccgcgctggagaagcagcggcagctggccgaggcgcacgcccaggcaaaggcacaggcggagcgggaggcgaaggagctgcagcagcgcatgcaggaggaggtggtgcggcgggaggaggcggcggtggacgcgcagcagcagaagcgcagcattcaggaggagctgcagcagctgcggcagagctcggaggcggagatccaggccaaggcccggcaggcagaggcggctgagcgcagccggctgcgcatcgaggaggagatccgcgtggtgcgcctgcagttggaggccaccgagcgccagcgtggcggggctgagggggagctgcaggcactgcgtgcacgggcggaggaggctgaggcacaaaagcgacaggcgcaggaggaggccgagcgcttgcggaggcaggtgcaggacgagagccagcgtaagcggcaggcggaggtggagctggcctcgcgcgtgaaggccgaggccgaggcggcgcgcgagaagcagcgggccctgcaggccctggaggagctgcggctgcaggcggaggaggcggagcggcgcctgcggcaggccgaggtggagcgagcgcggcaggtacaggtggccctggagacggcgcagcgcagtgcagaggcggagctgcagagcaaacgcgcctccttcgccgagaagacggcacagctggagcgctccctgcaggaggaacacgtggctgtggcacagctgcgggaggaggctgagcggcgggcacagcagcaggccgaggccgagcgggcgcgcgaggaggcagagcgggagctggagcgctggcagctcaaggccaacgaggcgctacggctgcggctgcaggcggaggaggtggcgcagcagaagagcctggcgcaggccgaggctgagaagcagaaggaggaggcggagcgcgaggcgcggcggcgcggcaaggcggaggagcaggccgtccggcagcgggagctggctgaacaagagctggagaagcagcggcagctggcggaaggcaccgcgcagcagcgcctggccgcggagcaggagttgatccggctgcgggccgagacggagcagggggagcagcagcggcagctgctggaggaggagctggcccggctgcagcgtgaggcggctgcagccacgcagaaacggcaggagctggaagccgagctggccaaggtgcgggccgagatggaggtgctgctggccagcaaggcgagggctgaggaggagtcgcgctccaccagcgagaagtccaagcagaggctggaggccgaggccggccggttccgcgagctggccgaggaggccgcccgcctgcgtgccctggcggaagaggccaagcggcagcggcagctggccgaggaagacgcggcgcggcagcgggccgaggcggagcgggtgcttgcggagaagctggccgccatcggcgaggccacgcggctcaagacggaggcggagatcgcgctcaaggagaaggaggcggagaacgagcgcctgcggcggctggcggaggacgaggccttccagcggcggcggctggaggagcaggccgcgcaacacaaggctgacatcgaggagcgcctggcccagctgcgcaaggcatcggacagcgagctggagcggcagaaggggctggtggaggacacgctgaggcagcggcggcaggtggaggaggagatcctggcgctgaaggcgagcttcgagaaggcggccgctggcaaggcggagctggagctggagctgggacgcatccgcagcaacgcggaggacacgctgcgcagcaaggagcaggccgagctggaggctgcgaggcagcggcagctggcggcggaggaggagcggcggcgccgtgaggctgaggagcgcgtgcagaagagcctggcggccgaggaggaggccgcacggcagcggaaggcggcgctggaggaagtcgagcggctgaaagccaaggtggaggaggcgcggcgcctgcgggagcgagcggagcaggagtcggcgcggcagctgcagctggcccaggaggccgcccagaagcggctgcaggcggaagagaaggcacacgccttcgcggtgcagcagaaggagcaggagctacagcagacgctgcagcaggagcagagcgtgctggaccagctgcgcggcgaggcggaggcggcccggcgggcggctgaggaggcggaggaggcccgggtgcaggcggagcgtgaggcggcgcagtcccggcggcaggtggaagaggccgagcggctgaagcagtcggcagaggagcaggcacaggcccgggctcaggcacaggcggctgcagagaagctgcgcaaggaggccgagcaagaggcggcgcggcgggcacaggcggagcaggcggccctgcggcagaagcaggcagctgacgcggagatggagaagcataagaaattcgccgagcagacgctgcggcagaaggcgcaggtggagcaggagctgacaacactgcggctgcagctggaggagaccgaccaccagaagaacctgctggacgaggagctgcagcggctgaaggcggaggccacggaggccgcacgccagcgcagccaggtggaggaggagctcttctcggtgcgcgtgcagatggaggagctgagcaagctcaaggcacgcatcgaggctgagaaccgcgcactcatcttgcgtgacaaggacaatacgcagcgcttcctgcaggaggaggctgagaagatgaagcaggtggcggaggaggccgcgcggctgagtgtggcggcccaagaggctgcgcgactgcggcagctggcagaggaggacctggcacagcagcgggccttggcagagaagatgctcaaggagaagatgcaggcggtgcaggaggccacgcgactcaaggctgaggcggaactgctgcagcagcagaaggagcttgcgcaggagcaggcgcggcggctgcaggaggacaaggagcagatggcgcagcagctggcggaggagacgcagggcttccagcggacgctggaggccgagcggcagcggcagctggagatgagcgctgaggctgagcgcctcaagctgcgtgtggccgagatgagccgagcccaggcccgcgctgaggaggacgcccagcgcttccggaagcaggcggaggagatcggtgagaagctgcaccgcacggagctcgccacccaggagaaggtgaccctggtgcagacactggagatccagcgacagcagagtgaccatgatgccgagcgcctgcgggaggccatcgctgagctggagcgtgagaaggagaagctccaacaggaggccaaactgctgcagctcaagtctgaggagatgcagacggtgcagcaggagcagctgctgcaggagacgcaggccctgcagcaaagcttcctctctgaaaaggacagcctgctacagcgggagcgcttcatcgagcaggagaaggccaagctggagcagctcttccaggacgaggtggccaaggcacagcagctgcgtgaggagcagcagcggcagcagcagcagatggagcaggaacggcagcggctggtggccagcatggaggaggcgcggcggcggcagcatgaggccgaggagggcgtgcggcgcaagcaggaggagctgcagcagctggagcagcagcggcggcagcaggaggagctgctggctgaggagaaccagaggctgcgtgagcagctgcagctcctggaggagcagcaccgggccgcgctggcgcactcagaggaggtcactgcctcgcaggtggctgccacaaagaccctgcccaatggccgggatgcacttgatggccccgcggcagaggcagagccggagcacagcttcgatggcctgcggcggaaggtgtcagctcagaggctgcaggaggccggcatcctgagtgcggaggagctgcagcggttggcgcagggccacaccacggtggacgagctcgcacggcgggaagacgtgcgccactacctgcagggccgcagcagtatcgcagggctgttgctgaaggccaccaatgagaagctgagtgtttacgccgccctgcagaggcagctgctgagtcccggcacggccctcatcctgctggaggcgcaggcggcctcaggcttcctgctggaccctgtgcggaaccggcggctgaccgtcaacgaggctgtgaaggagggtgtggtgggccccgagctgcaccacaagctgctgtcggccgagcgcgccgtcactggctacaaggacccctacactggccagcagatctctctcttccaagccatgcagaagggcctcatcgtccgggagcacggcatccgcctgctggaggcccagatcgccacgggcggcgttatcgaccccgtgcacagccaccgcgtgcccgtggacgtggcctaccggcgcggctacttcgacgaggagatgaaccgcgtcctggcggaccccagcgacgacaccaagggcttctttgaccccaacacgcacgagaacctcacgtacctgcagctactggagcgctgcgtggaggaccccgagacgggcctgtgccttctgccactcacggataaggctgccaagggcggggagctggtctacactgactccgaggcccgggacgtctttgagaaggccaccgtgtctgcgccgttcggcaagttccagggcaagacggtgaccatttgggagatcatcaactcggaatacttcacggcagagcagcggcgggacctgctgcggcagttccgcacgggccggatcacagtggagaagatcatcaagatcatcatcacggtggtggaggagcaggagcagaagggccggctttgctttgagggcctgcgcagcctggtgccagccgccgagctgctggagagcagggtcatcgaccgcgagctctaccagcagctgcagcgaggtgagcgctctgtgcgagacgtagccgaggtggacactgtgcggcgggctctccggggtgccaacgtcatcgcgggtgtatggctggaggaggcggggcagaagctgagtatctacaatgccctgaagaaagacctgctgccatccgacatggccgtggccctgttggaagcccaggccggcaccgggcacatcatcgaccccgccaccagcgcccggctgaccgtggacgaggcagtgcgtgctggcctggtgggccccgagtttcatgagaagctgctatcagccgagaaggctgtgacagggtacagggacccctacacagggcagagcgtctccctgttccaggccctgaagaagggcctcattccccgggagcagggcctgcgcctgttggacgcccagctgtccacgggcggcatcgtggaccccagcaagagccaccgcgtgcccctggatgtcgcctgcgcccgaggctgcctggatgaggagaccagcagggccctgtcggcaccaagggccgacgccaaggcctacagtgaccccagcacaggggagccggccacctacggcgagctccagcagcggtgccggcccgaccagctgaccgggctgagcctgctgccgctctcagaaaaggctgctcgggcccggcaggaggagctctactcagagctgcaggcccgtgagacctttgaaaagaccccggttgaggtccccgtgggtggcttcaagggcaggacggtgacggtgtgggagctcatcagctctgagtacttcactgcggagcagcggcaggagctgttgcgtcagttccgcacgggcaaggtcaccgtggagaaggtcatcaagattctcattaccatcgtggaggaggtggagaccctgcggcaggagaggctgtccttcagcggcctccgtgcccctgtgccagccagcgagctcctggcttccggggtcctcagcagagcccagtttgagcagctcaaggacggcaagacgacggtcaaggacctttcggagctgggctccgtgcggacgctgctgcagggcagtggctgcctcgccggcatctacctggaggacaccaaggagaaggtgtccatctacgaggccatgcgccggggcctgctgagagccacaacggctgcgctcctgctggaggcgcaggcggccactggcttcctggtggaccccgtgcggaaccagcgcctgtatgtccacgaggccgtgaaggcgggcgtggtgggccccgagcttcacgagcagctgctgtctgccgagaaggccgtcaccggctacagagacccctactcgggcagcaccatctccctcttccaggccatgcagaagggcctggttctccggcagcacggcatccgcctgctggaggcccagatcgccacgggcggcatcatcgaccccgtgcacagccaccgcgtgcctgtggacgtggcctaccagcgcggctacttcagtgaggagatgaaccgcgtcctggcggaccccagcgacgacaccaagggcttctttgaccccaacacgcatgagaacctcacgtacaggcagctgctggagcggtgcgtggaggaccccgagacgggcttgcgccttctgccactgaaaggggcggagaaggctgaggtggtggagaccacgcaggtgtacactgaggaggagacaagaagggcatttgaagagacacagatcgacattcccggcggcggcagccacggcggctccaccatgtccctgtgggaggtgatgcagtcggacctgatccccgaggagcagcgggcccagctgatggctgacttccaggccggccgggtgaccaaggaacgcatgatcatcatcatcatcgagatcattgagaagacagagatcatccgccagcagggtctggcctcctacgactacgtgcgccgccgcctcacggctgaggacctgttcgaggctcggatcatctctctcgagacctacaacctgctccgggagggcaccaggagcctccgtgaggctctcgaggcggagtccgcctggtgctacctctatggcacgggctccgtggctggtgtctacctgcccggttccaggcagacactgagcatctaccaggctctcaagaaagggctgctgagtgccgaggtggcccgcctgctgctggaggcacaggcagccacaggcttcctgctggacccggtgaagggggagcggctgactgtggatgaggctgtgcggaagggcctcgtggggcccgagctgcacgaccgcctgctctcggctgagcgggcggtcaccggctaccgtgacccctacaccgagcagaccatctcgctcttccaggccatgaagaaggagctgatccctactgaggaggccctgcggctgctggatgcccagctggccaccggcggcatcgtggacccccgcctgggcttccaccttcccctggaggtggcttaccagcgtggctacctcaacaaggacacgcacgaccagctgtcagagcccagcgaggtgcgcagctacgtggacccgtccaccgacgagcgcctcagctacacgcagctgctcaggcggtgccgtcgtgacgacggcaccggccagctgctcctgccactgtcggacgcccgcaagctgaccttccgtggcctgcggaagcagatcaccatggaggagctggtgcgctcgcaggtcatggacgaggccacggcgctgcagctgcgggagggcctgacctccatcgaggaggtcaccaagaacttgcagaagttcctggaaggcaccagctgcatcgctggtgtcttcgtggacgccaccaaggaacggctctcggtgtaccaggccatgaagaagggcatcatccgccccggcacagcctttgagctcctggaggcgcaggcggccaccggttacgtcatcgaccccatcaagggactgaagctgacggtggaggaggctgtgcgtatgggcattgtgggccccgagttcaaggacaagctgctgtcggccgagcgcgccgtcactgggtacaaggacccctactctgggaagctcatctccctcttccaggccatgaagaagggcctgatcctgaaggaccatggcatccgcctgctggaggcccagatcgccacgggcggcatcatcgaccctgaggagagccaccggctgcccgtggaggtggcctacaagcgcggcctcttcgatgaggagatgaacgagatcctgaccgacccctcggacgacaccaagggcttctttgaccctaacacggaggagaacctcacctacctgcagctgatggagcgttgtatcactgacccccagacgggcctgtgtctcttgccgctgaaggagaagaagcgggagcggaagacgtcctccaagtcctccgtgcgcaagcgccgagtggtcatcgtggaccccgagacgggcaaggagatgtcagtgtacgaggcctaccgcaagggcctgattgaccaccagacgtacctggagctgtccgagcaggagtgcgagtgggaggagatcaccatctcctcctcggacggcgtggtcaagtccatgatcatcgaccgccgctccgggcgccagtacgacatcgatgatgccatcgccaagaacctcatcgaccgctcggcactggaccagtaccgcgccggcacgctctccatcaccgagttcgccgacatgctctcgggcaacgccggtggtttccgctcccgttcctcctcggtgggatcctcctcctcctaccccatcagccccgccgtctccaggacccagctggcctcctggtcagaccccactgaggagacgggccccgtggctggcatcctggacacggagacgctggagaaggtgtccatcaccgaggccatgcaccggaacctggtggataacatcacggggcagcggctgctggaggcgcaggcctgcaccgggggcatcatcgaccccagcaccggtgagcgcttccctgtcaccgacgccgtcaacaagggcctggtggacaagatcatggtggaccgcatcaacctggcccagaaggccttctgcggcttcgaggacccacgcaccaagaccaagatgtcggccgcccaggccctgaagaagggctggctctactacgaggccggccagcgcttcctggaggtgcagtacctgaccggcggcttgatcgagcccgacacgccgggccgcgtgcccctggacgaggccctgcagcgcggcacggtggacgcccgcaccgcacagaagctgcgtgacgtgggcgcctactccaagtacctcacctgccctaagaccaagctcaagatctcctataaggacgcgctggaccgcagcatggtggaggagggcacggggctgcggctgctggaggctgccgcgcagtccaccaagggctactacagcccctacagcgtcagcggctccggctctaccgctggctcccgcaccggctcgcgcaccggctcccgggccggctcccgccgcggcagctttgacgccaccggctccggcttctccatgaccttctcttcatcctcctactcctcctcgggctacggccgccgctacgcctcggggtcctcggcctccctggggggccctgagtctgccgtggcctgaggctgcctgcgcccaccccgctctgcatgcggcccagcccggctcccaccgaggcgcgggggccgttttcaacgcttaaaggtgtcttcctcccaagtggtgcctaaagtttaaccaaaaagaccagactaatatattaatatatatctgctgtccagacagcctgtatcttgggggacagggctggcccagccctgctggccgcctcaccccctcgggtctcctcactcccttctacctgccactcacacagccaggtgccttggagggtcccaagctgggccccagcccaccctcctgtcttcccagggtagcccgcctgccagtcctagctgcacagggcagctgggcccaaccctgtctgtagagggccctggtgtttctagcactggcctgcacggtgggccttgctggggacggggggccccagtcagcctctctcccagtctacccagagaagccccttccccatgggaagacgaggccctcgggcccagcccccacagtgctgtctgatctgtgctttccagctcaccccccacactcactcctgagacccctggcctccggcgtcagcctccagcctctgttcccctagtaagtgccttccatgtcggcctctaaccccaggccccgaggacccagacccagtggggaggcggacgttccagccggcatggctgggaactgcagacctgtcctcctggtgggtccaggggcccctccagcttgtggagccccacactggggtgccgcctgcccgtctctctcccatggagccccagccccctttgggcccagggacaccagccaggctctgtgctgaccctcctgttgcacccagccctggtctcagcagcgaccacccctgcctccaccctctgagctttgcatgttccactaaccccgggcgggtggcaggtggaggtgtcaggctgctggcgcctctgcaagggcagaacactaacctgaccgtgggcggggccttgcggtatccgcccccaataaaagcaattccaaccttcccgtg

SEQ ID NO: 5541 - protein, 4574 aa, Homo sapiens; identical to SEQ ID NO: 745

SEQ ID NO: 5542 - DNA, 1151 bp, Homo sapiens
gcccgcaccgcacagaagctgcgtgacgtgggcgcctactccaagtacctcacctgccctaagaccaagctcaagatctcctataaggacgcgctggaccgcagcatggtggaggagggcacggggctgcggctgctggaggctgccgcgcagtccaccaagggctactacagcccctacagcgtcagcggctccggctctaccgctggctcccgcaccggctcgcgcaccggctcccgggccggctcccgccgcggcagctttgacgccaccggctccggcttctccatgaccttctcttcatcctcctactcctcctcgggctacggccgccgctacgcctcggggtcctcggcctccctggggggccctgagtctgccgtggcctgaggctgcctgcgcccaccccgctctgcatgcggcccagcccggctcccaccgaggcgcgggggccgttttcaacgcttaaaggtgtcttcctcccaagtggtgcctaaagtttaaccaaaaagaccagactaatatattaatatatatctgctgtccagacagcctgtatcttgggggacagggctggcccagccctgctggccgcctcaccccctcgggtctcctcactcccttctacctgccactcacacagccaggtgccttggagggtcccaagctgggccccagcccaccctcctgtcttcccagggtagcccgcctgccagtcctagctgcacagggcagctgggcccaaccctgtctgtagagggccctggtgtttctagcactggcctgcacggtgggccttgctggggacggggggccccagtcagcctctctcccagtctacccagagaagccccttccccatgggaagacgaggccctcgggcccagcccccacagtgctgtctgatctgtgctttccagctcaccccccacactcactcctgagacccctggccctcctgttgcacccagccctggtctcagcagcgaccacccctgcctccaccctctgagctttgcatgttccactaaccccgggcgggtggcaggtggaggtgtcaggctgctggcgcctctgcaagggcagaacactaacctgaccgtgggcggggccttgcggtatccgcccccaataaaagcaattccaacctt

SEQ ID NO: 5543 - protein, 94 aa, Homo sapiens [sequence omitted]

SEQ ID NO: 5544 - DNA, 3771 bp, Homo sapiens
atgctcatgccacgggaccagctgcgggccatctatgaggtgctcttccgcgagggcgtgatggtggccaagaaggaccggcggccccgcagcttgcacccccatgtgcccggcgtcaccaacctgcaggtcatgcgtgccatggcgtccctgcgggcacggggcctggtccgcgagacctttgcctggtgccacttttactggtacctcaccaatgaaggcatcgcccacctccgccagtacctgcacctgccgccagagatcgtgcccgcctctctgcagcgcgtgcgccgccccgtcgccatggtgatgcccgcacgccgcaccccccacgtgcaggctgtgcagggtcccctgggctccccacccaagcgggggccgctgccgacggaggagcagcgggtctaccgtcggaaggagcttgaggaggtgtcacctgagacccctgtggtgcctgctaccacccagcggaccctggccaggccaggcccggagcctgccccagccacagatgagcgggatcgtgtgcagaagaaaaccttcaccaagtgggtcaacaagcacctcatcaaggcccagaggcacatcagtgacctgtatgaagacctccgcgatggccacaacctcatctccctgctggaggtcctctcgggggacagcctgccccgggagaaggggaggatgcgtttccacaagctgcagaatgtccagattgccctggactacctccggcaccgccaggtgaagctggtgaacatcaggaatgatgacatcgctgacggcaaccccaagctgacccttggcctcatctggacaatcattctgcacttccagatctcagatatccaggtgagtgggcagtcggaggacatgacggccaaggagaagctgctgctgtggtcgcagcgaatggtggaggggtaccagggcctgcgatgcgacaacttcacctccagctggagagacggccgcctcttcaatgccatcatccaccggcacaagcccctgctcatcgacatgaacaaggtgtaccggcagaccaacctggagaacctggaccaggccttctctgtggcggagcgggacctgggagtgacgcggctcctggaccctgaggacgtggatgtccctcagcccgacgagaagtccatcatcacctacgtctcgtcgctgtatgacgccatgccccgcgtgccggacgtgcaggatggggtgagggccaacgagctgcagctgcgctggcaggagtaccgggagctggtgctgctgctgcttcagtggatgcgacaccacacggccgcctttgaggaacgcaggttcccctccagcttcgaggagattgagatcctgtggtctcagttcctgaagtttaaggagatggagctaccagccaaggaggccgacaagaacaggtccaagggcatctaccaatccctggagggagcggtgcaagcaggccagctcaaggtgccccctggctaccacccgctggatgtggagaaggagtggggcaagctgcacgtggccatcctggagcgggagaagcagctccgcagcgagtttgagaggctggagtgtcttcagcgcatcgtgaccaagctgcagatggaggcggggctgtgtgaggagcagctgaaccaggccgacgccctgctgcagtcggatgtccggctgctggctgcaggcaaagtgccacagcgggcgggggaggtggaacgggacttggacaaggcggatagcatgatccggctgctcttcaacgacgtgcagaccctcaaggatggacggcacccgcagggcgagcagatgtaccgcagggtgtaccgtctgcacgagcgcctggtagccatccgcaccgagtacaacctacggctgaaggcaggcgtggcggcccctgcaacccaggtggcccaggtgactctgcagagtgtgcagaggcgccccgagctggaggactccactctgcgctacctgcaggacctgctggcctgggtggaggagaaccagcaccgtgtggatggcgctgagtggggtgtggacctgcccagcgtggaggcgcagctgggcagccaccgaggcctgcaccagtccatcgaagaattccgggccaagatcgagcgggcacggagtgacgagggccagctctcccccgccacccggggtgcctaccgtgactgcctgggtcggctggacctgcagtacgccaagctgctgaactcctccaaggcccgcctcaggtccctggagagcttgcacagctttgtggcagccgccactaaggagctaatgtggctgaatgagaaggaggaggaggaggtgggcttcgactggagcgaccgcaacaccaacatgaccgccaagaaggagagctactcggcgctgatgcgggagctggagctgaaggagaagaagatcaaggagctccaaaatgctggggaccggctgctgcgggaggaccacccggcccggcccacggtggagtccttccaggcggccctgcagacgcagtggagctggatgctacagctgtgctgctgtatcgaggcacacctgaaggagaacgctgcctactttcagttcttctcagatgtgcgggaggccgaggggcagttgcagaagctgcaggaggcactgcgtaggaaatacagttgtgatcgctccgccaccgtcacccggctggaggacctgctgcaggatgcccaggacgagaaggaacagctgaacgagtacaagggccacctctcaggcctggccaagcgggccaaggccgtcgtgcagctgaagccccgccacccagcccaccccatgcggggccgcctgcccctgctggccgtgtgcgactataagcaggtggaggtgactgtgcacaagggtgacgagtgccagctggtgggccctgcacagccgtcccactggaaggtgctcagcagctccggcagcgaggccgccgtgccctccgtgtgcttcctggtgcccccgcccaaccaggaggcccaggaggccgtcaccaggctggaggcccagcaccaggccctggtcacgctgtggcaccagttgcacgtggacatgaagagccttctggcctggcagagccttcgccgcgacgtgcagctcatccgctcctggtccctggccacgttccgcaccctgaagccagaggagcagcgccaagccctgcacagcctggagctgcactaccaggccttcctgcgggacagccaggacgcgggcggcttcggacccgaggaccggctgatggctgagcgcgagtacggctcctgcagccaccactaccagcagctgctgcagagcctggaacagggtgcacaggaagagtctcgctgccagcgctgcatctccgagctcaaagacatccggctgcagctggaggcctgtgagacgcgcaccgtgcaccgcctgcggctgccgctggacaaagagccggcacgggagtgtgcccagcgcatcgccgagcagcagaaggcacaggcagaggtggaggggctgggcaagggggtcgcccggctctctgccgaggccgagaaggtcttggccctaccagagccatcgcctgcggcccccacgctgcgctcggagctggagctgacgctgggcaagctggagcaggtccgcagcctgtctgccatctacctggagaagctcaagaccatcagcctggtgatccgcgctcgaggccaccaaggcctctctgaagaagctgcgggcccaggccgaggcacagcagcccacgttcgacgccctgcgggatga

SEQ ID NO: 5545 - protein, 1256 aa, Homo sapiens
MLMPRDQLRAIYEVLFREGVMVAKKDRRPRSLHPHVPGVTNLQVMRAMASLRARGLVRETFAWCHFYWYLTNEGIAHLRQYLHLPPEIVPASLQRVRRPVAMVMPARRTPHVQAVQGPLGSPPKRGPLPTEEQRVYRRKELEEVSPETPVVPATTQRTLARPGPEPAPATDERDRVQKKTFTKWVNKHLIKAQRHISDLYEDLRDGHNLISLLEVLSGDSLPREKGRMRFHKLQNVQIALDYLRHRQVKLVNIRNDDIADGNPKLTLGLIWTIILHFQISDIQVSGQSEDMTAKEKLLLWSQRMVEGYQGLRCDNFTSSWRDGRLFNAIIHRHKPLLIDMNKVYRQTNLENLDQAFSVAERDLGVTRLLDPEDVDVPQPDEKSIITYVSSLYDAMPRVPDVQDGVRANELQLRWQEYRELVLLLLQWMRHHTAAFEERRFPSSFEEIEILWSQFLKFKEMELPAKEADKNRSKGIYQSLEGAVQAGQLKVPPGYHPLDVEKEWGKLHVAILEREKQLRSEFERLECLQRIVTKLQMEAGLCEEQLNQADALLQSDVRLLAAGKVPQRAGEVERDLDKADSMIRLLFNDVQTLKDGRHPQGEQMYRRVYRLHERLVAIRTEYNLRLKAGVAAPATQVAQVTLQSVQRRPELEDSTLRYLQDLLAWVEENQHRVDGAEWGVDLPSVEAQLGSHRGLHQSIEEFRAKIERARSDEGQLSPATRGAYRDCLGRLDLQYAKLLNSSKARLRSLESLHSFVAAATKELMWLNEKEEEEVGFDWSDRNTNMTAKKESYSALMRELELKEKKIKELQNAGDRLLREDHPARPTVESFQAALQTQWSWMLQLCCCIEAHLKENAAYFQFFSDVREAEGQLQKLQEALRRKYSCDRSATVTRLEDLLQDAQDEKEQLNEYKGHLSGLAKRAKAVVQLKPRHPAHPMRGRLPLLAVCDYKQVEVTVHKGDECQLVGPAQPSHWKVLSSSGSEAAVPSVCFLVPPPNQEAQEAVTRLEAQHQALVTLWHQLHVDMKSLLAWQSLRRDVQLIRSWSLATFRTLKPEEQRQALHSLELHYQAFLRDSQDAGGFGPEDRLMAEREYGSCSHHYQQLLQSLEQGAQEESRCQRCISELKDIRLQLEACETRTVHRLRLPLDKEPARECAQRIAEQQKAQAEVEGLGKGVARLSAEAEKVLALPEPSPAAPTLRSELELTLGKLEQVRSLSAIYLEKLKTISLVIRARGHQGLSEEAAGPGRGTAAHVRRPAG

SEQ ID NO: 5546 - DNA, 316 bp, Homo sapiens
agtgtcctggacccagctgagcgggcggtcattcgcatcgcagatgagcgggatcgtgtgcagaagaaaaccttcaccaagtgggtcaacaagcacctcatcaaggcccagaggcacatcagtgacctgtatgaagacctccgcgatggccacaacctcatctccctgctggaggtcctctcgggggacagcctgccgagggagcgggacgtaagcaggagctcacgcctggtgagtggctgtgcctgccggctgcagcggcacgggagctccccaagaccgtggagcccggctttctgggggctggtggcccgtc

SEQ ID NO: 5547 - protein, 56 aa, Homo sapiens
MSGIVCRRKPSPSGSTSTSSRPRGTSVTCMKTSAMATTSSPCWRSSRGTACRGSGT

SEQ ID NO: 5548 - DNA, 2844 bp, Homo sapiens
atggaggccaggggagtggagggccaccaggggacactcctgtctaccctgccaacccgcccctgcccacagacgccgagagggtcttggcccaggcagatcacgaactacatggtgcccagctgagcctgcggccagctccaccacgagcccctgcacgcctgctgctccaaggactgccccctggcaccacgccccagcgcttggagcagcatgtccaggccttgctgcgggcctcggggctcccagtacagccttgctgtgccttggccagcccccggccagaccgggctctggtccagttgcccaagcccctttctgaggcagatgtccgtgtcctggaggagcaggcccagaatctgggcctggaggggaccttggtgtccctggcccgggttccccaggcccgagcggtgcgtgtggtgggggatggtgcctctgtggacctgctgttgctggagttgtacctggagaatgagcgccgcagtggtggggggcccctggaggacctgcaacgcctacccgggcccctgggcactgttgcctccttccagcagtggcaagctggagcccgaggagctggctgagaacaccagtggaggggaccacccgtccacccaggggcctagggctaccaagcatgctctcctgaggaccggagggttggtgacggctctgcagggtgcagggactgtgacaatgggctctggcgaggaaccagggcagtcaggggcctctctgaggacaggtcccatggtgcagggtagagggattatgacaacaggctctggccaggaaccagggcagtcagggacctctctgaggacaggtcccatggggtctctgggacaggcagagcaagtcagctcgatgcccatggggtctctggaacatgaggggctggtaagcctgaggcctgtggggttgcaggaacaggaggggcccatgagcctggggcctgtggggtctgcaggcccagtggagacctctaaggggttgctggggcaggagggcctggtggaaattgccatggactcaccagagcaagaggggctggtgggtcccatggagatcaccatggggtctctggagaaggcagggcctgtgagcccaggatgtgtgaagctggcagggcaggagggcctggtggagatggtgctattgatggagccaggggcgatgcgcttcctgcagctctaccatgaggaccttcttgcgggcctgggagacgtcgctctcttgccacttgaaggaccggatatgactggctttcggctctgtggagcccaggcttcctgccaggcggctgaggagtttctgcggagcctgctgggcagcattagctgccatgtgttgtgcctggagcacccgggcagcgccaggtttctcctgggcccagaagggcagcaccttctccaggggctggaggctcagttccagtgtgtctttgggacagagcgcctggccacagccacgttggacacaggccttgaagaggtggaccctaccgaggccctcccagtgctccctggcaacgcccacaccctgtggaccccagacagtacaggtggtgaccaggaggacgtgagcctggaggaggtccgagaactgctggccaccctggagggcctagacctagacggggaggactggctgcctcgggagctggaggaggaagggtggctggaggaggaggccgctctgcagctggccctccaccggtcactggagcctcaaggtcaggtggctgagcaggaggaggctgctgccctgcggcaagccctaaccctctccctgctggagcagcccccgttggaggcagaagagcccccagatggggggactgatggcaaggcccagctggtggtgcactcggcctttgagcaggatgtggaggagctggaccgggcgctcagggctgccttggaggtccacgtccaggaggagacggtggggccctggcgccgcacactgcctgcagagctgcgtgctcgcctggagcggtgccatggtgtgagtgttgccctgcgtggtgactgcaccatcctccgtggcttcggggcccaccctgcccgtgctgcccgccacttggtggcacttctggctggcccctgggatcagagtttggcctttcccttggcagcttcaggccctaccttggcggggcagacgctgaaggggccctggaacaacctggagcgtctggcagagaacaccggggagttccaggaggtggtgcgggccttctacgacaccctggacgctgcccgcagcagcatccgcgtcgttcgtgtggagcgcgtgtcgcacccgctgctgcagcagcagtatgagctgtaccgggagcgcctgctgcagcgatgcgagcggcgcccggtggagcaggtgctgtaccacggcacgacggcaccggcagtgcctgacatctgcgcccacggcttcaaccgcagcttctgcggccgcaacgccacggtctacgggaagggcgtgtatttcgccaggcgcgcctccctgtcggtgcaggaccgctactcgccccccaacgccgatggccataaggcggtgttcgtggcacgggtgctgactggcgactacggagccccattcacctcccgcacgccagtgctcttggggacgggggctggggagtgtgcgcgcgtgggtatgcgtgcgtcctggttgcgtccgcggtgccggtgtacgcgcccccactgtgggccgctggagctgcggcccgggctccctcccggcctcgctgcagcagagctcccgcggcccacgccgctgcggctgcagctatttataggccttcgctgcggagatcgaggtgggactgcgggctga

SEQ ID NO: 5549 - protein, 876 aa, Homo sapiens
MSRPCCGPRGSQYSLAVPWPAPGQTGLWSSCPSPFLRQMSVSWRSRPRIWAWRGPWCPWPGFPRPERCVWWGMVPLWTCCCWSCTWRMSAAVVGGPWRTCNAYPGPWALLPPSSSGKLEPEELAENTSGGDHPSTQGPRATKHALLRTGGLVTALQGAGTVTMGSGEEPGQSGASLRTGPMVQGRGIMTTGSGQEPGQSGTSLRTGPMGSLGQAEQVSSMPMGSLEHEGLVSLRPVGLQEQEGPMSLGPVGSAGPVETSKGLLGQEGLVEIAMDSPEQEGLVGPMEITMGSLEKAGPVSPGCVKLAGQEGLVEMVLLMEPGAMRFLQLYHEDLLAGLGDVALLPLEGPDMTGFRLCGAQASCQAAEEFLRSLLGSISCHVLCLEHPGSARFLLGPEGQHLLQGLEAQFQCVFGTERLATATLDTGLEEVDPTEALPVLPGNAHTLWTPDSTGGDQEDVSLEEVRELLATLEGLDLDGEDWLPRELEEEGWLEEEAALQLALHRSLEPQGQVAEQEEAAALRQALTLSLLEQPPLEAEEPPDGGTDGKAQLVVHSAFEQDVEELDRALRAALEVHVQEETVGPWRRTLPAELRARLERCHGVSVALRGDCTILRGFGAHPARAARHLVALLAGPWDQSLAFPLAASGPTLAGQTLKGPWNNLERLAENTGEFQEVVRAFYDTLDAARSSIRVVRVERVSHPLLQQQYELYRERLLQRCERRPVEQVLYHGTTAPAVPDICAHGFNRSFCGRNATVYGKGVYFARRASLSVQDRYSPPNADGHKAVFVARVLTGDYGAPFTSRTPVLLGTGAGECARVGMRASWLRPRCRCTRPHCGPLELRPGLPPGLAAAELPRPTPLRLQLFIGLRCGDRGGTAG

SEQ ID NO: 5550 - DNA, 2387 bp, Homo sapiens
gaccggatatgactggctttcgggtgagtgacccctcaggactcctcaccttcagccccctcctcctactggggactcaaagtacctttcctgtgctctaaacctgcaaactccatctctgcaatggccctgcagctctgtggagcccaggcttcctgccaggcggctgaggagtttctgcggagcctgctgggcagcattagctgccatgtgttgtgcctggagcacccgggcagcgccaggtttctcctgggcccagaagggcagcaccttctccaggggctggaggctcagttccagtgtgtctttgggacagagcgcctggccacagccacgttggacacaggccttgaagaggtagagatggagtcccacccctgccctcccctttctcacgcctctgccccaggcctcctctgcccttgcccagaggctagtggtcctgacatcctctccctacaggtggaccctaccgaggccctcccagtgctccctggcaacgcccacaccctgtggaccccagacagtacaggtggtgaccaggaggacgtgagcctgggtagggctccctgggagccctcagcacatcctgtggccctcacttgacctcaccccctgccctgctctgtgctcccatctgtctactgacccatcttaggcccaccctgtaccctaaaaacttgctccccatctttcatccattccaactcctcctgggtccagcccctgacccaatggcctctccctgcccccagaggaggtccgagaactgctggccaccctggagggcctagacctagacggggaggactggctgcctcgggagctggaggaggaagggcctcaggagcagccagaggaggaggtgaccccagggcatgaggaggaggagcctgtggcccccagcactgtggcacccaggtggctggaggaggaggccgctctgcagctggccctccaccggtcactggagcctcaaggtcaggtggctgagcaggaggaggctgctgccctgcggcaagccctaaccctctccctgctggagcagcccccgttggaggcagaagagcccccagatggggggactgatggcaaggcccagctggtggtgcactcggcctttgagcaggatgtggaggagctggaccgggcgctcagggctgccttggaggtccacgtccaggaggagacggtggggccctggcgccgcacactgcctgcagagctgcgtgctcgcctggagcggtgccatggtgtgagtgttgccctgcgtggtgactgcaccatcctccgtggcttcggggcccaccctgcccgtgctgcccgccacttggtggcacttctggctggcccctgggatcagagtttggcctttcccttggcagcttcaggccctaccttggcggggcagacgctgaaggggccctggaacaacctggagcgtctggcagagaacaccggggagttccaggaggtggtgcgggccttctacgacaccctggacgctgcccgcagcagcatccgcgtcgttcgtgtggagcgcgtgtcgcacccgctgctgcagcagcagtatgagctgtaccgggagcgcctgctgcagcgatgcgagcggcgcccggtggagcaggtgctgtaccacggcacgacggcaccggcagtgcctgacatctgcgcccacggcttcaaccgcagcttctgcggccgcaacgccacggtctacgggaagggcgtgtatttcgccaggcgcgcctccctgtcggtgcaggaccgctactcgccccccaacgccgatggccataaggcggtgttcgtggcacgggtgctgactggcgactacgggcagggccgccgcggtctgcgggcgccccctctgcggggtcctggccacgtgctcctgcgctacgacagcgccgtggactgcatctgccagcccagcatcttcgtcatcttccacgacacccaggcgctgcccacccacctcatcacctgcgagcacgtgccccgcgcttcccccgacgacccctctgggctcccgggccgctccccagacacttaaccgaaggggccaccctctggcctcctgcttcccaggctcccagctccgcacaggctgatgctccccgcccccaactgtggccgcctgagctgtccccggggacgcccctgcctccctctgcgggctccagaaggcggtgtgggggatggcggtcagcagcggccgaggggggccgggctaggtcccagcctgggccgaccccaccaccaggggtcagcagagcccaggaggcgacaccgcccgcccgccgctcccagacctcgcccgagtcggctctgttgtttgaataaacgtgaacgtgaacccaggcggaagggacccgggaactctg

SEQ ID NO: 5551 - protein, 84 aa, Homo sapiens
MSCTGSACCSDASGARWSRCCTTARRHRQCLTSAPTASTAASAAATPRSTGRACISPGAPPCRCRTATRPPTPMAIRRCSWHGC

SEQ ID NO: 5552 - DNA, 1849 bp, Homo sapiens
tggcagaacgagtgttgcagcaggagcaccggttgcagggctcagagctgagccttgtcccccactacgacatcctggagcccgaggagctggctgagaacaccagtggaggggaccacccgtccacccaggggcctagggctaccaagcatgctctcctgaggaccggagggttggtgacggctctgcagggtgcagggactgtgacaatgggctctggcgaggaaccagggcagtcaggggcctctctgaggacaggtcccatggtgcagggtagagggattatgacaacaggctctggccaggaaccagggcagtcagggacctctctgaggacaggtcccatggggtctctgggacaggcagagcaagtcagctcgatgcccatggggtctctggaacatgaggggctggtaagcctgaggcctgtggggttgcaggaacaggaggggcccatgagcctggggcctgtggggtctgcaggcccagtggagacctctaaggggttgctggggcaggagggcctggtggaaattgccatggactcaccagagcaagaggggctggtgggtcccatggagatcaccatggggtctctggagaaggcagggcctgtgagcccaggatgtgtgaagctggcagggcaggagggcctggtggagatggcgccgcacactgcctgcagagctgcgtgctcgcctggagcggtgccatggtgtgagtgttgccctgcgtggtgactgcaccatcctccgtggcttcggggcccaccctgcccgtgctgcccgccacttggtggcacttctggctggcccctgggatcagagtttggcctttcccttggcagcttcaggccctaccttggcggggcagacgctgaaggggccctggaacaacctggagcgtctggcagagaacaccggggagttccaggaggtggtgcgggccttctacgacaccctggacgctgcccgcagcagcatccgcgtcgttcgtgtggagcgcgtgtcgcacccgctgctgcagcagcagtatgagctgtaccgggagcgcctgctgcagcgatgcgagcggcgcccggtggagcaggtgctgtaccacggcacgacggcaccggcagtgcctgacatctgcgcccacggcttcaaccgcagcttctgcggccgcaacgccacggtctacgggaagggcgtgtatttcgccaggcgcgcctccctgtcggtgcaggaccgctactcgccccccaacgccgatggccataaggcggtgttcgtggcacgggtgctgactggcgactacgggcagggccgccgcggtctgcgggcgccccctctgcggggtcctggccacgtgctcctgcgctacgacagcgccgtggactgcatctgccagcccagcatcttcgtcatcttccacgacacccaggcgctgcccacccacctcatcacctgcgagcacgtgccccgcgcttcccccgacgacccctctgggctcccgggccgctccccagacacttaaccgaaggggccaccctctggcctcctgcttcccaggctcccagctccgcacaggctgatgctccccgcccccaactgtggccgcctgagctgtccccggggacgcccctgcctccctctgcgggctccagaaggcggtgtgggggatggcggtcagcagcggccgaggggggccgggctaggtcccagcctgggccgaccccaccaccaggggtcagcagagcccaggaggcgacaccgcccgcccgccgctcccagacctcgcccgagtcggctctgttgtttgaataaacgtgaacgtgaacccaggcggaagggacccgggaactctg

SEQ ID NO: 5553 - protein, 176 aa, Homo sapiens
MGSGEEPGQSGASLRTGPMVQGRGIMTTGSGQEPGQSGTSLRTGPMGSLGQAEQVSSMPMGSLEHEGLVSLRPVGLQEQEGPMSLGPVGSAGPVETSKGLLGQEGLVEIAMDSPEQEGLVGPMEITMGSLEKAGPVSPGCVKLAGQEGLVEMAPHTACRAACSPGAVPWCECCPAW

SEQ ID NO: 5554 - DNA, 3261 bp, Homo sapiens
cacaggagtcctggctgagctcatggcctgaggctgcctagcggccacggggaatggttgcaatggcggaggcagaggcaggggtggcagtggaggtccgtggactgccccctgccgtgcccgacgagctgctcactctctactttgaaaaccgccgacgctctggagggggacctgtgttgagctggcagagactgggctgtgggggcgtcctcaccttcagagagcctgcagacgccgagagggtcttggcccaggcagatcacgaactacatggtgcccagtacagccttgctgtgccttggccagcccccggccagaccgggctctggtccagttgcccaagcccctttctgaggcagatgtccgtgtcctggaggagcaggcccagaatctgggcctggaggggaccttggtgtccctggcccgggttccccaggcccgagcggtgcgtgtggtgggggatggtgcctctgtggacctgctgttgctggagttgtacctggagaatgagcgccgcagtggtggggggcccctggaggacctgcaacgcctacccgggcccctgggcactgttgcctccttccagcagtggcaagctggagcccgaggagctggctgagaacaccagtggaggggaccacccgtccacccaggggcctagggctaccaagcatgctctcctgaggaccggagggttggtgacggctctgcagggtgcagggactgtgacaatgggctctggcgaggaaccagggcagtcaggggcctctctgaggacaggtcccatggtgcagggtagagggattatgacaacaggctctggccaggaaccagggcagtcagggacctctctgaggacaggtcccatggggtctctgggacaggcagagcaagtcagctcgatgcccatggggtctctggaacatgaggggctggtaagcctgaggcctgtggggttgcaggaacaggaggggcccatgagcctggggcctgtggggtctgcaggcccagtggagacctctaaggggttgctggggcaggagggcctggtggaaattgccatggactcaccagagcaagaggggctggtgggtcccatggagatcaccatggggtctctggagaaggcagggcctgtgagcccaggatgtgtgaagctggcagggcaggagggcctggtggagatggtgctattgatggagccaggggcgatgcgcttcctgcagctctaccatgaggaccttcttgcgggcctgggagacgtcgctctcttgccacttgaaggaccggatatgactggctttcggctctgtggagcccaggcttcctgccaggcggctgaggagtttctgcggagcctgctgggcagcattagctgccatgtgttgtgcctggagcacccgggcagcgccaggtttctcctgggcccagaagggcagcaccttctccaggggctggaggctcagttccagtgtgtctttgggacagagcgcctggccacagccacgttggacacaggccttgaagaggtggaccctaccgaggccctcccagtgctccctggcaacgcccacaccctgtggaccccagacagtacaggtggtgaccaggaggacgtgagcctggaggaggtccgagaactgctggccaccctggagggcctagacctagacggggaggactggctgcctcgggagctggaggaggaagggcctcaggagcagccagaggaggaggtgaccccagggcatgaggaggaggagcctgtggcccccagcactgtggcacccaggtggctggaggaggaggccgctctgcagctggccctccaccggtcactggagcctcaaggtcaggtggctgagcaggaggaggctgctgccctgcggcaagccctaaccctctccctgctggagcagcccccgttggaggcagaagagcccccagatggggggactgatggcaaggcccagctggtggtgcactcggcctttgagcaggatgtggaggagctggaccgggcgctcagggctgccttggaggtccacgtccaggaggagacggtggggccctggcgccgcacactgcctgcagagctgcgtgctcgcctggagcggtgccatggtgtgagtgttgccctgcgtggtgactgcaccatcctccgtggcttcggggcccaccctgcccgtgctgcccgccacttggtggcacttctggctggcccctgggatcagagtttggcctttcccttggcagcttcaggccctaccttggcggggcagacgctgaaggggccctggaacaacctggagcgtctggcagagaacaccggggagttccaggaggtggtgcgggccttctacgacaccctggacgctgcccgcagcagcatccgcgtcgttcgtgtggagcgcgtgtcgcacccgctgctgcagcagcagtatgagctgtaccgggagcgcctgctgcagcgatgcgagcggcgcccggtggagcaggtgctgtaccacggcacgacggcaccggcagtgcctgacatctgcgcccacggcttcaaccgcagcttctgcggccgcaacgccacggtctacgggaagggcgtgtatttcgccaggcgcgcctccctgtcggtgcaggaccgctactcgccccccaacgccgatggccataaggcggtgttcgtggcacgggtgctgactggcgactacgggcagggccgccgcggtctgcgggcgccccctctgcggggtcctggccacgtgctcctgcgctacgacagcgccgtggactgcatctgccagcccagcatcttcgtcatcttccacgacacccaggcgctgcccacccacctcatcacctgcgagcacgtgccccgcgcttcccccgacgacccctctgggctcccgggccgctccccagacacttaaccgaaggggccaccctctggcctcctgcttcccaggctcccagctccgcacaggctgatgctccccgcccccaactgtggccgcctgagctgtccccggggacgcccctgcctccctctgcgggctccagaaggcggtgtgggggatggcggtcagcagcggccgaggggggccgggctaggtcccagcctgggccgaccccaccaccaggggtcagcagagcccaggaggcgacaccgcccgcccgccgctcccagacctcgcccgagtcggctctgttgtttgaataaacgtgaacgtgaacccaggcggaagggacccgggaactctg

SEQ ID NO: 5555 - protein, 958 aa, Homo sapiens
MVAMAEAEAGVAVEVRGLPPAVPDELLTLYFENRRRSGGGPVLSWQRLGCGGVLTFREPADAERVLAQADHELHGAQYSLAVPWPAPGQTGLWSSCPSPFLRQMSVSWRSRPRIWAWRGPWCPWPGFPRPERCVWWGMVPLWTCCCWSCTWRMSAAVVGGPWRTCNAYPGPWALLPPSSSGKLEPEELAENTSGGDHPSTQGPRATKHALLRTGGLVTALQGAGTVTMGSGEEPGQSGASLRTGPMVQGRGIMTTGSGQEPGQSGTSLRTGPMGSLGQAEQVSSMPMGSLEHEGLVSLRPVGLQEQEGPMSLGPVGSAGPVETSKGLLGQEGLVEIAMDSPEQEGLVGPMEITMGSLEKAGPVSPGCVKLAGQEGLVEMVLLMEPGAMRFLQLYHEDLLAGLGDVALLPLEGPDMTGFRLCGAQASCQAAEEFLRSLLGSISCHVLCLEHPGSARFLLGPEGQHLLQGLEAQFQCVFGTERLATATLDTGLEEVDPTEALPVLPGNAHTLWTPDSTGGDQEDVSLEEVRELLATLEGLDLDGEDWLPRELEEEGPQEQPEEEVTPGHEEEEPVAPSTVAPRWLEEEAALQLALHRSLEPQGQVAEQEEAAALRQALTLSLLEQPPLEAEEPPDGGTDGKAQLVVHSAFEQDVEELDRALRAALEVHVQEETVGPWRRTLPAELRARLERCHGVSVALRGDCTILRGFGAHPARAARHLVALLAGPWDQSLAFPLAASGPTLAGQTLKGPWNNLERLAENTGEFQEVVRAFYDTLDAARSSIRVVRVERVSHPLLQQQYELYRERLLQRCERRPVEQVLYHGTTAPAVPDICAHGFNRSFCGRNATVYGKGVYFARRASLSVQDRYSPPNADGHKAVFVARVLTGDYGQGRRGLRAPPLRGPGHVLLRYDSAVDCICQPSIFVIFHDTQALPTHLITCEHVPRASPDDPSGLPGRSPDT

SEQ ID NO: 5556 - DNA, 3521 bp, Homo sapiens
ctttcagtttcacttttgttttcctgctcccagcagggttaggcttgctgaggggcaggcacaggagtcctggctgagctcatggcctgaggctgcctagcggccacggggaatggttgcaatggcggaggcagaggcaggggtggcagtggaggtccgtggactgccccctgccgtgcccgacgagctgctcactctctactttgaaaaccgccgacgctctggagggggacctgtgttgagctggcagagactgggctgtgggggcgtcctcaccttcagagagcctgcagacgccgagagggtcttggcccaggcagatcacgaactacatggtgcccagctgagcctgcggccagctccaccacgagcccctgcacgcctgctgctccaaggactgccccctggcaccacgccccagcgcttggagcagcatgtccaggccttgctgcgggcctcggggctcccagtacagccttgctgtgccttggccagcccccggccagaccgggctctggtccagttgcccaagcccctttctgaggcagatgtccgtgtcctggaggagcaggcccagaatctgggcctggaggggaccttggtgtccctggcccgggttccccaggcccgagcggtgcgtgtggtgggggatggtgcctctgtggacctgctgttgctggagttgtacctggagaatgagcgccgcagtggtggggggcccctggaggacctgcaacgcctacccgggcccctgggcactgttgcctccttccagcagtggcaagtggcagaacgagtgttgcagcaggagcaccggttgcagggctcagagctgagccttgtcccccactacgacatcctggagcccgaggagctggctgagaacaccagtggaggggaccacccgtccacccaggggcctagggctaccaagcatgctctcctgaggaccggagggttggtgacggctctgcagggtgcagggactgtgacaatgggctctggcgaggaaccagggcagtcaggggcctctctgaggacaggtcccatggtgcagggtagagggattatgacaacaggctctggccaggaaccagggcagtcagggacctctctgaggacaggtcccatggggtctctgggacaggcagagcaagtcagctcgatgcccatggggtctctggaacatgaggggctggtaagcctgaggcctgtggggttgcaggaacaggaggggcccatgagcctggggcctgtggggtctgcaggcccagtggagacctctaaggggttgctggggcaggagggcctggtggaaattgccatggactcaccagagcaagaggggctggtgggtcccatggagatcaccatggggtctctggagaaggcagggcctgtgagcccaggatgtgtgaagctggcagggcaggagggcctggtggagatggtgctattgatggagccaggggcgatgcgcttcctgcagctctaccatgaggaccttcttgcgggcctgggagacgtcgctctcttgccacttgaaggaccggatatgactggctttcggctctgtggagcccaggcttcctgccaggcggctgaggagtttctgcggagcctgctgggcagcattagctgccatgtgttgtgcctggagcacccgggcagcgccaggtttctcctgggcccagaagggcagcaccttctccaggggctggaggctcagttccagtgtgtctttgggacagagcgcctggccacagccacgttggacacaggccttgaagaggtggaccctaccgaggccctcccagtgctccctggcaacgcccacaccctgtggaccccagacagtacaggtggtgaccaggaggacgtgagcctggaggaggtccgagaactgctggccaccctggagggcctagacctagacggggaggactggctgcctcgggagctggaggaggaagggcctcaggagcagccagaggaggaggtgaccccagggcatgaggaggaggagcctgtggcccccagcactgtggcacccaggtggctggaggaggaggccgctctgcagctggccctccaccggtcactggagcctcaaggtcaggtggctgagcaggaggaggctgctgccctgcggcaagccctaaccctctccctgctggagcagcccccgttggaggcagaagagcccccagatggggggactgatggcaaggcccagctggtggtgcactcggcctttgagcaggatgtggaggagctggaccgggcgctcagggctgccttggaggtccacgtccaggaggagacggtggggccctggcgccgcacactgcctgcagagctgcgtgctcgcctggagcggtgccatggtgtgagtgttgccctgcgtggtgactgcaccatcctccgtggcttcggggcccaccctgcccgtgctgcccgccacttggtggcacttctggctggcccctgggatcagagtttggcctttcccttggcagcttcaggccctaccttggcggggcagacgctgaaggggccctggaacaacctggagcgtctggcagagaacaccggggagttccaggaggtggtgcgggccttctacgacaccctggacgctgcccgcagcagcatccgcgtcgttcgtgtggagcgcgtgtcgcacccgctgctgcagcagcagtatgagctgtaccgggagcgcctgctgcagcgatgcgagcggcgcccggtggagcaggtgctgtaccacggcacgacggcaccggcagtgcctgacatctgcgcccacggcttcaaccgcagcttctgcggccgcaacgccacggtctacgggaagggcgtgtatttcgccaggcgcgcctccctgtcggtgcaggaccgctactcgccccccaacgccgatggccataaggcggtgttcgtggcacgggtgctgactggcgactacgggcagggccgccgcggtctgcgggcgccccctctgcggggtcctggccacgtgctcctgcgctacgacagcgccgtggactgcatctgccagcccagcatcttcgtcatcttccacgacacccaggcgctgcccacccacctcatcacctgcgagcacgtgccccgcgcttcccccgacgacccctctgggctcccgggccgctccccagacacttaaccgaaggggccaccctctggcctcctgcttcccaggctcccagctccgcacaggctgatgctccccgcccccaactgtggccgcctgagctgtccccggggacgcccctgcctccctctgcgggctccagaaggcggtgtgggggatggcggtcagcagcggccgaggggggccgggctaggtcccagcctgggccgaccccaccaccaggggtcagcagagcccaggaggcgacaccgcccgcccgccgctcccagacctcgcccgagtcggctctgttgtttgaataaacgtgaacgtgaacccaggcggaagggacccgggaactctg

SEQ ID NO: 5557 - protein, 1025 aa, Homo sapiens; identical to SEQ ID NO: 761

SEQ ID NO: 5558 - DNA, 3578 bp, Homo sapiens
gggggcgggggcggcaggccgcgcggcgcagcgggtcagaggcgctcctgggctcgggccggggactcaccggtggccgggcgccgcaggccgggttaggcttgctgaggggcaggcacaggagtcctggctgagctcatggcctgaggctgcctagcggccacggggaatggttgcaatggcggaggcagaggcaggggtggcagtggaggtccgtggactgccccctgccgtgcccgacgagctgctcactctctactttgaaaaccgccgacgctctggagggggacctgtgttgagctggcagagactgggctgtgggggcgtcctcaccttcagagagcctgcagacgccgagagggtcttggcccaggcagatcacgaactacatggtgcccagctgagcctgcggccagctccaccacgagcccctgcacgcctgctgctccaaggactgccccctggcaccacgccccagcgcttggagcagcatgtccaggccttgctgcgggcctcggggctcccagtacagccttgctgtgccttggccagcccccggccagaccgggctctggtccagttgcccaagcccctttctgaggcagatgtccgtgtcctggaggagcaggcccagaatctgggcctggaggggaccttggtgtccctggcccgggttccccaggcccgagcggtgcgtgtggtgggggatggtgcctctgtggacctgctgttgctggagttgtacctggagaatgagcgccgcagtggtggggggcccctggaggacctgcaacgcctacccgggcccctgggcactgttgcctccttccagcagtggcaagtggcagaacgagtgttgcagcaggagcaccggttgcagggctcagagctgagccttgtcccccactacgacatcctggagcccgaggagctggctgagaacaccagtggaggggaccacccgtccacccaggggcctagggctaccaagcatgctctcctgaggaccggagggttggtgacggctctgcagggtgcagggactgtgacaatgggctctggcgaggaaccagggcagtcaggggcctctctgaggacaggtcccatggtgcagggtagagggattatgacaacaggctctggccaggaaccagggcagtcagggacctctctgaggacaggtcccatggggtctctgggacaggcagagcaagtcagctcgatgcccatggggtctctggaacatgaggggctggtaagcctgaggcctgtggggttgcaggaacaggaggggcccatgagcctggggcctgtggggtctgcaggcccagtggagacctctaaggggttgctggggcaggagggcctggtggaaattgccatggactcaccagagcaagaggggctggtgggtcccatggagatcaccatggggtctctggagaaggcagggcctgtgagcccaggatgtgtgaagctggcagggcaggagggcctggtggagatggtgctattgatggagccaggggcgatgcgcttcctgcagctctaccatgaggaccttcttgcgggcctgggagacgtcgctctcttgccacttgaaggaccggatatgactggctttcggctctgtggagcccaggcttcctgccaggcggctgaggagtttctgcggagcctgctgggcagcattagctgccatgtgttgtgcctggagcacccgggcagcgccaggtttctcctgggcccagaagggcagcaccttctccaggggctggaggctcagttccagtgtgtctttgggacagagcgcctggccacagccacgttggacacaggccttgaagaggtggaccctaccgaggccctcccagtgctccctggcaacgcccacaccctgtggaccccagacagtacaggtggtgaccaggaggacgtgagcctggaggaggtccgagaactgctggccaccctggagggcctagacctagacggggaggactggctgcctcgggagctggaggaggaagggcctcaggagcagccagaggaggaggtgaccccagggcatgaggaggaggagcctgtggcccccagcactgtggcacccaggtggctggaggaggaggccgctctgcagctggccctccaccggtcactggagcctcaaggtcaggtggctgagcaggaggaggctgctgccctgcggcaagccctaaccctctccctgctggagcagcccccgttggaggcagaagagcccccagatggggggactgatggcaaggcccagctggtggtgcactcggcctttgagcaggatgtggaggagctggaccgggcgctcagggctgccttggaggtccacgtccaggaggagacggtggggccctggcgccgcacactgcctgcagagctgcgtgctcgcctggagcggtgccatggtgtgagtgttgccctgcgtggtgactgcaccatcctccgtggcttcggggcccaccctgcccgtgctgcccgccacttggtggcacttctggctggcccctgggatcagagtttggcctttcccttggcagcttcaggccctaccttggcggggcagacgctgaaggggccctggaacaacctggagcgtctggcagagaacaccggggagttccaggaggtggtgcgggccttctacgacaccctggacgctgcccgcagcagcatccgcgtcgttcgtgtggagcgcgtgtcgcacccgctgctgcagcagcagtatgagctgtaccgggagcgcctgctgcagcgatgcgagcggcgcccggtggagcaggtgctgtaccacggcacgacggcaccggcagtgcctgacatctgcgcccacggcttcaaccgcagcttctgcggccgcaacgccacggtctacgggaagggcgtgtatttcgccaggcgcgcctccctgtcggtgcaggaccgctactcgccccccaacgccgatggccataaggcggtgttcgtggcacgggtgctgactggcgactacgggcagggccgccgcggtctgcgggcgccccctctgcggggtcctggccacgtgctcctgcgctacgacagcgccgtggactgcatctgccagcccagcatcttcgtcatcttccacgacacccaggcgctgcccacccacctcatcacctgcgagcacgtgccccgcgcttcccccgacgacccctctgggctcccgggccgctccccagacacttaaccgaaggggccaccctctggcctcctgcttcccaggctcccagctccgcacaggctgatgctccccgcccccaactgtggccgcctgagctgtccccggggacgcccctgcctccctctgcgggctccagaaggcggtgtgggggatggcggtcagcagcggccgaggggggccgggctaggtcccagcctgggccgaccccaccaccaggggtcagcagagcccaggaggcgacaccgcccgcccgccgctcccagacctcgcccgagtcggctctgttgtttgaataaacgtgaacgtgaacccaggcggaagggacccgggaactctg

SEQ ID NO: 5559 - protein, 1025 aa, Homo sapiens; identical to SEQ ID NO: 761

SEQ ID NO: 5560 - DNA, 390 bp, Homo sapiens
cagcccccgttggaggcagaagagcccccagatggggggactgatggcaaggcccagctggtggtgcactcggcctttgagcaggatgtggaggagctggaccgggcgtacgggcagggccgccgcggtctgcgggcgccccctctgcggggtcctggccacgtgctcctgcgctacgacagcgccgtggactgcatctgccagcccagcatcttcgtcatcttccacgacacccaggcgctgcccacccacctcatcacctgcgagcacgtgccccgcgcttcccccgacgacccctctgggctcccgggccgctccccagacactcgcccgagtcggctctgttgtttgaataaacgtgaacgtgaacccaggcggaagggacccggg

SEQ ID NO: 5561 - protein, 106 aa, Homo sapiens
MGGLMARPSWWCTRPLSRMWRSWTGRTGRAAAVCGRPLCGVLATCSCATTAPWTASASPASSSSSTTPRRCPPTSSPASTCPALPPTTPLGSRAAPQTLARVGSVV

SEQ ID NO: 5562 - DNA, 1891 bp, Homo sapiens
tggcagaacgagtgttgcagcaggagcaccggttgcagggctcagagctgagccttgtcccccactacgacatcctggagcccgaggagctggctgagaacaccagtggaggggaccacccgtccacccaggggcctagggctaccaagcatgctctcctgaggaccggagggttggtgacggctctgcagggtgcagggactgtgacaatgggctctggcgaggaaccagggcagtcaggggcctctctgaggacaggtcccatggtgcagggtagagggattatgacaacaggctctggccaggaaccagggcagtcagggacctctctgaggacaggtcccatggggtctctgggacaggcagagcaagtcagctcgatgcccatggggtctctggaacatgaggggctggtaagcctgaggcctgtggggttgcaggaacaggaggggcccatgagcctggggcctgtggggtctgcaggcccagtggagacctctaaggggttgctggggcaggagggcctggtggaaattgccatggactcaccagagcaagaggggctggtgggtcccatggagatcaccatggggtctctggagaaggcagggcctgtgagcccaggatgtgtgaagctggcagggcaggagggcctggtggagatggtgctattgatggagccaggggcgatgcgcttcctgcagctctaccatgaggaccttcttgcgggcctgggagacgtcgctctcttgccacttgaaggaccggatatgactggctttcggctctgtggagcccaggcttcctgccaggcggctgaggagtttctgcggagcctgctgggcagcattagctgccatgtgttgtgcctggagcacccgggcagcgccaggtttctcctgggcccagaagggcagcaccttctccaggggctggaggctcagttccagtgtgtctttgggacagagcgcctggccacagccacgttggacacaggccttgaagaggtggaccctaccgaggccctcccagtgctccctggcaacgcccacaccctgtggaccccagacagtacaggtggtgaccaggaggacgtgagcctgggtagggctccctgggagccctcagcacatcctgtggccctcacttgacctcaccccctgccctgctctgtgctcccatctgtctactgacccatcttaggcccaccctgtaccctaaaaacttgctccccatctttcatccattccaactcctcctgggtccagcccctgacccaatggcctctccctgcccccagaggaggtccgagaactgctggccaccctggagggcctagacctagacggggaggactggctgcctcgggagctggaggaggaagggcctcaggagcagccagaggaggaggtgaccccagggcatgaggaggaggagcctgtggcccccagcactgtggcacccaggtggctggaggaggaggccgctctgcagctggccctccaccggtcactggagcctcaaggtcaggtggctgagcaggaggaggctgctgccctgcggcaagccctaaccctctccctgctggagcagcccccgttggaggcagaagagcccccagatggggggactgatggcaaggcccagctggtggtgcactcggcctttgagcaggatgtggaggagctggaccgggcgctcagggctgccttggaggtccacgtccaggaggagacggtggggccctggcgccgcacactgcctgcagagctgcgtgctcgcctggagcggtgccatggtgtgagtgttgccctgcgtggtgactgcaccatcctccgtggcttcggggcccaccctgcccgtgctgcccgccacttggtggcacttctgg

SEQ ID NO: 5563 - protein, 313 aa, Homo sapiens
MGSGEEPGQSGASLRTGPMVQGRGIMTTGSGQEPGQSGTSLRTGPMGSLGQAEQVSSMPMGSLEHEGLVSLRPVGLQEQEGPMSLGPVGSAGPVETSKGLLGQEGLVEIAMDSPEQEGLVGPMEITMGSLEKAGPVSPGCVKLAGQEGLVEMVLLMEPGAMRFLQLYHEDLLAGLGDVALLPLEGPDMTGFRLCGAQASCQAAEEFLRSLLGSISCHVLCLEHPGSARFLLGPEGQHLLQGLEAQFQCVFGTERLATATLDTGLEEVDPTEALPVLPGNAHTLWTPDSTGGDQEDVSLGRAPWEPSAHPVALT

SEQ ID NO: 5564 - DNA, 2122 bp, Homo sapiens
acgccgagagggtcttggcccaggcagatcacgaactacatggtgcccagctgagcctgcggccagctccaccacgagcccctgcacgcctgctgctccaaggactgccccctggcaccacgccccagcgcttggagcagcatgtccaggccttgctgcgggcctcggggctcccagtacagccttgctgtgccttggccagcccccggccagaccgggctctggtccagttgcccaagcccctttctgaggcagatgtccgtgtcctggaggagcaggcccagaatctgggcctggaggggaccttggtgtccctggcccgggttccccaggcccgagcggtgcgtgtggtgggggatggtgcctctgtggacctgctgttgctggagttgtacctggagaatgagcgccgcagtggtggggggcccctggaggacctgcaacgcctacccgggcccctgggcactgttgcctccttccagcagtggcaaggtgagtggggctgggcagacccagccgaccgtccctctcctgcagaaatctgacaggctttctgtcctttcccttcctccaagtggcagaacgagtgttgcagcaggagcaccggttgcagggctcagagctgagccttgtcccccactacgacatcctggagcccgaggagctggctgagaacaccagtggaggggaccacccgtccacccaggggcctagggctaccaagcatgctctcctgaggaccggagggttggtgacggctctgcagggtgcagggactgtgacaatgggctctggcgaggaaccagggcagtcaggggcctctctgaggacaggtcccatggtgcagggtagagggattatgacaacaggctctggccaggaaccagggcagtcagggacctctctgaggacaggtcccatggggtctctgggacaggcagagcaagtcagctcgatgcccatggggtctctggaacatgaggggctggtaagcctgaggcctgtggggttgcaggaacaggaggggcccatgagcctggggcctgtggggtctgcaggcccagtggagacctctaaggggttgctggggcaggagggcctggtggaaattgccatggactcaccagagcaagaggggctggtgggtcccatggagatcaccatggggtctctggagaaggcagggcctgtgagcccaggatgtgtgaagctggcagggcaggagggcctggtggagatggtgctattgatggagccaggggcgatgcgcttcctgcagctctaccatgaggaccttcttgcgggcctgggagacgtcgctctcttgccacttgaaggaccggatatgactggctttcgggtgagtgacccctcaggactcctcaccttcagccccctcctcctactggggactcaaagtacctttcctgtgctctaaacctgcaaactccatctctgcaatggccctgcagctctgtggagcccaggcttcctgccaggcggctgaggagtttctgcggagcctgctgggcagcattagctgccatgtgttgtgcctggagcacccgggcagcgccaggtttctcctgggcccagaagggcagcaccttctccaggggctggaggctcagttccagtgtgtctttgggacagagcgcctggccacagccacgttggacacaggccttgaagaggtagagatggagtcccacccctgccctcccctttctcacgcctctgccccaggcctcctctgcccttgcccagaggctagtggtcctgacatcctctccctacaggtggaccctaccgaggccctcccagtgctccctggcaacgcccacaccctgtggaccccagacagtacaggtggtgaccaggaggacgtgagcctgggtagggctccctgggagccctcagcacatcctgtggccctcacttgacctcaccccctgccctgctctgtgctcccatctgtctactgacccatcttaggcccaccctgtaccctaaaaacttgctccccatctttcatccattccaactcctcctgggtccagcccctgacccaatggcctctccctgcccccagaggaggtccgagaactgctggccaccctgg

SEQ ID NO: 5565 - protein, 176 aa, Homo sapiens
MSRPCCGPRGSQYSLAVPWPAPGQTGLWSSCPSPFLRQMSVSWRSRPRIWAWRGPWCPWPGFPRPERCVWWGMVPLWTCCCWSCTWRMSAAVVGGPWRTCNAYPGPWALLPPSSSGKVSGAGQTQPTVPLLQKSDRLSVLSLPPSGRTSVAAGAPVAGLRAEPCPPLRHPGARGAG

SEQ ID NO: 5566 - DNA, 614 bp, Homo sapiens
cctgctcccagcagggttaggcttgctgaggggcaggcacaggagtcctggctgagctcatggcctgaggctgcctagcggccacggggaatggttgcaatggcggaggcagaggcaggggtggcagtggaggtccgtggactgccccctgccgtgcccgacgagctgctcactctctactttgaaaaccgccgacgctctggagggggacctgtgttgagctggcagagactgggctgtgggggcgtcctcaccttcagagagcctgcagacgccgagagggtcttggcccaggcagatcacgaactacatggtgcccagctgagcctgcggccagctccaccacgagcccctgcacgcctgctgctccaaggactgccccctggcaccacgccccagcgcttggagcagcatgtccaggccttgctgcgggcctcggggctcccagtacagccttgctgtgccttggccagcccccggccagaccgggctctggtccagttgcccaagcccctttctgaggcaggtgagaggcagggttggggttgaggtgctggctaggggggattccctgagctgacctgcacataccccacagatgtccgtgtcctgga

SEQ ID NO: 5567 - protein, 152 aa, Homo sapiens
MVAMAEAEAGVAVEVRGLPPAVPDELLTLYFENRRRSGGGPVLSWQRLGCGGVLTFREPADAERVLAQADHELHGAQLSLRPAPPRAPARLLLQGLPPGTTPQRLEQHVQALLRASGLPVQPCCALASPRPDRALVQLPKPLSEAGERQGWG

SEQ ID NO: 5568 - DNA, 488 bp, Homo sapiens
acttttgttttcctgctcccagcagggttaggcttgctgaggggcaggcacaggagtcctggctgagctcatggcctgaggctgcctagcggccacggggaatggttgcaatggcggaggcagaggcaggggtggcagtggaggtccgtggactgccccctgccgtgcccgacgagctgctcactctctactttgaaaaccgccgacgctctggagggggacctgtgttgagctggcagagactgggctgtgggggcgtcctcaccttcagagagcctgcaggtgagagggctggctgaagggacagcctgggtgccctgatattctaatgcctgacatcctgccccgcccctgcccacagacgccgagagggtcttggcccaggcagatcacgaactacatggtgcccagctgagcctgcggccagctccaccacgagcccctgcacgcctgctgctccaaggactgccccctggcaccacgcccca

SEQ ID NO: 5569 - protein, 65 aa, Homo sapiens
MVAMAEAEAGVAVEVRGLPPAVPDELLTLYFENRRRSGGGPVLSWQRLGCGGVLTFREPAGERAG

SEQ ID NO: 5570 - DNA, 572 bp, Homo sapiens
agcaggcgtgcaggggctcgtggtggagctggccgcaggctcagctgggcaccatgtagttcgtgatctgcctgggccaagaccctctcggcgtctgtgggcaggggcggggcaggatgtcaggcattagaatatcagggcacccaggctgtcccttcagccagccctctcacctgcaggctctctgaaggtgaggacgcccccacagcccagtctctgccagctcaacacaggtccccctccagagcgtcggcggttttcaaagtagagagtgagcagctcgtcgggcacggcagggggcagtccacggacctccactgccacccctgcctctgcctccgccattgcaaccctgggacggggcatcaggtcttgcctgcccattcctgcagctttctgtcctgcctgcacctccccatctcacaccatcattggcatcgtcacaagtaacctcagaaggtgacaaggtaatggctccactgcattccttgctgccgctaatcctcaccacagaaagggaaacggaggtgcagacaggcccatagcagcaccaggcctcaaacctgggcggt

SEQ ID NO: 5571 - protein, 127 aa, Homo sapiens
SAWAKTLSASVGRGGAGCQALEYQGTQAVPSASPLTCRLSEGEDAPTAQSLPAQHRSPSRASAVFKVESEQLVGHGRGQSTDLHCHPCLCLRHCNPGTGHQVLPAHSCSFLSCLHLPISHHHWHRHK

SEQ ID NO: 5572 - DNA, 536 bp, Homo sapiens
cagtccccacttccctcctcactctcttgggagcgaggcctcttaccattgttctggcgtgaggaaaggcctgctgttgcctcaccaagcccactcgtgaacccgctgatgccgagcccgcctgcctgagtcttgatcgctgacttgagctcgtgattctcccgaatgagccgcaccaacttcttcagttcctcattttcccgcaccagcctctctatctgatgccgaagcccttcataattgcagggttaggcttgctgaggggcaggcacaggagtcctggctgagctcatggcctgaggctgcctagcggccacggggaatggttgcaatggcggaggcagaggcaggggtggcagtggaggtccgtggactgccccctgccgtgcccgacgagctgctcactctctactttgaaaaccgccgacgctctggagggggacctgtgttgagctggcagagactgggctgtgggggcgtcctcaccttcagagagcctgcagacgccgagagggtcttggcccaggcagatcacg

SEQ ID NO: 5573 - protein, 70 aa, Homo sapiens
MVAMAEAEAGVAVEVRGLPPAVPDELLTLYFENRRRSGGGPVLSWQRLGCGGVLTFREPADAERVLAQAD

SEQ ID NO: 5574 - DNA, 2182 bp, Homo sapiens
gaagtgaacgtcgggttttaaggccgagaacggacggtcagtcccgggcagcttcagcaaatcccgcatttaggaataaatttcttaactaccgaacggccagtcaaattggccagaccagacttctgcctccaggggtcttcagcgcccaccgcccgaccccacccctcggcagacagtgagaggcgggcctctggccggagcgaagaggaacacgcaaggcggcgcagcgggaggggtccgcggaagccccgcccacctgcccctcccaccccgaagctcgcccggccccgccccctgccccgccccgtcacaaggccccgctgcgtcttccgagccgcaggcgcaggcccagctgagcggccgccgagcgggtgcgggtgcgggcgcatcggccatcaccgcgcggccgcgcagcggacaccgtgcgtaccggcctgcggcgcccggccaccggggcggaccgcggaacccgaggccatgtcccatgaaaagagttttttggtgtctggggacaactatcctccccccaaccctggatatccgggggggccccagccacccatgcccccctatgctcagcctccctaccctggggccccttacccacagccccctttccagccctccccctacggtcagccagggtacccccatggccccagcccctacccccaagggggctacccacagggtccctacccccaagggggctacccacagggcccctacccacaagagggctacccacagggcccctacccccaagggggctacccccaggggccatatccccagagccccttcccccccaacccctatggacagccacaggtcttcccaggacaagaccctgactcaccccagcatggaaactaccaggaggagggtcccccatcctactatgacaaccaggacttccctgccaccaactgggatgacaagagcatccgacaggccttcatccgcaaggtgttcctagtgctgaccttgcagctgtcggtgaccctgtccacggtgtctgtgttcacttttgttgcggaggtgaagggctttgtccgggagaatgtctggacctactatgtctcctatgctgtcttcttcatctctctcatcgtcctcagctgttgtggggacttccggcgaaagcacccctggaaccttgttgcactgtcggtcctgaccgccagcctgtcgtacatggtggggatgatcgccagcttctacaacaccgaggcagtcatcatggccgtgggcatcaccacagccgtctgcttcaccgtcgtcatcttctccatgcagacccgctacgacttcacctcatgcatgggcgtgctcctggtgagcatggtggtgctcttcatcttcgccattctctgcatcttcatccggaaccgcatcctggagatcgtgtacgcctcactgggcgctctgctcttcacctgcttcctcgcagtggacacccagctgctactggggaacaagcagctgtccctgagcccagaagagtatgtgtttgctgcgctgaacctgtacacagacatcatcaacatcttcctgtacatcctcaccatcattggccgcgccaaggagtagccgagctccagctcgctgtgcccgctcaggtggcacggctggcctggaccctgcccctggcacggcagtgccagctgtacttcccctctctcttgtccccaggcacagcctagggaaaaggatgcctctctccaaccctcctgtatgtacactgcagatacttccatttggacccgctgtggccacagcatggcccctttagtcctcccgcccccgccaaggggcaccaaggccacgtttccgtgccacctcctgtctactcattgttgcatgagccctgtctgccagcccaccccagggactgggggcagcaccaggtcccggggagagggattgagccaagaggtgagggtgcacgtcttccctcctgtcccagctccccagcctggcgtagagcacccctcccctcccccccacccccctggagtgctgccctctggggacatgcggagtgggggtcttatccctgtgctgagccctgagggcagagaggatggcatgtttcaggggagggggaagccttcctctcaatttgttgtcagtgaaattccaataaatgggatttgctctctgccttcccctggtc

SEQ ID NO: 5575 - protein, 371 aa, Homo sapiens; identical to SEQ ID NO: 763

SEQ ID NO: 5576 - DNA, 2294 bp, Homo sapiens
gaagtgaacgtcgggttttaaggccgagaacggacggtcagtcccgggcagcttcagcaaatcccgcatttaggaataaatttcttaactaccgaacggccagtcaaattggccagaccagacttctgcctccaggggtcttcagcgcccaccgcccgaccccacccctcggcagacagtgagaggcgggcctctggccggagcgaagaggaacacgcaaggcggcgcagcgggaggggtccgcggaagccccgcccacctgcccctcccaccccgaagctcgcccggccccgccccctgccccgccccgtcacaaggccccgctgcgtcttccgagccgcaggcgcaggcccagctgagcggccgccgagcgggtgcgggtgcgggcgcatcggccatcaccgcgcggccgcgcagcggacaccgtgcgtaccggcctgcggcgcccggccaccggtgagtccccggcccgagcccaggagcgcctctgacccgctgcgccgcgcggcctgccgcccccgcccccgcccccacgcggatcttgcgcatccgagcgtggccgcctcgggggcggaccgcggaacccgaggccatgtcccatgaaaagagttttttggtgtctggggacaactatcctccccccaaccctggatatccgggggggccccagccacccatgcccccctatgctcagcctccctaccctggggccccttacccacagccccctttccagccctccccctacggtcagccagggtacccccatggccccagcccctacccccaagggggctacccacagggtccctacccccaagggggctacccacagggcccctacccacaagagggctacccacagggcccctacccccaagggggctacccccaggggccatatccccagagccccttcccccccaacccctatggacagccacaggtcttcccaggacaagaccctgactcaccccagcatggaaactaccaggaggagggtcccccatcctactatgacaaccaggacttccctgccaccaactgggatgacaagagcatccgacaggccttcatccgcaaggtgttcctagtgctgaccttgcagctgtcggtgaccctgtccacggtgtctgtgttcacttttgttgcggaggtgaagggctttgtccgggagaatgtctggacctactatgtctcctatgctgtcttcttcatctctctcatcgtcctcagctgttgtggggacttccggcgaaagcacccctggaaccttgttgcactgtcggtcctgaccgccagcctgtcgtacatggtggggatgatcgccagcttctacaacaccgaggcagtcatcatggccgtgggcatcaccacagccgtctgcttcaccgtcgtcatcttctccatgcagacccgctacgacttcacctcatgcatgggcgtgctcctggtgagcatggtggtgctcttcatcttcgccattctctgcatcttcatccggaaccgcatcctggagatcgtgtacgcctcactgggcgctctgctcttcacctgcttcctcgcagtggacacccagctgctactggggaacaagcagctgtccctgagcccagaagagtatgtgtttgctgcgctgaacctgtacacagacatcatcaacatcttcctgtacatcctcaccatcattggccgcgccaaggagtagccgagctccagctcgctgtgcccgctcaggtggcacggctggcctggaccctgcccctggcacggcagtgccagctgtacttcccctctctcttgtccccaggcacagcctagggaaaaggatgcctctctccaaccctcctgtatgtacactgcagatacttccatttggacccgctgtggccacagcatggcccctttagtcctcccgcccccgccaaggggcaccaaggccacgtttccgtgccacctcctgtctactcattgttgcatgagccctgtctgccagcccaccccagggactgggggcagcaccaggtcccggggagagggattgagccaagaggtgagggtgcacgtcttccctcctgtcccagctccccagcctggcgtagagcacccctcccctcccccccacccccctggagtgctgccctctggggacatgcggagtgggggtcttatccctgtgctgagccctgagggcagagaggatggcatgtttcaggggagggggaagccttcctctcaatttgttgtcagtgaaattccaataaatgggatttgctctctgccttcccctggtc

SEQ ID NO: 5577 - protein, 371 aa, Homo sapiens; identical to SEQ ID NO: 763

SEQ ID NO: 5578 - DNA, 629 bp, Homo sapiens
gcgtaccggcctgcggcgcccggccaccggggcggaccgcggaacccgaggccatgtcccatgaaaagagttttttggtgtctggggacaactatcctccccccaaccctggatatccgggggggccccagccacccatgcccccctatgctcagcctccctaccctggggccccttacccacagccccctttccagccctccccctacggtcagccagggtacccccatggccccagcccctacccccaagggggctacccacagggtccctacccccaagggggctacccacagggcccctacccacaagagggctacccacagggcccctacccccaagggggctacccccaggggccatatccccagagccccttcccccccaacccctatggacagccacaggtcttcccaggacaagaccctgactgtgagtctcaggaagggaggggtggggtggccgggagggcagggggaggtgcttgtgagtggcgctgacccagcctgtctgcttctcagcaccccagcatggaaactaccaggaggagggtcccccatcctactatgacaaccaggacttccctgccaccaactgggatgacaagagcatccgacaggccttcatcc

SEQ ID NO: 5579 - protein, 169 aa, Homo sapiens
MKRVFWCLGTTILPPTLDIRGGPSHPCPPMLSLPTLGPLTHSPLSSPPPTVSQGTPMAPAPTPKGATHRVPTPKGATHRAPTHKRATHRAPTPKGATPRGHIPRAPSPPTPMDSHRSSQDKTLTVSLRKGGVGWPGGQGEVLVSGADPACLLLSTPAWKLPGGGSPILL

SEQ ID NO: 5580 - DNA, 2016 bp, Homo sapiens
atccgctctcggtgccagtgccacggccgcagcccctacccgcctcgccccacgcccgctttgttccccgcacgccccgtggtcgcttccatcccccacaggcgccgcccgtccggtcctcacgcgcttctccgggcccaggctccggggctccccacagcccggggcaaaggtcacggtcttcccttgcttccccctgggttcccagaagcaggtggagttgcgcagggctgggtcccgacgctgtcgtcaagccaactgttccactgttccttgtctgtcttctctaggggcggaccgcggaacccgaggccatgtcccatgaaaagagttttttggtgtctggggacaactatcctccccccaaccctggatatccgggggggccccagccacccatgcccccctatgctcagcctccctaccctggggccccttacccacagccccctttccagccctccccctacggtcagccagggtacccccatggccccagcccctacccccaagggggctacccacagggtccctacccccaagggggctacccacagggcccctacccacaagagggctacccacagggcccctacccccaagggggctacccccaggggccatatccccagagccccttcccccccaacccctatggacagccacaggtcttcccaggacaagaccctgactcaccccagcatggaaactaccaggaggagggtcccccatcctactatgacaaccaggacttccctgccaccaactgggatgacaagagcatccgacaggccttcatccgcaaggtgttcctagtgctgaccttgcagctgtcggtgaccctgtccacggtgtctgtgttcacttttgttgcggaggtgaagggctttgtccgggagaatgtctggacctactatgtctcctatgctgtcttcttcatctctctcatcgtcctcagctgttgtggggacttccggcgaaagcacccctggaaccttgttgcactgtcggtcctgaccgccagcctgtcgtacatggtggggatgatcgccagcttctacaacaccgaggcagtcatcatggccgtgggcatcaccacagccgtctgcttcaccgtcgtcatcttctccatgcagacccgctacgacttcacctcatgcatgggcgtgctcctggtgagcatggtggtgctcttcatcttcgccattctctgcatcttcatccggaaccgcatcctggagatcgtgtacgcctcactgggcgctctgctcttcacctgcttcctcgcagtggacacccagctgctactggggaacaagcagctgtccctgagcccagaagagtatgtgtttgctgcgctgaacctgtacacagacatcatcaacatcttcctgtacatcctcaccatcattggccgcgccaaggagtagccgagctccagctcgctgtgcccgctcaggtggcacggctggcctggaccctgcccctggcacggcagtgccagctgtacttcccctctctcttgtccccaggcacagcctagggaaaaggatgcctctctccaaccctcctgtatgtacactgcagatacttccatttggacccgctgtggccacagcatggcccctttagtcctcccgcccccgccaaggggcaccaaggccacgtttccgtgccacctcctgtctactcattgttgcatgagccctgtctgccagcccaccccagggactgggggcagcaccaggtcccggggagagggattgagccaagaggtgagggtgcacgtcttccctcctgtcccagctccccagcctggcgtagagcacccctcccctcccccccacccccctggagtgctgccctctggggacatgcggagtgggggtcttatccctgtgctgagccctgagggcagagaggatggcatgtttcaggggagggggaagccttcctctcaatttgttgtcagtgaaattccaataaatgggatttgctctctgccttcccctggtc

SEQ ID NO: 5581 - protein, 371 aa, Homo sapiens; identical to SEQ ID NO: 763

SEQ ID NO: 5582 - DNA, 660 bp, Homo sapiens
gttccactgttccttgtctgtcttctctaggggcggaccgcggaacccgaggccatgtcccatgaaaagagttttttggtgtctggggacaactatcctccccccaaccctggatatccgggggggccccagccacccatgcccccctatgctcagcctccctaccctggggccccttacccacagccccctttccagccctccccctacggtcagccagggtacccccatggccccagcccctacccccaagggggctacccacagggtccctacccccaagggggctacccacagggcccctacccacaagagggctacccacagggcccctacccccaagggggctacccccaggggccatatccccagagccccttcccccccaacccctatggacagccacaggtcttcccaggacaagaccctgactgtgagtctcaggaagggaggggtggggtggccgggagggcagggggaggtgcttgtgagtggcgctgacccagcctgtctgcttctcagcaccccagcatggaaactaccaggaggagggtcccccatcctactatgacaaccaggacttccctgccaccaactgggatgacaagagcatccgacaggccttcatccgcaaggtgttcctagtgctgaccttgcagc

SEQ ID NO: 5583 - protein, 37 aa, Homo sapiens
METTRRRVPHPTMTTRTSLPPTGMTRASDRPSSARCS

SEQ ID NO: 5584 - DNA, 1442 bp, Homo sapiens
atatccgggggggccccagccacccatgcccccctatgctcagcctccctaccctggggccccttacccacagccccctttccagccctccccctacggtcagccagggtacccccatggccccagcccctacccccaagggggctacccacagggtccctacccccaagggggctacccacagggcccctacccacaagagggctacccacagggcccctacccccaagggggctacccccaggggccatatccccagagccccttcccccccaacccctatggacagccacaggtcttcccaggacaagaccctgactcaccccagcatggaaactaccaggaggagggtcccccatcctactatgacaaccaggacttccctgccaccaactgggatgacaagagcatccgacaggccttcatccgcaagtcggtcctgaccgccagcctgtcgtacatggtggggatgatcgccagcttctacaacaccgaggcagtcatcatggccgtgggcatcaccacagccgtctgcttcaccgtcgtcatcttctccatgcagacccgctacgacttcacctcatgcatgggcgtgctcctggtgagcatggtggtgctcttcatcttcgccattctctgcatcttcatccggaaccgcatcctggagatcgtgtacgcctcactgggcgctctgctcttcacctgcttcctcgcagtggacacccagctgctactggggaacaagcagctgtccctgagcccagaagagtatgtgtttgctgcgctgaacctgtacacagacatcatcaacatcttcctgtacatcctcaccatcattggccgcgccaaggagtagccgagctccagctcgctgtgcccgctcaggtggcacggctggcctggaccctgcccctggcacggcagtgccagctgtacttcccctctctcttgtccccaggcacagcctagggaaaaggatgcctctctccaaccctcctgtatgtacactgcagatacttccatttggacccgctgtggccacagcatggcccctttagtcctcccgcccccgccaaggggcaccaaggccacgtttccgtgccacctcctgtctactcattgttgcatgagccctgtctgccagcccaccccagggactgggggcagcaccaggtcccggggagagggattgagccaagaggtgagggtgcacgtcttccctcctgtcccagctccccagcctggcgtagagcacccctcccctcccccccacccccctggagtgctgccctctggggacatgcggagtgggggtcttatccctgtgctgagccctgagggcagagaggatggcatgtttcaggggagggggaagccttcctctcaatttgttgtcagtgaaattccaataaatgggatttgctctctgccttcccctggtc

SEQ ID NO: 5585 - protein, 276 aa, Homo sapiens
MPPYAQPPYPGAPYPQPPFQPSPYGQPGYPHGPSPYPQGGYPQGPYPQGGYPQGPYPQEGYPQGPYPQGGYPQGPYPQSPFPPNPYGQPQVFPGQDPDSPQHGNYQEEGPPSYYDNQDFPATNWDDKSIRQAFIRKSVLTASLSYMVGMIASFYNTEAVIMAVGITTAVCFTVVIFSMQTRYDFTSCMGVLLVSMVVLFIFAILCIFIRNRILEIVYASLGALLFTCFLAVDTQLLLGNKQLSLSPEEYVFAALNLYTDIINIFLYILTIIGRAKE

SEQ ID NO: 5586 - DNA, 481 bp, Homo sapiens
tggacacccagctgctactggggaacaagcagctgtccctgagcccagaagagtatgtgtttgctgcgctgaacctgtacacagacatcatcaacatcttcctgtacatcctcaccatcattggccgcgccaaggagtagccgagctccagctcgctgtgcccgctcaggtggcacggctggcctggaccctgcccctggcacggcagtgccagctgtacttcccctctctcttgtccccaggcacagcctagggaaaaggatgcctctctccaaccctcctgtatgtacactgcagatacttccatttggacccgctgtggccacagcatggcccctttagtcctcccgcccccgccaaggggcaccaaggccacgtttccgtgccacctcctgtctactcattgttgcatgagccctgtctgccaccttcctctcaatttgttgtcagtgaaattccaataaatgggatttgctctctg

SEQ ID NO: 5587 - protein, 59 aa, Homo sapiens
MYTADTSIWTRCGHSMAPLVLPPPPRGTKATFPCHLLSTHCCMSPVCHLPLNLLSVKFQ

SEQ ID NO: 5588 - DNA, 1581 bp, Homo sapiens
agactctgcaccctccttcagcccaggcaaggcctggggccctgggcagcctccaggtgcagtgccctcccgtgggccgcacccttgccactgccccagggcatgtctctactcaccaattatgaagggcttcggcatcagatagagaggctggtgcgggaaaatgaggaactgaagaagttggtgcggctcattcgggagaatcacgagctcaagtcagcgatcaagactcaggcaggcgggctcggcatcagcgggttcacgagtgggcttggtgaggcaacagcaggcctttcctcacgccagaacaatggtgtcttcctgcccccgtccccagcagtggcaaacgaacgagtcctcgaagaagtggggatcatggccttggcacccctggccgagatgctaaccagcttgcagcccagcgccacaccgggctcactcatgagccccctgacaggcaccctcagcacgctgctgtctggcccagcacccacgtcacagagcagccccctcaccagcttcctgaccagtcccattgcgggacccctaacaggcacactggccagttccctgggcctgccctccactggcaccctgactcccagcagcctcgtggcaggccctgtggccatgtcccagagcagccccctgatagcccctgtgatgggcacggtggctgtctctctgagcagccccctcctcagctccactgccaccccaccaggggtctctcagaacctgctggccaaccccatgagcaacctggtcctgccagaggccccaaggctgcggctggctgagccactccgcggaggccccactgggccccagtccccagcttgcgtggtacccactgccaccaccaaagtcccactctccactgagcccccccagtcgacccaggacccagagcctctcagcatggcgtttgcaggagcacccctccagacctccacccctatcggagccatgggcacacctgctcccaagacggccttctccttcaacacttcggacacacaggcccagcccagtgccgcccaggaacaagtggttgccaccagctacacaccctcaagcaccacccacatcgcccagggtgccccccatcccccttcccgaatgcataattccccaacccagaacctgcctgtcccccactgtcctccacacaacgcccactccccacctcgtacctcatcctccccggcttcagtcaatgactctcgaggtccacgcaccacagaaccgtcgacgaagagcatgatggaggtggaacggaagctggcccaccgcaagaccagcaagttccccgagaacccccgagagtcgaagcagctggcctgggagaggctggtgggtgagattgccttccagctggaccgcaggatcctgtccagcatcttcccagagcgcgtacggctctacggcttcactgtctccaacatcccagagaagatcatccagtgggagcccacggtctcctcagaggaaggcgaggtgggggttttcagcatggtcgggcggctctccccctttgccaccaggatggcctcctctgtggacgcacttggaggatga

SEQ ID NO: 5589 - protein, 492 aa, Homo sapiens
MSLLTNYEGLRHQIERLVRENEELKKLVRLIRENHELKSAIKTQAGGLGISGFTSGLGEATAGLSSRQNNGVFLPPSPAVANERVLEEVGIMALAPLAEMLTSLQPSATPGSLMSPLTGTLSTLLSGPAPTSQSSPLTSFLTSPIAGPLTGTLASSLGLPSTGTLTPSSLVAGPVAMSQSSPLIAPVMGTVAVSLSSPLLSSTATPPGVSQNLLANPMSNLVLPEAPRLRLAEPLRGGPTGPQSPACVVPTATTKVPLSTEPPQSTQDPEPLSMAFAGAPLQTSTPIGAMGTPAPKTAFSFNTSDTQAQPSAAQEQVVATSYTPSSTTHIAQGAPHPPSRMHNSPTQNLPVPHCPPHNAHSPPRTSSSPASVNDSRGPRTTEPSTKSMMEVERKLAHRKTSKFPENPRESKQLAWERLVGEIAFQLDRRILSSIFPERVRLYGFTVSNIPEKIIQWEPTVSSEEGEVGVFSMVGRLSPFATRMASSVDALGG

SEQ ID NO: 5590 - DNA, 1954 bp, Homo sapiens
agactctgcaccctccttcagcccaggcaaggcctggggccctgggcagcctccaggtgcagtgccctcccgtgggccgcacccttgccactgccccagggcatgtctctactcaccaattatgaagggcttcggcatcagatagagaggctggtgcgggaaaatgaggaactgaagaagttggtgcggctcattcgggagaatcacgagctcaagtcagcgatcaagactcaggcaggcgggctcggcatcagcgggttcacgagtgggcttggtgaggcaacagcaggcctttcctcacgccagaacaatggtgtcttcctgcccccgtccccagcagtggcaaacgaacgagtcctcgaagaagtggggatcatggccttggcacccctggccgagatgctaaccagcttgcagcccagcgccacaccgggctcactcatgagccccctgacaggcaccctcagcacgctgctgtctggcccagcacccacgtcacagagcagccccctcaccagcttcctgaccagtcccattgcgggacccctaacaggcacactggccagttccctgggcctgccctccactggcaccctgactcccagcagcctcgtggcaggccctgtggccatgtcccagagcagccccctgatagcccctgtgatgggcacggtggctgtctctctgagcagccccctcctcagctccactgccaccccaccaggggtctctcagaacctgctggccaaccccatgagcaacctggtcctgccagaggccccaaggctgcggctggctgagccactccgcggaggccccactgggccccagtccccagcttgcgtggtacccactgccaccaccaaagtcccactctccactgagcccccccagtcgacccaggacccagagcctctcagcatggcgtttgcaggagcacccctccagacctccacccctatcggagccatgggcacacctgctcccaagacggccttctccttcaacacttcggacacacaggcccagcccagtgccgcccaggaacaagtggtccctgcatctgtccccacctcccccaccacctcccccacggtcaccgtccttgcctctgcccccgcccttgccccccaggttgccaccagctacacaccctcaagcaccacccacatcgcccagggtgccccccatcccccttcccgaatgcataattccccaacccagaacctgcctgtcccccactgtcctccacacaacgcccactccccacctcgtacctcatcctccccggcttcagtcaatgactctcgaggtccacgcaccacagaaccgtcgacgaagagcatgatggaggtggaacggaagctggcccaccgcaagaccagcaagttccccgagaacccccgagagtcgaagcagctggcctgggagaggctggtgggtgagattgccttccagctggaccgcaggatcctgtccagcatcttcccagagcgcgtacggctctacggcttcactgtctccaacatcccagagaagatcatccaggcttccctgaaccccagtgaccacaagctggatgagaagctgtgccagaggctcacacagcgctatgtgagcgtcatgaacaggctgcagagtctgggctacaacgggcgggtgcaccctgcgctgaccgagcagctggtgaacgcttatggcatcctgcgagagcgcccggagctggcggcgtctgagggcggcccctacaccgtggacttcctgcagcgtgtggtggtggagaccgtgcaccccggcatgctcgccgacgcgctgctgctgctctcctgcctcagccagctggcgcacgatgacggcaagcccatgttcatctggtgacgctggagctgggaggtccaggctcgctcagccccacagccctgtgcacggccattaaagcttcccacagacactg

SEQ ID NO: 5591 - protein, 591 aa, Homo sapiens
MSLLTNYEGLRHQIERLVRENEELKKLVRLIRENHELKSAIKTQAGGLGISGFTSGLGEATAGLSSRQNNGVFLPPSPAVANERVLEEVGIMALAPLAEMLTSLQPSATPGSLMSPLTGTLSTLLSGPAPTSQSSPLTSFLTSPIAGPLTGTLASSLGLPSTGTLTPSSLVAGPVAMSQSSPLIAPVMGTVAVSLSSPLLSSTATPPGVSQNLLANPMSNLVLPEAPRLRLAEPLRGGPTGPQSPACVVPTATTKVPLSTEPPQSTQDPEPLSMAFAGAPLQTSTPIGAMGTPAPKTAFSFNTSDTQAQPSAAQEQVVPASVPTSPTTSPTVTVLASAPALAPQVATSYTPSSTTHIAQGAPHPPSRMHNSPTQNLPVPHCPPHNAHSPPRTSSSPASVNDSRGPRTTEPSTKSMMEVERKLAHRKTSKFPENPRESKQLAWERLVGEIAFQLDRRILSSIFPERVRLYGFTVSNIPEKIIQASLNPSDHKLDEKLCQRLTQRYVSVMNRLQSLGYNGRVHPALTEQLVNAYGILRERPELAASEGGPYTVDFLQRVVVETVHPGMLADALLLLSCLSQLAHDDGKPMFIW

SEQ ID NO: 5592 - DNA, 2035 bp, Homo sapiens
agactctgcaccctccttcagcccaggcaaggcctggggccctgggcagcctccaggtgcagtgccctcccgtgggccgcacccttgccactgccccagggcatgtctctactcaccaattatgaagggcttcggcatcagatagagaggctggtgcgggaaaatgaggaactgaagaagttggtgcggctcattcgggagaatcacgagctcaagtcagcgatcaagactcaggcaggcgggctcggcatcagcgggttcacgagtgggcttggtgaggcaacagcaggcctttcctcacgccagaacaatggtgtcttcctgcccccgtccccagcagtggcaaacgaacgagtcctcgaagaagtggggatcatggccttggcacccctggccgagatgctaaccagcttgcagcccagcgccacaccgggctcactcatgagccccctgacaggcaccctcagcacgctgctgtctggcccagcacccacgtcacagagcagccccctcaccagcttcctgaccagtcccattgcgggacccctaacaggcacactggccagttccctgggcctgccctccactggcaccctgactcccagcagcctcgtggcaggccctgtggccatgtcccagagcagccccctgatagcccctgtgatgggcacggtggctgtctctctgagcagccccctcctcagctccactgccaccccaccaggggtctctcagaacctgctggccaaccccatgagcaacctggtcctgccagaggccccaaggctgcggctggctgagccactccgcggaggccccactgggccccagtccccagcttgcgtggtacccactgccaccaccaaagtcccactctccactgagcccccccagtcgacccaggacccagagcctctcagcatggcgtttgcaggagcacccctccagacctccacccctatcggagccatgggcacacctgctcccaagacggccttctccttcaacacttcggacacacaggcccagcccagtgccgcccaggaacaagtggtccctgcatctgtccccacctcccccaccacctcccccacggtcaccgtccttgcctctgcccccgcccttgccccccaggttgccaccagctacacaccctcaagcaccacccacatcgcccagggtgccccccatcccccttcccgaatgcataattccccaacccagaacctgcctgtcccccactgtcctccacacaacgcccactccccacctcgtacctcatcctccccggcttcagtcaatgactctcgaggtccacgcaccacagaaccgtcgacgaagagcatgatggaggtggaacggaagctggcccaccgcaagaccagcaagttccccgagaacccccgagagtcgaagcagctggcctgggagaggctggtgggtgagattgccttccagctggaccgcaggatcctgtccagcatcttcccagagcgcgtacggctctacggcttcactgtctccaacatcccagagaagatcatccaggcttccctgaaccccagtgaccacaagctggatgagaagctgtgccagaggctcacacagcgctatgtgagcgtcatgaacaggctgcagagtctgggctacaacgggcgggtgcaccctgcgctgaccgagcagctggtgaacgcttatggcatcctgcgagagcgcccggagctggcggcgtctgagggcggcccctacaccgtggacttcctgcagcgtgtggtggtggagaccgtgcaccccggcatgctcgccgacgcgctgctgctgctctcctgcctcagccagctggcgcacgatgacggcaagcccatgttcatctggtgacgctggagctgggaggtccaggctcgctcagccccacagccctgtgcacggccattaaagcttcccacagacactggtcgctgggcctgtgccagcgctcctgggtggtgctgcctcctctggggtggctcaccgggccccggcaccgtgccccttc

SEQ ID NO: 5593 - protein, 591 aa, Homo sapiens; identical to SEQ ID NO: 5591

SEQ ID NO: 5594 - DNA, 629 bp, Homo sapiens
cttcagcccaggcaaggcctggggccctgggcagcctccaggtgcagtgccctcccgtgggccgcacccttgccactgccccagggcatgtctctactcaccaattatgaagggcttctggcaaacgaacgagtcctcgaagaagtggggatcatggccttggcacccctggccgagatgctaaccagcttgcagcccagcgccacaccgggctcactcatgagccccctgacaggcaccctcagcacgctgctgtctggcccagcacccacgtcacagagcagccccctcaccagcttcctgaccagtcccattgcgggacccctaacaggcacactggccagttccctgggcctgccctccactggcaccctgactcccagcagcctcgtggcaggccctgtggccatgtcccagagcagccccctgatagcccctgtgatgggcacggtggctgtctctctgagcagccccctcctcagctccactgccaccccaccaggggtctctcagaacctgctggccaaccccatgagcaacctggtcctgccagaggccccaaggctgcggctggctgagccactccgcggaggccccactgggccccagtccccagcttgcgtggtacc

SEQ ID NO: 5595 - protein, 179 aa, Homo sapiens
MSLLTNYEGLLANERVLEEVGIMALAPLAEMLTSLQPSATPGSLMSPLTGTLSTLLSGPAPTSQSSPLTSFLTSPIAGPLTGTLASSLGLPSTGTLTPSSLVAGPVAMSQSSPLIAPVMGTVAVSLSSPLLSSTATPPGVSQNLLANPMSNLVLPEAPRLRLAEPLRGGPTGPQSPACV

SEQ ID NO: 5596 - DNA, 777 bp, Homo sapiens
agggtgccccccatcccccttcccgaatgcataattccccaacccagaacctgcctgtcccccactgtcctccacacaacgcccactccccacctcgtacctcatcctccccggcttcagtcaatgactctcgaggtccacgcaccacagaaccgtcgacgaagagcatgatggaggtggaacggaagctggcccaccgcaagaccagcaagttccccgagaacccccgagagtcgaagcagctggcctgggagaggctggtgggtgagattgccttccagctggaccgcaggatcctgtccagcatcttcccagagcgcgtacggctctacggcttcactgtctccaacatcccagagaagatcatccaggcttccctgaaccccagtgaccacaagctggatgagaagctgtgccagaggctcacacagcgctatgtgagcgtcatgaacaggctgcagagtctgggctacaacgggcgggtgcaccctgcgctgaccgagcagctggtgaacgcttatggcatcctgcgagagcgcccggagctggcggcgtctgagggcggcccctacaccgtggacttcctgcagcgtgtggtggtggagaccgtgcaccccggcatgctcgccgacgcgctgctgctgctctcctgcctcagccagctggcgcacgatgacggcaagcccatgttcatctggtgacgctggagctgggaggtccaggctcgctcagccccacagccctgtgcacggccattaaagcttcccacagacactg

SEQ ID NO: 5597 - protein, 224 aa, Homo sapiens
MHNSPTQNLPVPHCPPHNAHSPPRTSSSPASVNDSRGPRTTEPSTKSMMEVERKLAHRKTSKFPENPRESKQLAWERLVGEIAFQLDRRILSSIFPERVRLYGFTVSNIPEKIIQASLNPSDHKLDEKLCQRLTQRYVSVMNRLQSLGYNGRVHPALTEQLVNAYGILRERPELAASEGGPYTVDFLQRVVVETVHPGMLADALLLLSCLSQLAHDDGKPMFIW

SEQ ID NO: 5598 - DNA, 594 bp, Homo sapiens
ccagaacctgcctgtcccccactgtcctccacacaacgcccactccccacctcgtacctcatcctccccggcttcagtcaatgactctcgaggtccacgcaccacagaaccgtcgacgaagagcatgatggaggtggaacggaagctggcccaccgcaagaccagcaagttccccgagaacccccgaggcttccctgaaccccagtgaccacaagctggatgagaagctgtgccagaggctcacacagcgctatgtgagcgtcatgaacaggctgcagagtctgggctacaacgggcgggtgcaccctgcgctgaccgagcagctggtgaacgcttatggcatcctgcgagagcgcccggagctggcggcgtctgagggcggcccctacaccgtggacttcctgcagcgtgtggtggtggagaccgtgcaccccggcatgctcgccgacgcgctgctgctgctctcctgcctcagccagctggcgcacgatgacggcaagcccatgttcatctggtgacgctggagctgggaggtccaggctcgctcagccccacagccctgtgcacggccattaaagcttcccacagacactg

SEQ ID NO: 5599 - protein, 84 aa, Homo sapiens [sequence omitted]

SEQ ID NO: 5600 - DNA, 418 bp, Homo sapiens
atggaggccagggcttccctgaaccccagtgaccacaagctggatgagaagctgtgccagaggctcacacagcgctatgtgagcgtcatgaacaggctgcagagtctgggctacaacgggcgggtgcaccctgcgctgaccgagcagctggtgaacgcttatggcatcctgcgagagcgcccggagctggcggcgtctgagggcggcccctacaccgtggacttcctgcagcgtgtggtggtggagaccgtgcaccccggcatgctcgccgacgcgctgctgctgctctcctgcctcagccagctggcgcacgatgacggcaagcccatgttcatctggtgacgctggagctgggaggtccaggctcgctcagccccacagccctgtgcacggccattaaagcttcccacagacactg

SEQ ID NO: 5601 - protein, 113 aa, Homo sapiens
MEARASLNPSDHKLDEKLCQRLTQRYVSVMNRLQSLGYNGRVHPALTEQLVNAYGILRERPELAASEGGPYTVDFLQRVVVETVHPGMLADALLLLSCLSQLAHDDGKPMFIW

SEQ ID NO: 5602 - DNA, 861 bp, Homo sapiens
atggcagaaggcaacagtggacccacagggtctgagttccaatgggaatctttcagcaaccagcaaggagtccggggctggagagggctgtgccacgcggccttcacccctgtgactccccgcagctcgcgcggatgcaccgacgagtcagcttgtcctctggaagccaatgagtctccccggcgccccgtggccgaagagctaggtgtttggcgccgccccttctgctaccgctcccctccgctgtgctgggcgccgcccgcgctctggcgcccgcctgccgaacccgggcgctgcttcgtcttcctcaccgccaatctgtgcctgctccccgacgggcaagcgcgcttcggcaacctaccgcacagccagcgaccggccgaggccattggcgccgcgcggcccgcgctctacagggctacggactgcagccagccgtggtccagggcgccgcgcgggacgctggtggcctcgctgcccgtgggtctggactttgtgtgcctgcaggaggtattcgatctgcgcagggctcgtcgcttggtgaatcgcctggcgcccaacctgggcccgttgctgtacgacgtgggcacgctcggcctacagcccgggcggcacctcaagctgctggacagcgggctgctgctggcctcgcgctacccgctgctgcgcgccaccttccgttgcttcccccacgcacgtggcgaggacgcgctggcctccaagggactaccgtccgcacaggcgaggctgggcagcctggacgggcgccgcatcgtgggattcctgcactgcacgcatttgcaagcactggctggtgagccctgcggatgggtcctcggaacaggtcccgcctctccatag

SEQ ID NO: 5603 - protein, 286 aa, Homo sapiens
MAEGNSGPTGSEFQWESFSNQQGVRGWRGLCHAAFTPVTPRSSRGCTDESACPLEANESPRRPVAEELGVWRRPFCYRSPPLCWAPPALWRPPAEPGRCFVFLTANLCLLPDGQARFGNLPHSQRPAEAIGAARPALYRATDCSQPWSRAPRGTLVASLPVGLDFVCLQEVFDLRRARRLVNRLAPNLGPLLYDVGTLGLQPGRHLKLLDSGLLLASRYPLLRATFRCFPHARGEDALASKGLPSAQARLGSLDGRRIVGFLHCTHLQALAGEPCGWVLGTGPASP

SEQ ID NO: 5604 - DNA, 1830 bp, Homo sapiens
atgcaatccccgcccgactggtccccggcgaccgacgccccgcggccctcgcccttcccgcccccggcgctgcacgccctccacggcttggcccgcgcgctgctgttcccggcctactgggtttggcgccgccccttctgctaccgctcccctccgctgtgctgggcgccgcccgcgctctggcgcccgcctgccgaacccgggcgctgcttcgtcttcctcaccgccaatctgtgcctgctccccgacgggcaagcgcgcttcggcaacctaccgcacagccagcgaccggccgaggccattggcgccgcgcggcccgcgctctacagggctacggactgcagccagccgtggtccagggcgccgcgcgggacgctggtggcctcgctgcccgtgggtctggactttgtgtgcctgcaggaggtattcgatctgcgcagggctcgtcgcttggtgaatcgcctggcgcccaacctgggcccgttgctgtacgacgtgggcacgctcggcctacagcccgggcggcacctcaagctgctggacagcgggctgctgctggcctcgcgctacccgctgctgcgcgccaccttccgttgcttcccccacgcacgtggcgaggacgcgctggcctccaagggactaccgtccgcacaggtactggcctatccggtgcagcccgcagagggggcgggggttcggccgagaaggcggagaaagctggagccgtccgtggtgttgcaggcgaggctgggcagcctggacgggcgccgcatcgtgggattcctgcactgcacgcatttgcaagcactggctgaagacgggcccttgcgcagcaaacagctgacgccgctgctggactgggccgagaagtttggggccgagaagtttgaggccgacagagaacaaagtggagaggtcgtggctttcagcgtgctcctgggcgacctaaacttcgataactgctggaaagaccaccggctagagcaggagcacgagctcttccgctgtttccaggatccctgccggctgggcacgcgccaaaagcagccctgggccctggggaccgcgctgagcacctccgtgctccaccagtccatggcctcctcccccaagatgccgaggcgggccctggagcaggagaaagggcgccacctctacctggccggccttcccggcagaagccgccgagctaagccctggagaggtcggcgcctggactacatcacgtaccgcggagttcccgggtggctgggcctgcggcactgggacgaccctcaacctgactcccgcccccaggaggtggagcaggtgacgttcagtaccgccctggaggggctcacggaccaccgggcagtgcgcctgcagctccgagtctcagtgtcctcctaaggcaagcacagatgaggggcgcgcggctggcgcgcacagacacgactcggagcacgaactaggcgccgtagctgcgtccccagaaccgggagacttaaggcatctttattgcgggatcctcacacggcctcctgggcccggcgatactcatagacgctgccgtgctcgggaaaggccagtgcttgcgggggcgaccccggcggtggggcggggtcctccgggtccccatagccaccgccgccgggcgtgtggagacagaacacatcctgttggcgcgggggggggcggggaggcgggctcagtgcaggcgtggcccctccctgtcacctgcgcagtcccctccccaccgggcagcgtccatcacccgcccccatggaccacggaggcccggtacgcgccccctttccttccggggccaaattaaactcggcctctggtcag

SEQ ID NO: 5605 - protein, 462 aa, Homo sapiens
MQSPPDWSPATDAPRPSPFPPPALHALHGLARALLFPAYWVWRRPFCYRSPPLCWAPPALWRPPAEPGRCFVFLTANLCLLPDGQARFGNLPHSQRPAEAIGAARPALYRATDCSQPWSRAPRGTLVASLPVGLDFVCLQEVFDLRRARRLVNRLAPNLGPLLYDVGTLGLQPGRHLKLLDSGLLLASRYPLLRATFRCFPHARGEDALASKGLPSAQVLAYPVQPAEGAGVRPRRRRKLEPSVVLQARLGSLDGRRIVGFLHCTHLQALAEDGPLRSKQLTPLLDWAEKFGAEKFEADREQSGEVVAFSVLLGDLNFDNCWKDHRLEQEHELFRCFQDPCRLGTRQKQPWALGTALSTSVLHQSMASSPKMPRRALEQEKGRHLYLAGLPGRSRRAKPWRGRRLDYITYRGVPGWLGLRHWDDPQPDSRPQEVEQVTFSTALEGLTDHRAVRLQLRVSVSS

SEQ ID NO: 5606 - DNA, 935 bp, Homo sapiens
ctagagcaggagcacgagctcttccgctgtttccaggatccctgccggctgggcacgcgccaaaagcagccctgggccctggggaccgcgctgagcacctccgtgctccaccagtccatggcctcctcccccaagatgccgaggcggtgagttgcgacctggatgtaggcactgcccgcccgaagcgcgcggaggggccctggccttgatgacaccgcccccctaccagggccctggagcaggagaaagggcgccacctctacctggccggccttcccggcagaagccgccgagctaagccctggagaggtcggcgcctggactacatcacgtaccgcggagttcccgggtggctgggcctgcggcactgggacgaccctcaacctgactcccgcccccaggaggtggagcaggtgacgttcagtaccgccctggaggggctcacggaccaccgggcagtgcgcctgcagctccgagtctcagtgtcctcctaaggcaagcacagatgaggggcgcgcggctggcgcgcacagacacgactcggagcacgaactaggcgccgtagctgcgtccccagaaccgggagacttaaggcatctttattgcgggatcctcacacggcctcctgggcccggcgatactcatagacgctgccgtgctcgggaaaggccagtgcttgcgggggcgaccccggcggtggggcggggtcctccgggtccccatagccaccgccgccgggcgtgtggagacagaacacatcctgttggcgcgggggggggcggggaggcgggctcagtgcaggcgtggcccctccctgtcacctgcgcagtcccctccccaccgggcagcgtccatcacccgcccccatggaccacggaggcccggtacgcgccccctttccttccggggccaaattaaactcggcctctggtcag

SEQ ID NO: 5607 - protein, 68 aa, Homo sapiens
RAGARALPLFPGSLPAGHAPKAALGPGDRAEHLRAPPVHGLLPQDAEAVSCDLDVGTARPKRAEGPWP

SEQ ID NO: 5608 - DNA, 451 bp, Homo sapiens
accaacacacgcatcaccgaccctgagatcctggagagccggtgagcggcgcggcgacggcgtcacccgcgagctgctctttcgtgaggaggcgctgctgtcagtgctgaccgagcgccgcgccttccggccatacgggctccacgggggcgagcctggcgcccgcggcctaaacctgctgatccgcaaaaacggccggacggtgaatctgggcggcaagacgtcggtgaccgtgtaccccggggatgtgttctgtctccacacgcccggcggcggtggctatggggacccggaggaccccgccccaccgccggggtcgcccccgcaagcactggcctttcccgagcacggcagcgtctatgagtatcgccgggcccaggaggccgtgtgaggatcccgcaataaagatgccttaagtctcccggttctggggacgcagctacggcgccta

SEQ ID NO: 5609 - protein, 56 aa, Homo sapiens
MCSVSTRPAAVAMGTRRTPPHRRGRPRKHWPFPSTAASMSIAGPRRPCEDPAIKMP

SEQ ID NO: 5610 - DNA, 3964 bp, Homo sapiens
gctgaagagctcctgtgggactccagccccaccaccatgggcagccccgagggccgcttccactttgccatcgaccgtgggggtaccttcacagacgtctttgcccagtgcccaggggggcacgtgcgggtcttaaaactgctctcagaggaccctgccaactatgcggacgcgccaaccgaaggcatccgccgcatcctggagcaggaggccggcatgctcctgccccgggaccagccgctggactccagtcatatcgccagcatccgcatgggcaccacagtggccaccaacgcactgctggagcggaagggggagcgggtggcgctgctggtgacacgtggcttccgagacctgctgcacattggcacccaagcccgtggggacctctttgacctggccgtgcccatgcctgaggtgctgtatgaagaggtgctggaggtggacgaacgcgtggtgctgcaccgtggagaggcgggcaccgggacgcctgtgaaaggccgcacgggggacctgctggaagtgcagcagcctgtggacctgggggccctgcgtgggaagctggaggggctgctatctcgaggcatccgcagcctggctgtggtgctcatgcactcgtacacgtgggcccagcatgagcagcaggtgggtgtgctggcccgggagctgggcttcacgcacgtgtcactgtcctcggaggccatgcccatggtgcgcatcgtccctcgggggcacacggcctgtgccgacgcctacctcacgcccgccatccagcgctacgtgcagggcttctgccgtggcttccagggccaactcaaggatgtgcaggtgttgttcatgcgctccgatggcggcctggcgcccatggacaccttcagcggctccagtgctgtgctctcgggcccggccggcggcgtggtgggctactcagccaccacctaccagcaggagggtggccagcctgtcatcggctttgacatgggaggcacgtccacggatgtgagccgctatgctggggaattcgagcacgtcttcgaggccagcacagctggcgtcaccctccaggccccgcagctggacatcaacaccgtggcagcgggagggggttcccgcctcttcttcaggtctggcctctttgtggttgggcccgagtcagcaggagcccacccaggacccgcctgctaccgcaaagggggccctgtgacagtgacggatgctaatctggtcctgggtcgcctgctgcctgcctccttcccctgcatttttgggccgggagagaaccaaccactttcccctgaggcctcccgcaaagccctggaggctgtggccactgaggtcaacagcttcctgaccaacgggccctgcccggcctccccgctgagcctggaggaggtggccatggggttcgtgcgcgtggccaacgaggccatgtgccggcccatccgtgcactcacgcaggcaagaggccatgacccctcagcccatgtgctggcctgctttgggggagctggtgggcagcatgcatgtgccatcgcccgggccctgggcatggacacggtgcacatccacaggcacagtgggctgctgtcggccctggggctggccctggctgacgtggtgcatgaggcacaggaaccctgctccctgctctacgcgcctgagaccttcgtgcagctggaccagaggctgagccgcctggaggagcagtgtgtggatgctctgcaggcccagggcttccccaggtcccagatcagcactgagagcttcctgcacctgcgctaccagggcacggactgtgctctgatggtgtctgcccaccagcacccagccacagcccgctcgccccgtgcgggggacttcggggcagcctttgtggagcggtacatgagggagtttggctttgtcatacctgagcggccggtggtcgtggacgatgtgcgagtgcggggcaccggccgcagtggtcttcgcctcgaggatgcccccaaagcccagaccgggcctccccgggtggacaagatgacccagtgctactttgaggggggctaccaggagacccctgtgtacctgctggcagagctgggctatgggcacaagctccatgggccctgcctcatcatcgacagtaacagcaccatcctggtggagccaggttgccaggcagaggtgaccaagacaggggacatctgcatctccgtgggggccgaagtccccggcacagtgggcccccagctggaccctatccagctgtccatcttctcacaccgcttcatgagcattgctgagcagatgggccgcatcctgcagcgcacagccatctccaccaacatcaaggagcgtctggacttctcctgtgccctctttgggcccgatggggggctggtgtccaatgccccccacatccctgtgcacctgggtgccatgcaggagacggtgcagttccagattcagcacctgggggccgatctccaccctggcgacgtgctactgagcaaccatcccagtgccgggggcagccacctgccagacctgactgttatcacaccggtgttttggccgggtcagacgcggcctgtgttctatgtggccagccgagggcaccacgcagacatcgggggcatcacaccaggctccatgcccccccactccaccatgctgcaacaggagggtgccgtctttctgtccttcaaacttgtccaggggggcgtcttccaggaggaggcggtgacggaggccctgcgggcgccaggcaaggtccccaactgcagcggaaccagaaacctgcacgacaacctgtcggacctccgtgcccaggtggcagccaaccagaagggcatccagctggtgggggagctcattgggcagtacggcctggacgtggtgcaggcctacatgggccatattcaggcaaacgctgagctggccgtgcgagacatgttgcgtgcctttggaacctcccggcaggcccggggcctgcccctggaggtgtcctcggaagaccacatggacgacggttcccccatccgcctccgtgtgcagatcagcctgagtcagggcagcgccgtgtttgacttcagcggcactgggccggaggtgtttggtaatctcaacgcaccgcgggccgtaaccctgtccgccctcatctactgcctgcgctgtctggtgggccgcgacatcccactcaaccagggctgcctggcgccagtgcgcgtggtcattccccgaggctccatcctggacccgtcgcccgaggcggcggtggtgggcggcaacgtgctcacgtcgcagcgcgtggtggatgtcatcctgggggcctttggggcctgcgccgcctcccagggctgcatgaacaacgtgaccctgggcaacgcccacatgggctactacgagacggtggcgggcggcgcgggcgcgggtcccagctggcacgggcgcagcggtgtgcacagccacatgaccaacacacgcatcaccgaccctgagatcctggagagccggtacccggtcatcctgcgccgcttcgagctgcggcggggggctcggggggcagaggccgcttccgaggcggcgacggcgtcacccgcgagctgctctttcgtgaggaggcgctgctgtcagtgctgaccgagcgccgcgccttccggccatacgggctccacgggggcgagcctggcgcccgcggcctaaacctgctgatccgcaaaaacggccggacggtgaatctgggcggcaagacgtcggtgaccgtgtaccccggggatgtgttctgtctccacacgcccggcggcggtggctatggggacccggaggaccccgccccaccgccggggtcgcccccgcaagcactggcctttcccgagcacggcagcgtctatgagtatcgccgggcccaggaggccgtgtgaggatcccgcaataaagatgccttaagtctcccggttctggggacgcagctacggcgcct

SEQ ID NO: 5611 - protein, 1195 aa, Homo sapiens
MGSPEGRFHFAIDRGGTFTDVFAQCPGGHVRVLKLLSEDPANYADAPTEGIRRILEQEAGMLLPRDQPLDSSHIASIRMGTTVATNALLERKGERVALLVTRGFRDLLHIGTQARGDLFDLAVPMPEVLYEEVLEVDERVVLHRGEAGTGTPVKGRTGDLLEVQQPVDLGALRGKLEGLLSRGIRSLAVVLMHSYTWAQHEQQVGVLARELGFTHVSLSSEAMPMVRIVPRGHTACADAYLTPAIQRYVQGFCRGFQGQLKDVQVLFMRSDGGLAPMDTFSGSSAVLSGPAGGVVGYSATTYQQEGGQPVIGFDMGGTSTDVSRYAGEFEHVFEASTAGVTLQAPQLDINTVAAGGGSRLFFRSGLFVVGPESAGAHPGPACYRKGGPVTVTDANLVLGRLLPASFPCIFGPGENQPLSPEASRKALEAVATEVNSFLTNGPCPASPLSLEEVAMGFVRVANEAMCRPIRALTQARGHDPSAHVLACFGGAGGQHACAIARALGMDTVHIHRHSGLLSALGLALADVVHEAQEPCSLLYAPETFVQLDQRLSRLEEQCVDALQAQGFPRSQISTESFLHLRYQGTDCALMVSAHQHPATARSPRAGDFGAAFVERYMREFGFVIPERPVVVDDVRVRGTGRSGLRLEDAPKAQTGPPRVDKMTQCYFEGGYQETPVYLLAELGYGHKLHGPCLIIDSNSTILVEPGCQAEVTKTGDICISVGAEVPGTVGPQLDPIQLSIFSHRFMSIAEQMGRILQRTAISTNIKERLDFSCALFGPDGGLVSNAPHIPVHLGAMQETVQFQIQHLGADLHPGDVLLSNHPSAGGSHLPDLTVITPVFWPGQTRPVFYVASRGHHADIGGITPGSMPPHSTMLQQEGAVFLSFKLVQGGVFQEEAVTEALRAPGKVPNCSGTRNLHDNLSDLRAQVAANQKGIQLVGELIGQYGLDVVQAYMGHIQANAELAVRDMLRAFGTSRQARGLPLEVSSEDHMDDGSPIRLRVQISLSQGSAVFDFSGTGPEVFGNLNAPRAVTLSALIYCLRCLVGRDIPLNQGCLAPVRVVIPRGSILDPSPEAAVVGGNVLTSQRVVDVILGAFGACAASQGCMNNVTLGNAHMGYYETVAGGAGAGPSWHGRSGVHSHMTNTRITDPEILESRYPVILRRFELRRGARGAEAASEAATASPASCSFVRRRCCQC

SEQ ID NO: 5612 - DNA, 702 bp, Homo sapiens
acgtgctactgagcaaccatcccagtgccgggggcagccacctgccagacctgactgttatcacaccggtgaggggtgctgcccgcctgcctctgctggggcagtggtggccgatgcagctgaccgtggctctccacccgctaggtgttttggccgggtcagacgcggcctgtgttctatgtggccagccgagggcaccacgcagacatcgggggcatcacaccaggctccatgcccccccactccaccatgctgcaacaggagggtgccgtctttctgtccttcaaacttgtccaggggggcgtcttccaggaggaggcggtgacggaggccctgcgggcgccaggcaaggtccccaactgcagcggaaccagaaacctgcacgacaacctgtcggacctccgtgcccaggtggcagccaaccagaagggcatccagctggtgggggagctcattgggcagtacggcctggacgtggtgcaggcctacatgggccatattcaggcaaacgctgagctggccgtgcgagacatgttgcgtgcctttggaacctcccggcaggcccggggcctgcccctggaggtgtcctcggaagaccacatggacgacggttcccccatccgcctccgtgtgcagatcagcctgagtcaggtgggccgtggggagagtgcctctaggcggcaggggcacggtgcggccgct

SEQ ID NO: 5613 - protein, 156 aa, Homo sapiens
MPPHSTMLQQEGAVFLSFKLVQGGVFQEEAVTEALRAPGKVPNCSGTRNLHDNLSDLRAQVAANQKGIQLVGELIGQYGLDVVQAYMGHIQANAELAVRDMLRAFGTSRQARGLPLEVSSEDHMDDGSPIRLRVQISLSQVGRGESASRRQGHGAA

SEQ ID NO: 5614 - DNA, 249 bp, Homo sapiens
cctcatcatcgacagtaacagcaccatcctggtggagccaggttgccaggcagaggtgaccaagacaggggacatctgcatctccgtgggggccgaagtccccggcacagtgggcccccagctggaccctatccagctgtccatcttctcacaccgcttcatgagcattgctgattcagcacctgggggccgatctccaccctggcgacgtgctactgagcaaccatcccagtgccgggggcagccacc

SEQ ID NO: 5615 - protein, 51 aa, Homo sapiens
QHHPGGARLPGRGDQDRGHLHLRGGRSPRHSGPPAGPYPAVHLLTPLHEHC

SEQ ID NO: 5616 - DNA, 399 bp, Homo sapiens
atgtccctcctcagcagctatgagggcctgcggcaggagatccagcggctggcacaggagaacgaagagctgcggcggctggtgcagctcatccaggagaaccaggagctgaagctggtgctcaggaaccgcggcagcagcctgggcttctgcagctccgggttcctggctgaggtggctgccagtccctggctacccaggcggagaacgatcaaattcaagaatgctgagagaggacacctggaggtgggatcctggggcgcccacgctaggcgagcccaggcccggcgccggagacccgagggccgcagagccaaggtgcccttgatcctgcgcccgtggcccggggaagcgcagggcgaggacggaggcgcggggggcgggcccggcctgatgtaa

SEQ ID NO: 5617 - protein, 132 aa, Homo sapiens
MSLLSSYEGLRQEIQRLAQENEELRRLVQLIQENQELKLVLRNRGSSLGFCSSGFLAEVAASPWLPRRRTIKFKNAERGHLEVGSWGAHARRAQARRRRPEGRRAKVPLILRPWPGEAQGEDGGAGGGPGLM

SEQ ID NO: 5618 - DNA, 897 bp, Homo sapiens
atggcggacctccggaaaccgtagattccgggcggtcggagccgccgggagctgtagttctcccgcggctcagagaagtaggcagagagcggacctggcggccgggcagcatggcggggctggagctcttgtcggaccagggctaccgggtggacgggcggcgcgccggggagctgcgcaagatccaggcgcggatgggcgtgttcgcgcaggctgacggctcggcctacattgagcagggcaacaccaaggcactggctgtggtctacggcccgcacgagatccggggctcccgggctcgagccctgccggacagggccctagtgaactgtcaatatagttcagcgaccttcagcacaggtgagcgcaagcgacggccacatggggaccgtaagtcctgtgagatgggcctgcagctccgccagactttcgaagcagccatcctcacacagctgcacccacgctcccagattgatatctatgtgcaggtgctacaggcagatggtgggacctatgcagcttgtgtgaatgcagccacgctggcagtgctggatgccgggatacccatgagagactttgtgtgtgcgtgctcagctggcttcgtggacggcacagccctggcggacctcagccatgtggaggaagcagctggtggcccccagctggccctggccctgctgccagcctcaggacagattgcgctgcttgagatggatgcccggctgcacgaggaccacctggagcgggtgttggaggctgctgcccaggctgcccgagatgtgcacaccctcttagatcgagtggtccggcagcatgtgcgtgaggcctctatcttgctgggggactgaccacccagccacccatgtccagaataaaaccctcctctgcccacacacc

SEQ ID NO: 5619 - protein, 245 aa, Homo sapiens; identical to SEQ ID NO: 771

SEQ ID NO: 5620 - DNA, 1133 bp, Homo sapiens
tgcttagcgcatgagtgtgggagctctgctttccaggcggagggaaccagaagggcgaagaccacggtggtgaaaacaagcaaggcacttatgcagagcagaaagactgctggtggggaaagaggggataactccaaatcaggttgagggttcccggggaggtgaggacttagggttttgtagagtagggaaatgatttgggatcttatttcatatgtaatgtgaaacctttgtaaggtagttaggatttgagtgtgtaggtgagacagaagcagcgttgatgtttgtaaacttgggttggcagggaatggggcaaggatggacacaaggaagccaattaaaaggtgccagagggcgacacatgcaagacagagagcgcaaaacagggggctttgttttggaggtaacgcagttgccccttgctgaggcattgaaagtggagggagaggcagacccacagaggacagtggagtgtgagctggaaggagtgggcctggctcatgtgtctgtcctcttccagatccggggctcccgggctcgagccctgccggacagggccctagtgaactgtcaatatagttcagcgaccttcagcacaggtgagcgcaagcgacggccacatggggaccgtaagtcctgtgagatgggcctgcagctccgccagactttcgaagcagccatcctcacacagctgcacccacgctcccagattgatatctatgtgcaggtgctacaggcagatggtgggacctatgcagcttgtgtgaatgcagccacgctggcagtgctggatgccgggatacccatgagagactttgtgtgtgcgtgctcagctggcttcgtggacggcacagccctggcggacctcagccatgtggaggaagcagctggtggcccccagctggccctggccctgctgccagcctcaggacagattgcgctgcttgagatggatgcccggctgcacgaggaccacctggagcgggtgttggaggctgctgcccaggctgcccgagatgtgcacaccctcttagatcgagtggtccggcagcatgtgcgtgaggcctctatcttgctgggggactgaccacccagccacccatgtccagaataaaaccctcctctgcccacac

SEQ ID NO: 5621 - protein, 268 aa, Homo sapiens
MFVNLGWQGMGQGWTQGSQLKGARGRHMQDRERKTGGFVLEVTQLPLAEALKVEGEADPQRTVECELEGVGLAHVSVLFQIRGSRARALPDRALVNCQYSSATFSTGERKRRPHGDRKSCEMGLQLRQTFEAAILTQLHPRSQIDIYVQVLQADGGTYAACVNAATLAVLDAGIPMRDFVCACSAGFVDGTALADLSHVEEAAGGPQLALALLPASGQIALLEMDARLHEDHLERVLEAAAQAARDVHTLLDRVVRQHVREASILLGD

SEQ ID NO: 5622 - DNA, 1568 bp, Homo sapiens
gtgtgtacagactgggtctcatttcgttgtccaggctgatctcaaaggatccacccacctcaccttcccaaagtgcaccctcttgagcaaactcccccttcattcacctctggcccaccgagccccgactaccagtccctgcagtctggaccctgggactgcttctcccctaatattccacggatctcctggcccggacagtgacagtatgatcccccactttataatgcacacaccccagctccagtgaagcccgttttggccagtagtgccatcagcatcttctctgcagtcatctgactctgaaaacctcggtgctgggctcacgctgtgactccactgggacgtcctgagtcattggcagtctcgcttggcatccattctctgaccgccgccggctttccacccacctgcccggctcatcacctctgactcctgcgggccttccagccggcgctatctcgcagcccccgaccagctcggcctgctgtcgggcatctctgctgtcctccggctgtagggctacctgcctccctcccggggggtgcactgcgagtccgactctagtgggggcagcgcctagcggactcccaaacccgctcaggtcctgccggcctcaccggcaccgcccaccctccagccggccgcggctctgcgcttgcgcgccggcagcacacagtgttaggggcgcgccctctgctctggacatgcgcgccgtcgcgagcgtctctgggaccggaagtgcgggcgagcgcgggtccccgggtctgacaggagcagcctgtgggcaccgcggcggtagttggaggcgggagagggtccgtagccgcgccgccctgccccgccatgggcctcctgtcggacccggttcgccggcgcgcgctcgcccgcctagtgctgcgcctcaacgcgccgttgtgcgtgctgagctacgtggcgggcatcgcctggttcttggcgctggttttcccgccgctgacccagcgcacttacatgtcggagaacgccatgggctccaccatggtggaggagcagtttgcgggcggagaccgtgcccgggcttttgcccgggacttcgccgcccaccgcaagaagtcgggggctctgccagtggcctggcttgaacggacgatgcggtcagtagggctggaggtctacacgcagagtttctcccggaaactgcccttcccagatgagacccacgagcgctatgtactgggggagtggggtgtgcctgggcccagaaagcaccttggagggaggggtctgggctgggtatcaccttgcgggggtgtcatggggccaggaagctcagtgggagggaaatccctggtgggcactggagggctaggaaagttgtggggggcccttcagccccctaccacaaagttacactgaggctccccccaccgatgctgcatacagatggtgtcgggcaccaacgtgtacggcatcctgcgggccccgcgtgctgccagcaccgagtcgcttgtgctcaccgtgccctgtggctctgactctaccaacagccaggctgtggggctgctgctggcactggctgcccactt

SEQ ID NO: 5623 - protein, 183 aa, Homo sapiens
MGLLSDPVRRRALARLVLRLNAPLCVLSYVAGIAWFLALVFPPLTQRTYMSENAMGSTMVEEQFAGGDRARAFARDFAAHRKKSGALPVAWLERTMRSVGLEVYTQSFSRKLPFPDETHERYVLGEWGVPGPRKHLGGRGLGWVSPCGGVMGPGSSVGGKSLVGTGGLGKLWGALQPPTTKLH

SEQ ID NO: 5624 - DNA, 2807 bp, Homo sapiens
gtgtgtacagactgggtctcatttcgttgtccaggctgatctcaaaggatccacccacctcaccttcccaaagtgcaccctcttgagcaaactcccccttcattcacctctggcccaccgagccccgactaccagtccctgcagtctggaccctgggactgcttctcccctaatattccacggatctcctggcccggacagtgacagtatgatcccccactttataatgcacacaccccagctccagtgaagcccgttttggccagtagtgccatcagcatcttctctgcagtcatctgactctgaaaacctcggtgctgggctcacgctgtgactccactgggacgtcctgagtcattggcagtctcgcttggcatccattctctgaccgccgccggctttccacccacctgcccggctcatcacctctgactcctgcgggccttccagccggcgctatctcgcagcccccgaccagctcggcctgctgtcgggcatctctgctgtcctccggctgtagggctacctgcctccctcccggggggtgcactgcgagtccgactctagtgggggcagcgcctagcggactcccaaacccgctcaggtcctgccggcctcaccggcaccgcccaccctccagccggccgcggctctgcgcttgcgcgccggcagcacacagtgttaggggcgcgccctctgctctggacatgcgcgccgtcgcgagcgtctctgggaccggaagtgcgggcgagcgcgggtccccgggtctgacaggagcagcctgtgggcaccgcggcggtagttggaggcgggagagggtccgtagccgcgccgccctgccccgccatgggcctcctgtcggacccggttcgccggcgcgcgctcgcccgcctagtgctgcgcctcaacgcgccgttgtgcgtgctgagctacgtggcgggcatcgcctggttcttggcgctggttttcccgccgctgacccagcgcacttacatgtcggagaacgccatgggctccaccatggtggaggagcagtttgcgggcggagaccgtgcccgggcttttgcccgggacttcgccgcccaccgcaagaagtcgggggctctgccagtggcctggcttgaacggacgatgcggtcagtagggctggaggtctacacgcagagtttctcccggaaactgcccttcccagatgagacccacgagcgctatatggtgtcgggcaccaacgtgtacggcatcctgcgggccccgcgtgctgccagcaccgagtcgcttgtgctcaccgtgccctgtggctctgactctaccaacagccaggctgtggggctgctgctggcactggctgcccacttccgggggcagatttattgggccaaagatatcgtcttcctggtaacagaacatgaccttctgggcactgaggcttggcttgaagcctaccacgatgtcaatgtcactggcatgcagtcgtctcccctgcagggccgagctggggccattcaggcagccgtggccctggagctgagcagtgatgtggtcaccagcctcgatgtggccgtggaggggcttaacgggcagctgcccaaccttgacctgctcaatctcttccagaccttctgccagaaagggggcctgttgtgcacgcttcagggcaagctgcagcccgaggactggacatcattggatggaccgctgcagggcctgcagacactgctgctcatggttctgcggcaggcctccggccgcccccacggctcccatggcctcttcctgcgctaccgtgtggaggccctaaccctgcgtggcatcaatagcttccgccagtacaagtatgacctggtggcagtgggcaaggctttggagggcatgttccgcaagctcaaccacctcctggagcgcctgcaccagtccttcttcctctacttgctccccggcctctcccgcttcgtctccatcggcctctacatgcccgctgtcggcttcttgctcctggtccttggtctcaaggctctggaactgtggatgcagctgcatgaggctggaatgggccttgaggagcccgggggtgcccctggccccagtgtaccccttcccccatcacagggtgtggggctggcctcgctcgtggcacctctgctgatctcacaggccatgggactggccctctatgtcctgccagtgctgggccaacacgttgccacccagcacttcccagtggcagaggctgaggctgtggtgctgacactgctggcgatttatgcagctggcctggccctgccccacaatacccaccgggtggtaagcacacaggccccagacaggggctggatggcactgaagctggtagccctgatctacctagcactgcagctgggctgcatcgccctcaccaacttctcactgggcttcctgctggccaccaccatggtgcccactgctgcgcttgccaagcctcatgggccccggaccctctatgctgccctgctggtgctgaccagcccggcagccacgctccttggcagcctgttcctgtggcgggagctgcaggaggcgccactgtcactggccgagggctggcagctcttcctggcagcgctagcccagggtgtgctggagcaccacacctacggcgccctgctcttcccactgctgtccctgggcctctacccctgctggctgcttttctggaatgtgctcttctggaagtgagatctgcctgtccgggctgggacagagactccccaaggaccccattctgcctccttctggggaaataaatgagtgtctgtttcagcagctatttg

SEQ ID NO: 5625 - protein, 621 aa, Homo sapiens; identical to SEQ ID NO: 773

SEQ ID NO: 5626 - DNA, 3020 bp, Homo sapiens
gtgtgtacagactgggtctcatttcgttgtccaggctgatctcaaaggatccacccacctcaccttcccaaagtgcaccctcttgagcaaactcccccttcattcacctctggcccaccgagccccgactaccagtccctgcagtctggaccctgggactgcttctcccctaatattccacggatctcctggcccggacagtgacagtatgatcccccactttataatgcacacaccccagctccagtgaagcccgttttggccagtagtgccatcagcatcttctctgcagtcatctgactctgaaaacctcggtgctgggctcacgctgtgactccactgggacgtcctgagtcattggcagtctcgcttggcatccattctctgaccgccgccggctttccacccacctgcccggctcatcacctctgactcctgcgggccttccagccggcgctatctcgcagcccccgaccagctcggcctgctgtcgggcatctctgctgtcctccggctgtagggctacctgcctccctcccggggggtgcactgcgagtccgactctagtgggggcagcgcctagcggactcccaaacccgctcaggtcctgccggcctcaccggcaccgcccaccctccagccggccgcggctctgcgcttgcgcgccggcagcacacagtgttaggggcgcgccctctgctctggacatgcgcgccgtcgcgagcgtctctgggaccggaagtgcgggcgagcgcgggtccccgggtctgacaggagcagcctgtgggcaccgcggcggtagttggaggcgggagagggtccgtagccgcgccgccctgccccgccatgggcctcctgtcggacccggttcgccggcgcgcgctcgcccgcctagtgctgcgcctcaacgcgccgttgtgcgtgctgagctacgtggcgggcatcgcctggttcttggcgctggttttcccgccgctgacccagcgcacttacatgtcggagaacgccatgggctccaccatggtggaggagcagtttgcgggcggagaccgtgcccgggcttttgcccgggacttcgccgcccaccgcaagaagtcgggggctctgccagtggcctggcttgaacggacgatgcggtcagtagggctggaggtctacacgcagagtttctcccggaaactgcccttcccagatgagacccacgagcgctatgtactgggggagtggggtgtgcctgggcccagaaagcaccttggagggaggggtctgggctgggtatcaccttgcgggggtgtcatggggccaggaagctcagtgggagggaaatccctggtgggcactggagggctaggaaagttgtggggggcccttcagccccctaccacaaagttacactgaggctccccccaccgatgctgcatacagatggtgtcgggcaccaacgtgtacggcatcctgcgggccccgcgtgctgccagcaccgagtcgcttgtgctcaccgtgccctgtggctctgactctaccaacagccaggctgtggggctgctgctggcactggctgcccacttccgggggcagatttattgggccaaagatatcgtcttcctggtaacagaacatgaccttctgggcactgaggcttggcttgaagcctaccacgatgtcaatgtcactggcatgcagtcgtctcccctgcagggccgagctggggccattcaggcagccgtggccctggagctgagcagtgatgtggtcaccagcctcgatgtggccgtggaggggcttaacgggcagctgcccaaccttgacctgctcaatctcttccagaccttctgccagaaagggggcctgttgtgcacgcttcagggcaagctgcagcccgaggactggacatcattggatggaccgctgcagggcctgcagacactgctgctcatggttctgcggcaggcctccggccgcccccacggctcccatggcctcttcctgcgctaccgtgtggaggccctaaccctgcgtggcatcaatagcttccgccagtacaagtatgacctggtggcagtgggcaaggctttggagggcatgttccgcaagctcaaccacctcctggagcgcctgcaccagtccttcttcctctacttgctccccggcctctcccgcttcgtctccatcggcctctacatgcccgctgtcggcttcttgctcctggtccttggtctcaaggctctggaactgtggatgcagctgcatgaggctggaatgggccttgaggagcccgggggtgcccctggccccagtgtaccccttcccccatcacagggtgtggggctggcctcgctcgtggcacctctgctgatctcacaggccatgggactggccctctatgtcctgccagtgctgggccaacacgttgccacccagcacttcccagtggcagaggctgaggctgtggtgctgacactgctggcgatttatgcagctggcctggccctgccccacaatacccaccgggtggtaagcacacaggccccagacaggggctggatggcactgaagctggtagccctgatctacctagcactgcagctgggctgcatcgccctcaccaacttctcactgggcttcctgctggccaccaccatggtgcccactgctgcgcttgccaagcctcatgggccccggaccctctatgctgccctgctggtgctgaccagcccggcagccacgctccttggcagcctgttcctgtggcgggagctgcaggaggcgccactgtcactggccgagggctggcagctcttcctggcagcgctagcccagggtgtgctggagcaccacacctacggcgccctgctcttcccactgctgtccctgggcctctacccctgctggctgcttttctggaatgtgctcttctggaagtgagatctgcctgtccgggctgggacagagactccccaaggaccccattctgcctccttctggggaaataaatgagtgtctgtttcagcagctatttg

SEQ ID NO: 5627 - protein, 499 aa, Homo sapiens
MVSGTNVYGILRAPRAASTESLVLTVPCGSDSTNSQAVGLLLALAAHFRGQIYWAKDIVFLVTEHDLLGTEAWLEAYHDVNVTGMQSSPLQGRAGAIQAAVALELSSDVVTSLDVAVEGLNGQLPNLDLLNLFQTFCQKGGLLCTLQGKLQPEDWTSLDGPLQGLQTLLLMVLRQASGRPHGSHGLFLRYRVEALTLRGINSFRQYKYDLVAVGKALEGMFRKLNHLLERLHQSFFLYLLPGLSRFVSIGLYMPAVGFLLLVLGLKALELWMQLHEAGMGLEEPGGAPGPSVPLPPSQGVGLASLVAPLLISQAMGLALYVLPVLGQHVATQHFPVAEAEAVVLTLLAIYAAGLALPHNTHRVVSTQAPDRGWMALKLVALIYLALQLGCIALTNFSLGFLLATTMVPTAALAKPHGPRTLYAALLVLTSPAATLLGSLFLWRELQEAPLSLAEGWQLFLAALAQGVLEHHTYGALLFPLLSLGLYPCWLLFWNVLFWK

SEQ ID NO: 5628 - DNA, 810 bp, Homo sapiens
ctctgaccgccgccggctttccacccacctgcccggctcatcacctctgactcctgcgggccttccagccggcgctatctcgcagcccccgaccagctcggcctgctgtcgggcatctctgctgtcctccggctgtagggctacctgcctccctcccggggggtgcactgcgagtccgactctagtgggggcagcgcctagcggactcccaaacccgctcaggtcctgccggcctcaccggcaccgcccaccctccagccggccgcggctctgcgcttgcgcgccggcagcacacagtgttaggggcgcgccctctgctctggacatgcgcgccgtcgcgagcgtctctgggaccggaagtgcgggcgagcgcgggtccccgggtctgacaggagcagcctgtgggcaccgcggcggtagttggaggcgggagagggtccgtagccgcgccgccctgccccgccatgggcctcctgtcggacccggttcgccggcgcgcgctcgcccaccgcaagaagtcgggggctctgccagtggcctggcttgaacggacgatgcggtcagtagggctggaggtctacacgcagagtttctcccggaaactgcccttcccagatgagacccacgagcgctatatggtgtcgggcaccaacgtgtacggcatcctgcgggccccgcgtgctgccagcaccgagtcgcttgtgctcaccgtgccctgtggctctgactctaccaacagccaggctgtggggctgctgctggcactggctgcccacttccgggggcagatttattgggccaaagatatcg

SEQ ID NO: 5629 - protein, 114 aa, Homo sapiens
MGLLSDPVRRRALAHRKKSGALPVAWLERTMRSVGLEVYTQSFSRKLPFPDETHERYMVSGTNVYGILRAPRAASTESLVLTVPCGSDSTNSQAVGLLLALAAHFRGQIYWAKD
